United States Patent Application Publication US 2006/0150283 A1 - sequence listing, part 15

SEQ ID NO: 58004 - protein, 295 aa, Glycine max
  peptide (1)..(295): Ceres Seq. ID no. 14314911
MGFPKMEEQKAIQEAASEGLKAMEHLLRLLSYQPSHLHAHHTDATVSNFKKLISLLSRRTGHARFRRAPLPSPPPANPVTLHQPPSTFVPSHSQSLTLDFTKPSIFASNAKSMDLQFSKETFSVSSNSSFMSSAITGDASVSYGKLGSSLFLTPPPVSAGKPPLSSAPIKKRCHDHREHSDEISGKLSGSSKCHCTKRRKNRVKKTVRVPVISSKIADIPPDEYSWRKYGQKPIKGSPYPRGYYKCSSVIGCPARKHVERAPDDPTMLIVTYEGEHRHSMQENISGGVGLGFEST

SEQ ID NO: 58005 - protein, 290 aa, Glycine max
  peptide (1)..(290): Ceres Seq. ID no. 14314912
MEEQKAIQEAASEGLKAMEHLLRLLSYQPSHLHAHHTDATVSNFKKLISLLSRRTGHARFRRAPLPSPPPANPVTLHQPPSTFVPSHSQSLTLDFTKPSIFASNAKSMDLQFSKETFSVSSNSSFMSSAITGDASVSYGKLGSSLFLTPPPVSAGKPPLSSAPIKKRCHDHREHSDEISGKLSGSSKCHCTKRRKNRVKKTVRVPVISSKIADIPPDEYSWRKYGQKPIKGSPYPRGYYKCSSVIGCPARKHVERAPDDPTMLIVTYEGEHRHSMQENISGGVGLGFEST

SEQ ID NO: 58006 - DNA, 1294 bp, Glycine max
  misc_feature (1)..(1294): Ceres Seq. ID no. 13594429
cctagaacatcataatcgaaaaaaatcactgagtctcacaccaaccaacaatcaacaacaagaacttagccacatacatacagaatacagattaataacccaaccacatgccaaacaccactgaagaattccataacaacaactgcttcgagtctctccatgtttcccttcgcaacctctcccaactcagcacccgaatggattcccttcaaagcttcctgtcccattccatccaatcccacactctcctcactcaccaccaaatgagcacagtctccaacgagatcctaaccgccattcgccacgtcatcaccaacagcgccgccctcgtcgccgcctcgggaaacgtgctccctctctcggagactccgactttggactctccgaacctcaacaacaacaacagcaacgacaacgtggtggagctcgacgcgatggagctgctggcgaagcaccttcacttctgcgaggtgtgcgggaaaggcttcacgcgcgacgcgaatctgagaatgcacatgcgcgcgcacggggacgagttcaagaccccggaggcactcgccaacaaggcgcgtggggagacgcgcctcaaggcggcgcggttttcgtgccccttggaggggtgcaaccgtaacaagacgcacaagaagttcaggccgttgaagtcggtgttctgtctgaggaaccacttcaagaggagccactgtcccaaaacgctgtcgtgccagcggtgtcggaagaagagcttcgcggtgctgtcggacttgaggagccacgtcaagcagtgtcggggagaggccacgtggaagtgctcatgcgggactacgttttcgaggaaggacaagctgttgggacacgtggcgctgttcgaggggcattcgccgatgcttgaagaggaggccccagtggcagtggcggtgaaggaaagtgagggtggtttggatgggttacctgaagggttctttgatggtttggatgaatttggatttggatccattcaaaacaactgttcacatgcaggagcaagcttagccttagggcttccctcaaataatttatatgcatgggaactctctttttctaatttaatctagaagctaaataatcaaattcaacactgaaaagtgtcatataatgcaatcaattctttataaatttaatttataaatatattaaaaatgkgatagattagctttwttwtttaaaaaaaaaaaaaaaaaaaaaaaaaaaaaaaaaaaaaaaaaaycmmaaaaaaaaaaaaaaaagsttwttcratmccgycgaccctcgagggggg

SEQ ID NO: 58007 - protein, 327 aa, Glycine max
  peptide (1)..(327): Ceres Seq. ID no. 15221349
MPNTTEEFHNNNCFESLHVSLRNLSQLSTRMDSLQSFLSHSIQSHTLLTHHQMSTVSNEILTAIRHVITNSAALVAASGNVLPLSETPTLDSPNLNNNNSNDNVVELDAMELLAKHLHFCEVCGKGFTRDANLRMHMRAHGDEFKTPEALANKARGETRLKAARFSCPLEGCNRNKTHKKFRPLKSVFCLRNHFKRSHCPKTLSCQRCRKKSFAVLSDLRSHVKQCRGEATWKCSCGTTFSRKDKLLGHVALFEGHSPMLEEEAPVAVAVKESEGGLDGLPEGFFDGLDEFGFGSIQNNCSHAGASLALGLPSNNLYAWELSFSNLI

SEQ ID NO: 58008 - protein, 297 aa, Glycine max
  peptide (1)..(297): Ceres Seq. ID no. 15221350
MDSLQSFLSHSIQSHTLLTHHQMSTVSNEILTAIRHVITNSAALVAASGNVLPLSETPTLDSPNLNNNNSNDNVVELDAMELLAKHLHFCEVCGKGFTRDANLRMHMRAHGDEFKTPEALANKARGETRLKAARFSCPLEGCNRNKTHKKFRPLKSVFCLRNHFKRSHCPKTLSCQRCRKKSFAVLSDLRSHVKQCRGEATWKCSCGTTFSRKDKLLGHVALFEGHSPMLEEEAPVAVAVKESEGGLDGLPEGFFDGLDEFGFGSIQNNCSHAGASLALGLPSNNLYAWELSFSNLI

SEQ ID NO: 58009 - protein, 275 aa, Glycine max
  peptide (1)..(275): Ceres Seq. ID no. 15221351
MSTVSNEILTAIRHVITNSAALVAASGNVLPLSETPTLDSPNLNNNNSNDNVVELDAMELLAKHLHFCEVCGKGFTRDANLRMHMRAHGDEFKTPEALANKARGETRLKAARFSCPLEGCNRNKTHKKFRPLKSVFCLRNHFKRSHCPKTLSCQRCRKKSFAVLSDLRSHVKQCRGEATWKCSCGTTFSRKDKLLGHVALFEGHSPMLEEEAPVAVAVKESEGGLDGLPEGFFDGLDEFGFGSIQNNCSHAGASLALGLPSNNLYAWELSFSNLI

SEQ ID NO: 58010 - DNA, 1061 bp, Glycine max
  misc_feature (1)..(1061): Ceres Seq. ID no. 14314939
aattcaggcgatggcgccgcgtctctggtcctgcttccgcagcagcagtagcaagggcagcaccaccggcggcggtgtctccgacgcctccgcctcgcggcgcgtggtgactgcggacctgacatcggaggagcagaagcgcgggggcccggtggtggtggagatgttctcgtcgcaggggtgcgcgacttcaccggcggcggagctggtgctgtcgcggctggggagaggggatttcgagctggaggcgccggtggtggtgctggctttccacgttgactactgggactatatgggatggaaggatccgttcggggccagccagtggacggttcggcagaaggcctatgttgaggcccttgggcttgacaccattttcacgccacaggttgtggttcagggaaaggcccagtgtgttggaaatgacgagaacgcccttgtttctgccattactagtgctcctaggttccctgctccaaccttccaggcaactttcaccaggcctgcaccagattcattgcaagtgtccctaacaggagcattgaggaccaaggtggacagcgatggcgcgaatgtcatggttgcattatacgaaaacggtttggtcaccgattgtccaagaggggagaacaaagggcgtgtcctatccaacgactatgttgttagaaagctcgaaaagctctgcactgtcaaagacatctctgccaagaaaacagtatcaggaatggttaactttcccttatgggaaggattcaaaagcagcaaatgtggtttggctgtctttgttcagagcaaatctcaccagatttttggttcacagagttttcagctgccggatgatatatgattctgattctttagtttcatttgatctgcttgctgttatcatattcgggttacattgtgttttgttaggctatatgtacagattgtgatatgatttaggataataaatgttgttttctttcttttcttacatattttttcctatgtactttgtccttccttactattgaccctatgtttaggagatggagagagaagtctaaatttgtggcgtg

SEQ ID NO: 58011 - protein, 281 aa, Glycine max
  peptide (1)..(281): Ceres Seq. ID no. 14314940
IQAMAPRLWSCFRSSSSKGSTTGGGVSDASASRRVVTADLTSEEQKRGGPVVVEMFSSQGCATSPAAELVLSRLGRGDFELEAPVVVLAFHVDYWDYMGWKDPFGASQWTVRQKAYVEALGLDTIFTPQVVVQGKAQCVGNDENALVSAITSAPRFPAPTFQATFTRPAPDSLQVSLTGALRTKVDSDGANVMVALYENGLVTDCPRGENKGRVLSNDYVVRKLEKLCTVKDISAKKTVSGMVNFPLWEGFKSSKCGLAVFVQSKSHQIFGSQSFQLPDDI

SEQ ID NO: 58012 - protein, 278 aa, Glycine max
  peptide (1)..(278): Ceres Seq. ID no. 14314941
MAPRLWSCFRSSSSKGSTTGGGVSDASASRRVVTADLTSEEQKRGGPVVVEMFSSQGCATSPAAELVLSRLGRGDFELEAPVVVLAFHVDYWDYMGWKDPFGASQWTVRQKAYVEALGLDTIFTPQVVVQGKAQCVGNDENALVSAITSAPRFPAPTFQATFTRPAPDSLQVSLTGALRTKVDSDGANVMVALYENGLVTDCPRGENKGRVLSNDYVVRKLEKLCTVKDISAKKTVSGMVNFPLWEGFKSSKCGLAVFVQSKSHQIFGSQSFQLPDDI

SEQ ID NO: 58013 - protein, 227 aa, Glycine max
  peptide (1)..(227): Ceres Seq. ID no. 14314942
MFSSQGCATSPAAELVLSRLGRGDFELEAPVVVLAFHVDYWDYMGWKDPFGASQWTVRQKAYVEALGLDTIFTPQVVVQGKAQCVGNDENALVSAITSAPRFPAPTFQATFTRPAPDSLQVSLTGALRTKVDSDGANVMVALYENGLVTDCPRGENKGRVLSNDYVVRKLEKLCTVKDISAKKTVSGMVNFPLWEGFKSSKCGLAVFVQSKSHQIFGSQSFQLPDDI

SEQ ID NO: 58014 - DNA, 1624 bp, Glycine max
  misc_feature (1)..(1624): Ceres Seq. ID no. 15225233
ttctgtcagtttaagactttattgtatagtnatacctattgggtagttaagatttatttctaaaacatctgataggtgtggattacttatattggagcgaagctggattctagcctcgcaaaatctgaaacatcaccctctgacttcacaagattaaaagattcaaagatttgcgaggtagcctctcatgcttgtttctactccattttaatggaaataaatcctcgaactttcagccgagttctttaggataagaggctaaatattcgatcacatgtactagtatatgttatccatattttaaggcaatgctcaaattgattattagattaattcaaagttagtaacttactataaaaaaaaaaaaaaaagctaacgttttaatttgtgggctgagcctggtttttctgggtacaaggccagaacccaacttgtagaaattcaagccaccactcatgatttttacatgagagggctatctgaaaatcgcattgataagaaagtttaatgatggaagcgggaactgctctcagtctccgactccacactcgcattcccattcccatcaacactgccaattcaaataccttattattccaacctcgcttcactctttcatctcattctccttcttccttttccgcttacagttacagaggccccacaccaaaacgccccttcctcgccgactgggtctcccaaaacgacgacgtcgttcgcaccctcccaatctacgtcggctctgcctccctcttcgccatcctcctaaaccgctccctgtccggcatcgcccccgtcgtcgacgccggcagttcgcagtcccgagctgacctcttgactttgggattggccgttaccaatattttggcaggcctcgtttggctttcagtaaaacctaaatctattactgtggtaaatcctcgaggagttgaatgcaagagtttgtgcgctacactccctgaagttgcacgtaatgagttgctttgggtgtgggaatctctatcagatgccacttgttgtcgttcacttgttgttgtttatgagagcagttgtgtactccaaattggttttgcagcagaatcttctcctggggatggtgacgctgtaagtgtggatgccaataaattgatgcaaggatcagtataccagggggttatgaaatctggtgctcagagttacttggctaatctatctctttatcctgggaaatctgagctgccatttctaccttcaaatacacaggcagtaattttacaaccacttggagataaagggattgcaattattggtggtgacacgatacgaggtttcactggttctgatcaggtgtggattacttatattggagcgaagctggattctagccttgcaaaatatctgaaacatcaccctctgacttcacaagattaaaagattcaaagatttgcgaggtagcctctcatgcttgtttctactccattttaatggaaataaatcctcgaactttcagccgagttctttaggataagaggctaaatattcgatcacatgtactagtatatgttatccatattttaaggcaatgctcaaattgattattagattaattcaaagttagtaacttactataaaaaaaaaaaaaaaa

SEQ ID NO: 58015 - protein, 300 aa, Glycine max
  peptide (1)..(300): Ceres Seq. ID no. 15225234
MMEAGTALSLRLHTRIPIPINTANSNTLLFQPRFTLSSHSPSSFSAYSYRGPTPKRPFLADWVSQNDDVVRTLPIYVGSASLFAILLNRSLSGIAPVVDAGSSQSRADLLTLGLAVTNILAGLVWLSVKPKSITVVNPRGVECKSLCATLPEVARNELLWVWESLSDATCCRSLVVVYESSCVLQIGFAAESSPGDGDAVSVDANKLMQGSVYQGVMKSGAQSYLANLSLYPGKSELPFLPSNTQAVILQPLGDKGIAIIGGDTIRGFTGSDQVWITYIGAKLDSSLAKYLKHHPLTSQD

SEQ ID NO: 58016 - protein, 299 aa, Glycine max
  peptide (1)..(299): Ceres Seq. ID no. 15225235
MEAGTALSLRLHTRIPIPINTANSNTLLFQPRFTLSSHSPSSFSAYSYRGPTPKRPFLADWVSQNDDVVRTLPIYVGSASLFAILLNRSLSGIAPVVDAGSSQSRADLLTLGLAVTNILAGLVWLSVKPKSITVVNPRGVECKSLCATLPEVARNELLWVWESLSDATCCRSLVVVYESSCVLQIGFAAESSPGDGDAVSVDANKLMQGSVYQGVMKSGAQSYLANLSLYPGKSELPFLPSNTQAVILQPLGDKGIAIIGGDTIRGFTGSDQVWITYIGAKLDSSLAKYLKHHPLTSQD

SEQ ID NO: 58017 - DNA, 848 bp, Glycine max
  misc_feature (1)..(848): Ceres Seq. ID no. 12608406
gtgacaatctttcttagctagatcagtgcctcatttttctttcagttttcctgcttcttctcttcttcaactggttttgagattgccattttcttatcttgtttagtttagcttgtttggttgagaggaattaattattttgtataaaacaatgaaggagagtgtaggaaaccctttgcgtcttcaatctgtgaatcatatctccctcatatgcagatcagtggaacaatcaatggatttctatcagaacgttcttggattttaccccatcaggaggcctggctctttagattttgatggggcatggctattcggctacggaattggaattcatttgctagaagcagagaaccctgaaaagttgccaaagaagaaggaaattaatccaaaggataatcatatatctttccagtgtgagagcatggttgcagtggagaagaagctgaaagaaatggaaattgactatgtgcgagcaacggtggaggaaggtggaatccaagtggatcaactgtttttccacgaccctgatgggttcatgatcgagatatgcaactgtgatagcctccctgtgattcccttagttggtgaggtggcaagatcatgttcccttgtgaatcttgagaagatgcagaatcagcagcagatacagaaaatgctccagcaactttgatgagccttttctgttatgttatgtgatcagagcatcctcacggatcacgaggacttgttgcttttttttttatgtggttgagttgtcaatgtgtcattctgttccttttgttttgttttctttaattgtgttatataataataaacaatctgccaaatagatcagcgcttttgcaacc

SEQ ID NO: 58018 - protein, 172 aa, Glycine max
  peptide (1)..(172): Ceres Seq. ID no. 12608407
MKESVGNPLRLQSVNHISLICRSVEQSMDFYQNVLGFYPIRRPGSLDFDGAWLFGYGIGIHLLEAENPEKLPKKKEINPKDNHISFQCESMVAVEKKLKEMEIDYVRATVEEGGIQVDQLFFHDPDGFMIEICNCDSLPVIPLVGEVARSCSLVNLEKMQNQQQIQKMLQQL

SEQ ID NO: 58019 - protein, 145 aa, Glycine max
  peptide (1)..(145): Ceres Seq. ID no. 12608408
MDFYQNVLGFYPIRRPGSLDFDGAWLFGYGIGIHLLEAENPEKLPKKKEINPKDNHISFQCESMVAVEKKLKEMEIDYVRATVEEGGIQVDQLFFHDPDGFMIEICNCDSLPVIPLVGEVARSCSLVNLEKMQNQQQIQKMLQQL

SEQ ID NO: 58020 - DNA, 752 bp, Glycine max
  misc_feature (1)..(752): Ceres Seq. ID no. 15172839
actcaatacaaacgaaattggtacaaaacaaaatgctactgtttctccggctgatgatgcagttgttgtgatgcgtcaaagcactgctccaactgctcgataattattctcgctgttaccgccagcaactgcttcttttgttagatctcaaagactgagttagtggttggaaaaggtttaattaacaagatgtgcaaaagaaagtgtccaggtcgagaattgaagctgccaagcaggcccacatcggcggagttatcatcgtcgacatcatcaggtgagtggccggaattatcatcgtcatcgtctgcatcttcggtatcatgtacatcaaagatgccgaaggagtcagaagaagagaacgagcaacgtgaaaattctactccagaaacaaaggccatggatctcgttggttgtcctcgatgcttcatgtacgtcatgttatccgaggtggatccaaagtgccctaagtgcaagaccacagtgtttcttgaacttttcaaagatgaaaacttgaagactaacagttgagttatggggagaattatgggaattaaataaataaaatcctcgtggttttaggacgtttgtttgtttgtgcttattttgtttgtaaaatctgaagcttcatatcttgttgagagtgaagtaaagattatgggagctagtatatggtagtgtaacgcgatgccacactatatgggtacggaacgaggaatcgtggtagtaataagatgcgcctattttttttcttt

SEQ ID NO: 58021 - protein, 112 aa, Glycine max
  peptide (1)..(112): Ceres Seq. ID no. 15172840
MCKRKCPGRELKLPSRPTSAELSSSTSSGEWPELSSSSSASSVSCTSKMPKESEEENEQRENSTPETKAMDLVGCPRCFMYVMLSEVDPKCPKCKTTVFLELFKDENLKTNS

SEQ ID NO: 58022 - protein, 64 aa, Glycine max
  peptide (1)..(64): Ceres Seq. ID no. 15172841
MPKESEEENEQRENSTPETKAMDLVGCPRCFMYVMLSEVDPKCPKCKTTVFLELFKDENLKTNS

SEQ ID NO: 58023 - DNA, 524 bp, Glycine max
  misc_feature (1)..(524): Ceres Seq. ID no. 15172842
aaaaacaaacaagggaatagaaagaaaagcgcaatgttgttacttgttgaaatcgaaaaagtaaagtgtttccattgaatcaatggggttatgggaggccttcggcaattggttacgcagctgatcatgacaatttatctgtctctaaatgaacttcatgacttgttgagcaaaccttctttaagtgggattcctatgcttattttgggtaataagattgacaaacctggggcattgtctaagcaagacctgacagagcagatgggactgaaatgcatcaatggtagagacgtttgttgcttcatgatctcctgtaaaaactccatcaacattgatacagttattgattggcttgtaaaacattctaaatggatgaactgaagcttgagttctgccctattgatctatttgtatgttgtattacagatgaacctagctgattgaacttctgttggtgtgatactagtttttcttttcccttttttgactagcttacaccaaaccagacaacatgtgatttgata

SEQ ID NO: 58024 - protein, 96 aa, Glycine max
  peptide (1)..(96): Ceres Seq. ID no. 15172843
MGGLRQLVTQLIMTIYLSLNELHDLLSKPSLSGIPMLILGNKIDKPGALSKQDLTEQMGLKCINGRDVCCFMISCKNSINIDTVIDWLVKHSKWMN

SEQ ID NO: 58025 - protein, 84 aa, Glycine max
  peptide (1)..(84): Ceres Seq. ID no. 15172844
MTIYLSLNELHDLLSKPSLSGIPMLILGNKIDKPGALSKQDLTEQMGLKCINGRDVCCFMISCKNSINIDTVIDWLVKHSKWMN

SEQ ID NO: 58026 - protein, 61 aa, Glycine max
  peptide (1)..(61): Ceres Seq. ID no. 15172845
MLILGNKIDKPGALSKQDLTEQMGLKCINGRDVCCFMISCKNSINIDTVIDWLVKHSKWMN

SEQ ID NO: 58027 - DNA, 532 bp, Glycine max
  misc_feature (1)..(532): Ceres Seq. ID no. 15172614
caagttctgtatttccttctcttttccaattgtttgagcgtgaatttttgcgttaatgaagtctgaaacctatgataaggggatatctgttgatgactggaaaatactggtaaagtggtaataggcaaagaagtgaagaatcacaattggtttggaggcccatcgcattgaggcaagtagaaaattgacccgcccaagtggagattcaagtcgggtaccgaacgtgcgactataaagggaatgaacgtggacaccccacgctttcttcacggcaacagaagaataatcaaatttctcagatctatccgacgtcgtcgcagatccaccaaccgttatggctgccttcagcggtgatgaaacggctccgtttttcggcttccttggagccgcagctgccctcgtcttctcctgtactccttccactctcttcaattcccccaatcacttccattagatccgtatttaccgtttcattatttatgtaatccgttcctaaaattgacttttaatccaatttcatgttccactgccc

SEQ ID NO: 58028 - protein, 43 aa, Glycine max
  peptide (1)..(43): Ceres Seq. ID no. 15172615
MKRLRFSASLEPQLPSSSPVLLPLSSIPPITSIRSVFTVSLFM

SEQ ID NO: 58029 - protein, 39 aa, Glycine max
  peptide (1)..(39): Ceres Seq. ID no. 15172616
MAAFSGDETAPFFGFLGAAAALVFSCTPSTLFNSPNHFH

SEQ ID NO: 58030 - protein, 37 aa, Glycine max
  peptide (1)..(37): Ceres Seq. ID no. 15172617
MNVDTPRFLHGNRRIIKFLRSIRRRRRSTNRYGCLQR

SEQ ID NO: 58031 - DNA, 1614 bp, Glycine max
  misc_feature (1)..(1614): Ceres Seq. ID no. 14314945
agagaaagaagaagacattctcagttgtgttgtctgacaaaacgaacagcaattgggagcagatgcaagatccatcttcaaaccctaattccaatccaaatcccaatcctcacaatgccaatgccgcatcccagctaccgcgtccaccgccggccaccaccgccggcgccggcgcctcctcgtcctcgctgttcgcgcgctccggcgggcctcaccaccggcgagcccattcggaagtgagtttccggctgccggacgacatgatggacctctcgccgtcggatccgttcgccggcgggtcgtcgacggccagcatggaggagatcggatcggaggacgacctgttctcgacgtacattgacgtggacaagctcggcggcgcaaacgggtcgggcgcctccggaaacggagcggatccgaccggcgaaaccgagaagagtccggcgaggccgcgacaccggcacagtagctccgtcgatttcggggaaattatggatgcgaagaaagctatgcctcctgataagttagctgagctatggacaattgatcccaagcgtgctaagagaatacttgcaaatcggcaatctgctgctcgatcgaaggagagaaaagcgcgctacatacaagaacttgagcgcaaggttcagactcttcagacggaagccacaactctttctgcccaattgaccttataccagagggacacaacaggactgagtactgaaaatacagagctaaagctccgtttgcaagccatggagcaacaagcacaacttcgtgacgctcttaatgaagcattgaagaaggaagttgagaggcttaaggttgctactggtgagatgatgagccacactgattcctttaatctgggaatgcacctgatgccattttccggatcaaatttcgttccaatcccgccacaatcaggtccttctggtcaccaaaacatgcagatgccaccatttggtctcaccccatccacaatgccaagccatctactgcatcaaacaagttctcatccatattcagaaatattgcaaaatgaccagcttggtcgtttccaggggcttgacattagtagcaaaggatcaactctcgtgaagtctgaaggcccctcactctccgcaagtgagagtagcactacattttgaatttgacagaaaatgcttgacctgctgacttatccatgccattcattgttcatagggttgacatttagtcaactaatgaaggtaccttatttcatgattcaaatttgaggattaattttaactatttattctaagggggtgctcaccaaaaaggggaagcacccatggggttttgttgcaaagttcacgtaatcatgtttcagcatggcatttggtgtttctgggagctggaatattgggaatgaaaggtcattcccattgtatctttgtatttgtatcatcgtttacgtgatagcatgtaaactgtgtgatttattgttgtgtttcactacattcagagtccaagacggactctttttctttctttctataattacttagtttcaggtttattcatagtcgttgtacaatgcaagagttttgggtactccgtacgtgttgtattaagcttcttccgagatcg

SEQ ID NO: 58032 - protein, 382 aa, Glycine max
  peptide (1)..(382): Ceres Seq. ID no. 14314946
RKKKTFSVVLSDKTNSNWEQMQDPSSNPNSNPNPNPHNANAASQLPRPPPATTAGAGASSSSLFARSGGPHHRRAHSEVSFRLPDDMMDLSPSDPFAGGSSTASMEEIGSEDDLFSTYIDVDKLGGANGSGASGNGADPTGETEKSPARPRHRHSSSVDFGEIMDAKKAMPPDKLAELWTIDPKRAKRILANRQSAARSKERKARYIQELERKVQTLQTEATTLSAQLTLYQRDTTGLSTENTELKLRLQAMEQQAQLRDALNEALKKEVERLKVATGEMMSHTDSFNLGMHLMPFSGSNFVPIPPQSGPSGHQNMQMPPFGLTPSTMPSHLLHQTSSHPYSEILQNDQLGRFQGLDISSKGSTLVKSEGPSLSASESSTTF

SEQ ID NO: 58033 - protein, 362 aa, Glycine max
  peptide (1)..(362): Ceres Seq. ID no. 14314947
MQDPSSNPNSNPNPNPHNANAASQLPRPPPATTAGAGASSSSLFARSGGPHHRRAHSEVSFRLPDDMMDLSPSDPFAGGSSTASMEEIGSEDDLFSTYIDVDKLGGANGSGASGNGADPTGETEKSPARPRHRHSSSVDFGEIMDAKKAMPPDKLAELWTIDPKRAKRILANRQSAARSKERKARYIQELERKVQTLQTEATTLSAQLTLYQRDTTGLSTENTELKLRLQAMEQQAQLRDALNEALKKEVERLKVATGEMMSHTDSFNLGMHLMPFSGSNFVPIPPQSGPSGHQNMQMPPFGLTPSTMPSHLLHQTSSHPYSEILQNDQLGRFQGLDISSKGSTLVKSEGPSLSASESSTTF

SEQ ID NO: 58034 - protein, 296 aa, Glycine max
  peptide (1)..(296): Ceres Seq. ID no. 14314948
MMDLSPSDPFAGGSSTASMEEIGSEDDLFSTYIDVDKLGGANGSGASGNGADPTGETEKSPARPRHRHSSSVDFGEIMDAKKAMPPDKLAELWTIDPKRAKRILANRQSAARSKERKARYIQELERKVQTLQTEATTLSAQLTLYQRDTTGLSTENTELKLRLQAMEQQAQLRDALNEALKKEVERLKVATGEMMSHTDSFNLGMHLMPFSGSNFVPIPPQSGPSGHQNMQMPPFGLTPSTMPSHLLHQTSSHPYSEILQNDQLGRFQGLDISSKGSTLVKSEGPSLSASESSTTF

SEQ ID NO: 58035 - DNA, 1062 bp, Glycine max
  misc_feature (1)..(1062): Ceres Seq. ID no. 15226854
gcttagtcgttcccaccatttttcctaatcccatttctctttttctcgttctcttgaatttctagggttaccgttggaaccactcgccagccacgtacgtacggaggctctctcttcctccgccatgaactcacggcaatcctctctgtcgccctgtgacatctgcggcgccacccaaaccctatctctgaccatccacaacatccgccaccgcgcccacacctgccgccactgcaccaactgcgtcctcaagcagcaccctggcctcttctgccctctctgcttcgaactccacgacgactcgcccctccctccccaccaccgcctcatgtgcgtccgctgccccgccgtcgcacaccgttcctgtgcgttcccctccaccaacccctccgctgcacccgcgccagcaccaccgttcttctgccctacttgtctcgattctaacttcacctacttcaaactccccgaccgcaagaccggagccgtcgacgtccagtccgccaaggtgctcgtcactgctgcccggatcgctgccgtgtccatgagcaaggcggccgccgtggcacggttcgatgcggaacgtcgcgccagggaggccgccgtggccaggaagagggcgaaggacgcgctggagcatctcgcggagatcctcgccagggagcaggcggagcaggacgaggaggaacagaacggcaccgtttctgctggccggaggcgtggcgcgtaatagttatatcctaagagttgaaggctgctgtactgtttgctatcaattctggaagtgcctcctccactgggtttctcttgggttctttggagatttcttcttgggagcatatgactcggagtttgactatggcaatctacctaaggatttactgaagctgcgtaatcatattttggtgtcattactatgctaaattgtgtatagaaaataaaaaggtttacatgactcacagcagttaataagtgcagctctcggaatttctttgccattgggcctcttataaattgtgattggtatattttatgaataagatttgtgtcattttctagcaaagt

SEQ ID NO: 58036 - protein, 200 aa, Glycine max
  peptide (1)..(200): Ceres Seq. ID no. 15226855
MNSRQSSLSPCDICGATQTLSLTIHNIRHRAHTCRHCTNCVLKQHPGLFCPLCFELHDDSPLPPHHRLMCVRCPAVAHRSCAFPSTNPSAAPAPAPPFFCPTCLDSNFTYFKLPDRKTGAVDVQSAKVLVTAARIAAVSMSKAAAVARFDAERRAREAAVARKRAKDALEHLAEILAREQAEQDEEEQNGTVSAGRRRGA

SEQ ID NO: 58037 - protein, 132 aa, Glycine max
  peptide (1)..(132): Ceres Seq. ID no. 15226856
MCVRCPAVAHRSCAFPSTNPSAAPAPAPPFFCPTCLDSNFTYFKLPDRKTGAVDVQSAKVLVTAARIAAVSMSKAAAVARFDAERRAREAAVARKRAKDALEHLAEILAREQAEQDEEEQNGTVSAGRRRGA

SEQ ID NO: 58038 - protein, 115 aa, Glycine max
  peptide (1)..(115): Ceres Seq. ID no. 15226857
MRNVAPGRPPWPGRGRRTRWSISRRSSPGSRRSRTRRNRTAPFLLAGGVARNSYILRVEGCCTVCYQFWKCLLHWVSLGFFGDFFLGAYDSEFDYGNLPKDLLKLRNHILVSLLC

SEQ ID NO: 58039 - DNA, 661 bp, Glycine max
  misc_feature (1)..(661): Ceres Seq. ID no. 13594380
actacaacattcactccctctctcttgtcttttcctctacgttcctgcattgctcgtctcaaacgctaaccatggccggcggaggtttcaccagcggcggcggcgccggagatttcgaggccaaaatcactcccatcgtcatcatttcatgtatcatggctgccaccggaggtctcatgttcggctacgacgtcggcgtttcaggtggtgtgacgtctatgcccccgttcttgaagaagttttttccgacggtatacagaaagacagtggaagagaaaggactggacagtaattactgcaaatacgacaaccaaggattacagcttttcacgtcgtctctgtatctggctggtttgacttcgacgttctttgcttcatacacgactcgtaggttgggaagaaggctgaccatgttgattgctggggtattcttcatctgtggagttgtccttaatgctgctgctcaagaccttgccatgctcatcgttggcagaatcttacttggctgtggtgttggctttgctaatcaggttcatcaatcatcatattttatttttcaaaactcaattgcacaatgttaattaattggatttaaatgaattcgtgtatattgctagtaagtattaattataaataaataaataaatattgcacatgtwtc

SEQ ID NO: 58040 - protein, 192 aa, Glycine max
  peptide (1)..(192): Ceres Seq. ID no. 15221340
YNIHSLSLVFSSTFLHCSSQTLTMAGGGFTSGGGAGDFEAKITPIVIISCIMAATGGLMFGYDVGVSGGVTSMPPFLKKFFPTVYRKTVEEKGLDSNYCKYDNQGLQLFTSSLYLAGLTSTFFASYTTRRLGRRLTMLIAGVFFICGVVLNAAAQDLAMLIVGRILLGCGVGFANQVHQSSYFIFQNSIAQC

SEQ ID NO: 58041 - protein, 169 aa, Glycine max
  peptide (1)..(169): Ceres Seq. ID no. 15221341
MAGGGFTSGGGAGDFEAKITPIVIISCIMAATGGLMFGYDVGVSGGVTSMPPFLKKFFPTVYRKTVEEKGLDSNYCKYDNQGLQLFTSSLYLAGLTSTFFASYTTRRLGRRLTMLIAGVFFICGVVLNAAAQDLAMLIVGRILLGCGVGFANQVHQSSYFIFQNSIAQC

SEQ ID NO: 58042 - protein, 141 aa, Glycine max
  peptide (1)..(141): Ceres Seq. ID no. 15221342
MAATGGLMFGYDVGVSGGVTSMPPFLKKFFPTVYRKTVEEKGLDSNYCKYDNQGLQLFTSSLYLAGLTSTFFASYTTRRLGRRLTMLIAGVFFICGVVLNAAAQDLAMLIVGRILLGCGVGFANQVHQSSYFIFQNSIAQC

SEQ ID NO: 58043 - DNA, 1705 bp, Glycine max
  misc_feature (1)..(1705): Ceres Seq. ID no. 13594345
aaaatgtctcttttccctctctcactgtttttataagtttgattgccaaatcaatatccatggcttcggaggacagaaacgaagaagagcttcacgttctattggtggcattctctgcccaaggtcacatcaaccctttgcttaggcttggcaaaaaactactaagcagaggcctccacgtcaccctcgccaccaccgaattagtttaccaccgcgtcttcaagtcctccgccgccacccccaccgccaccgtccccacttcaatcaccaccaacggaatccaagtgctattcttctccgacggcttcggaaccggcctagacaacaagaccatcacccccgaccaatacatggaactcataggaaaatttggtcccatcagcctctccaacatcatcaaagaccacttcctcaacggttcccaaaaactcgtttgcatcatcaacaacccctttgtcccatgggttgcagatgtagctgccaacttcaacatcccatgcgcatgtctctggatccaaccctgtgctctctacgccatatactaccgtttctacaacaaccttaacacgttccccactctggaggacccttcaatgaatgtcgagttaccaggtcttcccttactacaaccccaagaccttccttctttcgttctcccatcaaacccccatggaagtattcccaaggtgctgtcttcgatgttccaacacatgaagaagctgaagtgggtactcgcgaactcgtttcacgaactggagaaagaggtaatagactccatggctgagttatgccccataacaacggtgggcccactagtccctccatcgttactcggccaagacgaaaacatcgaaggagacgtgggaatcgaaatgtggaagccacaggactcgtgcatggagtggctaaaccagcaacctccttcttcggttatctacgtttcctttgggagcattattgtgcttaccgctaaacaattggagagcatagcgagggctcttaggaacagtgaaaaaccttttctttgggtggttaagcgtcgagatggagaagaagcgcttccacttccagaagggtttgttgaagagaccaaagagaagggcatggtggtgccgtggtgcccgcaaacgaaggtgctgagtcacccttcggtggcgtgtttcttaacgcactgtggttggaattcgatgctggaagcaatcactgcgggcacgcccatgattgcttggccgcaatggaccgaccaacccaccaacgcgaaactgatttcggatgtgtttcgtttggggattcggctcgcgcaggagagtgatgggttcgttgcgacggaggaaatggaaagggcttttgagcggattttctcggcgggggactttaagagaaaggcgtcggagctaaaacgggcggcgagagaagcggtggctcagggtggctcgtcggagcagaatatccaatgcttcgtggatgaaattatagggacaaagtctacttgatggttggaccaggaccagatacagctttggtaacttcttgtcggtattggagattaagattctgctagagtttggagttttatgatcattatatttatcgccttcttccaaaaaaagttgtggttattatttttaattcctagttttgtgcttactatgattcggtgattacataattatagaacaagaacaagggtcacaggactttgtgg

SEQ ID NO: 58044 - protein, 496 aa, Glycine max
  peptide (1)..(496): Ceres Seq. ID no. 13594346
NVSFPSLTVFISLIAKSISMASEDRNEEELHVLLVAFSAQGHINPLLRLGKKLLSRGLHVTLATTELVYHRVFKSSAATPTATVPTSITTNGIQVLFFSDGFGTGLDNKTITPDQYMELIGKFGPISLSNIIKDHFLNGSQKLVCIINNPFVPWVADVAANFNIPCACLWIQPCALYAIYYRFYNNLNTFPTLEDPSMNVELPGLPLLQPQDLPSFVLPSNPHGSIPKVLSSMFQHMKKLKWVLANSFHELEKEVIDSMAELCPITTVGPLVPPSLLGQDENIEGDVGIEMWKPQDSCMEWLNQQPPSSVIYVSFGSIIVLTAKQLESIARALRNSEKPFLWVVKRRDGEEALPLPEGFVEETKEKGMVVPWCPQTKVLSHPSVACFLTHCGWNSMLEAITAGTPMIAWPQWTDQPTNAKLISDVFRLGIRLAQESDGFVATEEMERAFERIFSAGDFKRKASELKRAAREAVAQGGSSEQNIQCFVDEIIGTKST

SEQ ID NO: 58045 - protein, 477 aa, Glycine max
  peptide (1)..(477): Ceres Seq. ID no. 13594347
MASEDRNEEELHVLLVAFSAQGHINPLLRLGKKLLSRGLHVTLATTELVYHRVFKSSAATPTATVPTSITTNGIQVLFFSDGFGTGLDNKTITPDQYMELIGKFGPISLSNIIKDHFLNGSQKLVCIINNPFVPWVADVAANFNIPCACLWIQPCALYAIYYRFYNNLNTFPTLEDPSMNVELPGLPLLQPQDLPSFVLPSNPHGSIPKVLSSMFQHMKKLKWVLANSFHELEKEVIDSMAELCPITTVGPLVPPSLLGQDENIEGDVGIEMWKPQDSCMEWLNQQPPSSVIYVSFGSIIVLTAKQLESIARALRNSEKPFLWVVKRRDGEEALPLPEGFVEETKEKGMVVPWCPQTKVLSHPSVACFLTHCGWNSMLEAITAGTPMIAWPQWTDQPTNAKLISDVFRLGIRLAQESDGFVATEEMERAFERIFSAGDFKRKASELKRAAREAVAQGGSSEQNIQCFVDEIIGTKST

SEQ ID NO: 58046 - protein, 380 aa, Glycine max
  peptide (1)..(380): Ceres Seq. ID no. 13594348
MELIGKFGPISLSNIIKDHFLNGSQKLVCIINNPFVPWVADVAANFNIPCACLWIQPCALYAIYYRFYNNLNTFPTLEDPSMNVELPGLPLLQPQDLPSFVLPSNPHGSIPKVLSSMFQHMKKLKWVLANSFHELEKEVIDSMAELCPITTVGPLVPPSLLGQDENIEGDVGIEMWKPQDSCMEWLNQQPPSSVIYVSFGSIIVLTAKQLESIARALRNSEKPFLWVVKRRDGEEALPLPEGFVEETKEKGMVVPWCPQTKVLSHPSVACFLTHCGWNSMLEAITAGTPMIAWPQWTDQPTNAKLISDVFRLGIRLAQESDGFVATEEMERAFERIFSAGDFKRKASELKRAAREAVAQGGSSEQNIQCFVDEIIGTKST

SEQ ID NO: 58047 - DNA, 1850 bp, Glycine max
  misc_feature (1)..(1850): Ceres Seq. ID no. 13638331
atcgaaaagtattacaattagtctcagtccccaacgactggttctgttttctctctgctgcttcgattcattcacacaaccatgactagccttactaatggcgatgctggctccctcaacaaggtccccacgatcaagttcaccaagctcttcattaatggagacttcgttgactctctgtcaggaaagacatttgagacaatagatccaagaacaggagatgttatagcgaggataagcgagggagataaagaagacattgacattgctgttaaagcagcacgtcatgcatttgacaacggtccatggcctcgccttcccggctctgagagagcaagaatattgctgaaatgggcagaaataattgaggaaaacgcagaagaacttgcagcactagatgcgattgatgcggggaagttgtaccatatgtgtaggaatgtggaagttccagcagcggcaaacactcttcgttactatgctggtgcagccgataagattcatggagaggtgttgaaaatgtctcgagagttccatgcctatacattacttgaaccacttggtgttgtgggacacattactccctggaatttccccaataccatgttctacatcaaagtcgctccttctttagctgctggctgcaccatggtcctcaagcctgctgagcaaacacccctctctgctttgttttctgctcatcttgctaaattggctggaatcccagatggagtgatcaatgtagtgcctggatttggcccaactgctggtgctgcattaagctcacacatggatgttgataaggtcagctttaccggttcaacacaaacaggccgtgtgataatgcaggctgcagcaaagagtaacttgaaacaagtttcacttgaattaggaggcaagtcacccctcataatttttgatgatgcagatatagacaaagctactgagctagctctactaggcatcctatataacaagggagaagtttgtgttgcaagttcccgtgtgtttgttcaagaagggatctatgatgaatttgagaaaaaactggtggagaaggcaaaagcttgggtcgttggggatccctttgatcctaaagttcaacaaggccctcaggttgacaaggaacaatttgaaaaagttctttcatatattgagcatggaaagaaagaaggagctacccttttgaccgggggtaaaacagtggggaacaagggctactttattgagccgacaattttctccaatataagggaggatatgcttatagcacaggatgaaatatttggcccagtgatggcactgaagaagtttaagaccactgaggaagcaattaagagtgctaacaataccaagtatggcctagcagcaggcatagtgaccaagaatttggatacagcaaacacagtgtcaaggtctattcgggcaggcactatatggatcaactgctattttgcctttggcgatgatgttccctttggaggatataagatgagtggatttggaaaagatcatggattggaagcccttcacaagtacctacaagttaaatctgttgttactcccctttacaattctccctggctttgaatgtctactgcatggatcttggaaaatggtccattctggccatttcctatcaatttgcatctgccatgaggcatggaaattcagttcttgaacagtggtgtctattatattgtcaacaagctggccttttcctacttttcagtcatgctttaatagaaaatgtatggaagaaaaatagtaattttatttttgtttggtttgtaattaaaaggaaatatcaacacaatttaacttattgcttcaacaganatatatgaattgtt

SEQ ID NO: 58048 - protein, 501 aa, Glycine max
  peptide (1)..(501): Ceres Seq. ID no. 13638332
MTSLTNGDAGSLNKVPTIKFTKLFINGDFVDSLSGKTFETIDPRTGDVIARISEGDKEDIDIAVKAARHAFDNGPWPRLPGSERARILLKWAEIIEENAEELAALDAIDAGKLYHMCRNVEVPAAANTLRYYAGAADKIHGEVLKMSREFHAYTLLEPLGVVGHITPWNFPNTMFYIKVAPSLAAGCTMVLKPAEQTPLSALFSAHLAKLAGIPDGVINVVPGFGPTAGAALSSHMDVDKVSFTGSTQTGRVIMQAAAKSNLKQVSLELGGKSPLIIFDDADIDKATELALLGILYNKGEVCVASSRVFVQEGIYDEFEKKLVEKAKAWVVGDPFDPKVQQGPQVDKEQFEKVLSYIEHGKKEGATLLTGGKTVGNKGYFIEPTIFSNIREDMLIAQDEIFGPVMALKKFKTTEEAIKSANNTKYGLAAGIVTKNLDTANTVSRSIRAGTIWINCYFAFGDDVPFGGYKMSGFGKDHGLEALHKYLQVKSVVTPLYNSPWL

SEQ ID NO: 58049 - protein, 386 aa, Glycine max
  peptide (1)..(386): Ceres Seq. ID no. 13638333
MCRNVEVPAAANTLRYYAGAADKIHGEVLKMSREFHAYTLLEPLGVVGHITPWNFPNTMFYIKVAPSLAAGCTMVLKPAEQTPLSALFSAHLAKLAGIPDGVINVVPGFGPTAGAALSSHMDVDKVSFTGSTQTGRVIMQAAAKSNLKQVSLELGGKSPLIIFDDADIDKATELALLGILYNKGEVCVASSRVFVQEGIYDEFEKKLVEKAKAWVVGDPFDPKVQQGPQVDKEQFEKVLSYIEHGKKEGATLLTGGKTVGNKGYFIEPTIFSNIREDMLIAQDEIFGPVMALKKFKTTEEAIKSANNTKYGLAAGIVTKNLDTANTVSRSIRAGTIWINCYFAFGDDVPFGGYKMSGFGKDHGLEALHKYLQVKSVVTPLYNSPWL

SEQ ID NO: 58050 - protein, 356 aa, Glycine max
  peptide (1)..(356): Ceres Seq. ID no. 13638334
MSREFHAYTLLEPLGVVGHITPWNFPNTMFYIKVAPSLAAGCTMVLKPAEQTPLSALFSAHLAKLAGIPDGVINVVPGFGPTAGAALSSHMDVDKVSFTGSTQTGRVIMQAAAKSNLKQVSLELGGKSPLIIFDDADIDKATELALLGILYNKGEVCVASSRVFVQEGIYDEFEKKLVEKAKAWVVGDPFDPKVQQGPQVDKEQFEKVLSYIEHGKKEGATLLTGGKTVGNKGYFIEPTIFSNIREDMLIAQDEIFGPVMALKKFKTTEEAIKSANNTKYGLAAGIVTKNLDTANTVSRSIRAGTIWINCYFAFGDDVPFGGYKMSGFGKDHGLEALHKYLQVKSVVTPLYNSPWL

SEQ ID NO: 58051 - DNA, 1202 bp, Glycine max
  misc_feature (1)..(1202): Ceres Seq. ID no. 14304408
ctgtaccacaataatcaaagtctcaaccatgagaaaacgtatcaatatggaaagtgatgctgacttcaattcctttgccacatcctcctcttccaccacaccttcaatcttctttgacactaacacttctagcacatcctcctcctcaacatctcctacctcaaattcagaatcatgcaccaaagaacactccaaaacacctcaaaatgactcaaccacttctcaaacctcattggaaaatggaaaggactcaaaagggtgcaagaagaggcagatagacaatagcaaccagaatcaccaccctacttataggggtgtaaggatgaggaattggggcaaatgggtgtccgaaatccgtgagccgagaaagaagtcaagaatatggctaggaacataccctacagcagaaatggcagctagagcacatgatgtggctgccttagccatcaagggccattcagcatacctcaattttcctgaattggctcaagagcttccaaggccagttagcacatctcctaaggacattcaagctgcagctgcaaaagctgcaaatactgcctttgaggaggttaggcattgtcaaataactgaagaagaagcagaacaaaaccaagcagaacaagcttcatcttcaactctctcaatggacaatcctcaagagccttcaagttctcattctaccattgatgatgacactttgtttgaccttccagatcttttccctgatggaaacaatggactttgctccttttcttcttcttggcatttgtgtgcagttgatagtggctttaggcttgaggagtcatttttttatgagaaccattagaatttagaggctttttattttctttttaattcaagtaaaatacagagtttaataagaccaaaaggaaggagagcaacatgcggagtttttcttctttgtttggtcactgcaactgcattctgcgcagagaataaccagttgaggaagactttacatttttatctgtaaatggtgctgtctattgctaatattttgtccgatatagtttttttttctattttggggaataaaggtttaggtgagccgtgagcaaagactattccatcatcaagtaagttacgtattcaactaggagtgcataacatctgagacaaggtttctcttctactgtatatgaaaggtatttatgatttgagagaatatcctttcctct

SEQ ID NO: 58052 - protein, 275 aa, Glycine max
  peptide (1)..(275): Ceres Seq. ID no. 14304409
CTTIIKVSTMRKRINMESDADFNSFATSSSSTTPSIFFDTNTSSTSSSSTSPTSNSESCTKEHSKTPQNDSTTSQTSLENGKDSKGCKKRQIDNSNQNHHPTYRGVRMRNWGKWVSEIREPRKKSRIWLGTYPTAEMAARAHDVAALAIKGHSAYLNFPELAQELPRPVSTSPKDIQAAAAKAANTAFEEVRHCQITEEEAEQNQAEQASSSTLSMDNPQEPSSSHSTIDDDTLFDLPDLFPDGNNGLCSFSSSWHLCAVDSGFRLEESFFYENH

SEQ ID NO: 58053 - protein, 266 aa, Glycine max
  peptide (1)..(266): Ceres Seq. ID no. 14304410
MRKRINMESDADFNSFATSSSSTTPSIFFDTNTSSTSSSSTSPTSNSESCTKEHSKTPQNDSTTSQTSLENGKDSKGCKKRQIDNSNQNHHPTYRGVRMRNWGKWVSEIREPRKKSRIWLGTYPTAEMAARAHDVAALAIKGHSAYLNFPELAQELPRPVSTSPKDIQAAAAKAANTAFEEVRHCQITEEEAEQNQAEQASSSTLSMDNPQEPSSSHSTIDDDTLFDLPDLFPDGNNGLCSFSSSWHLCAVDSGFRLEESFFYENH

SEQ ID NO: 58054 - protein, 260 aa, Glycine max
  peptide (1)..(260): Ceres Seq. ID no. 14304411
MESDADFNSFATSSSSTTPSIFFDTNTSSTSSSSTSPTSNSESCTKEHSKTPQNDSTTSQTSLENGKDSKGCKKRQIDNSNQNHHPTYRGVRMRNWGKWVSEIREPRKKSRIWLGTYPTAEMAARAHDVAALAIKGHSAYLNFPELAQELPRPVSTSPKDIQAAAAKAANTAFEEVRHCQITEEEAEQNQAEQASSSTLSMDNPQEPSSSHSTIDDDTLFDLPDLFPDGNNGLCSFSSSWHLCAVDSGFRLEESFFYENH

SEQ ID NO: 58055 - DNA, 759 bp, Glycine max
  misc_feature (1)..(759): Ceres Seq. ID no. 15170395
aaaacctttttactatcagtcacttgctattttccttgtcctctttttcgtccaatcctaatacgatcatggaggatgctgctacttctaatgaggatagagaaaacaagttcctaactatggcaattgaagaagcatataaggcggttgaaagtggccatggtcgcccatttggtgcagttattgttcgaaacgatgaaatactttcaagctgtcataacatggttgtaagaaatgctgatcccactgcccatgctgagattactgctataagagaggcttgtcgaaagctgaatcaagttgaacttgctgactctgaaatctatgcttcttgcgagccttgtccaatgtgccttagtgcaattcatttttccaaaattaagaaactggtttatggagctaaagcagaagctgcggtagcaattgggtttgagagtatcattgctgatgcactgaaggacactggtttttatgagaaactcaacttagaggtaaaaaaggctgaaggtagtgttgctgtaatggcagaacaagtattcgagaagaccaaagacaagtttattattccctgattagttagctttaatcatcttattaaatgtgagcgcaagttacaattgttcaggaaaacttttgattcttggacaaaaataattttttgtcagactttattttggattagtcaggtctcattttcctgataatccggaggattagacaaaaaagaaatataaaatttgcacgttcatgtttctgtac

SEQ ID NO: 58056 - protein, 189 aa, Glycine max
  peptide (1)..(189): Ceres Seq. ID no. 15170396
NLFTISHLLFSLSSFSSNPNTIMEDAATSNEDRENKFLTMAIEEAYKAVESGHGRPFGAVIVRNDEILSSCHNMVVRNADPTAHAEITAIREACRKLNQVELADSEIYASCEPCPMCLSAIHFSKIKKLVYGAKAEAAVAIGFESIIADALKDTGFYEKLNLEVKKAEGSVAVMAEQVFEKTKDKFIIP

SEQ ID NO: 58057 - protein, 167 aa, Glycine max
  peptide (1)..(167): Ceres Seq. ID no. 15170397
MEDAATSNEDRENKFLTMAIEEAYKAVESGHGRPFGAVIVRNDEILSSCHNMVVRNADPTAHAEITAIREACRKLNQVELADSEIYASCEPCPMCLSAIHFSKIKKLVYGAKAEAAVAIGFESIIADALKDTGFYEKLNLEVKKAEGSVAVMAEQVFEKTKDKFIIP

SEQ ID NO: 58058 - protein, 150 aa, Glycine max
  peptide (1)..(150): Ceres Seq. ID no. 15170398
MAIEEAYKAVESGHGRPFGAVIVRNDEILSSCHNMVVRNADPTAHAEITAIREACRKLNQVELADSEIYASCEPCPMCLSAIHFSKIKKLVYGAKAEAAVAIGFESIIADALKDTGFYEKLNLEVKKAEGSVAVMAEQVFEKTKDKFIIP

SEQ ID NO: 58059 - DNA, 1149 bp, Glycine max
  misc_feature (1)..(1149): Ceres Seq. ID no. 15224827
gcacgagwccaktmcctagaacatccamtcgaaaacctggttgatatcaattgatgagaatggtkggagaaccataccacaaaaacaagctgtgttgtggagcctaagaaagagtttttaaaatcttggggataaaaatggccgatctatataatctcaattctcaaagactaatttaagggtttattcccagaaaaaaacttgttactgaaaatactgaactactattctacttgcctatttatgatagcagcaatttgatggaaactaaggcagaaacttgaaattcagctgaattttattggactgcaaattttctaatggtgtccaaagaaaggccaaatgctacagtcactttgtcacaatttgtcctgaacatttattcttgtactactaactgattatatattatctaccaaatcacacaggagaatgggaaaacaaccacgtacacatggattttgagcactggctggtggcagagtagagcaccagttaacccagatgctgttgttgtagttgtcttcttatgtgcttgcttaattggtggctttttttacctcaacaggtttttgttttttgcaacttcccatgttaaccatcaagttaatagtatagacactgcttggttttgacttgttatcctctccttaattgccgcgcagagcaaatgcctcaaactccataaagaagaagtcatatcagtcaatgcttcttgtgatgtccatagcttgtttgtactgcttttggtgtgcaattcagatatactggatcagtccacgtcgtccagccgtaggtgaagaggccgatcttggtgttctcgtgttcttagctatatactttttcctaccttatggtttgtgtataatgtccatgtccccaaaagatcatgatcctaatctgattcctctttaatagtgttcaccctattagagatgtgttctgcttttgccactcctatatagttgtgagggtagctagaatatttcgccagtaagtaaattgtataatcactcagcaaaactatgtgaagctatgcatccattccttgttggaactggattcttttgagcttacaggttatatttcactgactcatacgttgttatctgtatcttgttgcaaagtgatccaatatagaagtttggc

SEQ ID NO: 58060 - protein, 68 aa, Glycine max
  peptide (1)..(68): Ceres Seq. ID no. 15224828
MLLVMSIACLYCFWCAIQIYWISPRRPAVGEEADLGVLVFLAIYFFLPYGLCIMSMSPKDHDPNLIPL

SEQ ID NO: 58061 - protein, 64 aa, Glycine max
  peptide (1)..(64): Ceres Seq. ID no. 15224829
MSIACLYCFWCAIQIYWISPRRPAVGEEADLGVLVFLAIYFFLPYGLCIMSMSPKDHDPNLIPL

SEQ ID NO: 58062 - DNA, 1285 bp, Glycine max
  misc_feature (1)..(1285): Ceres Seq. ID no. 13638375
cctagaacatcctaatcgaaaaattaaattcaaaattgaaaacggaaggaaaactcagcgtgtgattgaaatttgaagagtgtgaagatggcgatggaagtggagcagaatcagaatcatcaattagggtttcccttctggaaaccgctccgtcgcaggttcggacccgaatctcctttcttcgctcatggcaacctcgaacgggaacttctcgccaaacagcttgctttggaattaacagaagagaaacaacagcttgagaaatggatgcaagaggaagaaggaagggaagtcttttgtcccattgtgggttgtggtgcacgcttgacctcaatggaggactttgaaaatcactataatgcaaggcatactgcatcctgttctgtgtgctccagagtttacccgacatcttggttgctcagcatacatgtatctgaagtgcatgattctttctttcaggcaaaagttgcacgtggctatgatatgtatgaatgcttggtggaaaggtgtggattgaaattcaaaagctacaatagtaggcagcagcatctggttgacaagcataaattccccacctcatttgagtttttcaagaaggctaagccttcaaagaaacataggttgaagtcccaacgcaaacaagctgtttgtaaggaggattcttcaggaatgatggaagtggaaaatgcatccatggatgaccttgtttcagcagtctctaaattgaacacttctgactccaccccttcatctatcagttttggtcgccgccacaaaggcttgtcatttgtccctcgagctgttcagcgtggaggtggatcaaactcaacagcatctgtgacaaagaaataagcttggactcaaacaaatctgcattcttaattgctgaatgatcaacatgcagatgcagctccattataaaatccgtgtggacgtcttgcattctaagtttgaagaagccaattaagttgaagatggaaaattagaatcatgctggaggatgtaataacagcatttgtcagtattatctttttttgctcccacttggggctgtaagtttgcccaacacaggcaatatgagcatgcgaatatgcctggcttgtataatgtggagattttgagcttctttttctatgatattgttctgttaacatctaaccactttactgaatagccacattgtaattagagttgaaagaaatcactcttaaagcttgtcatacgtttgtggcagcacatgaataagaaaaaaaaaaaaaaaaaagcttatcgataccgtcgacct

SEQ ID NO: 58063 - protein, 254 aa, Glycine max
  peptide (1)..(254): Ceres Seq. ID no. 15220403
MAMEVEQNQNHQLGFPFWKPLRRRFGPESPFFAHGNLERELLAKQLALELTEEKQQLEKWMQEEEGREVFCPIVGCGARLTSMEDFENHYNARHTASCSVCSRVYPTSWLLSIHVSEVHDSFFQAKVARGYDMYECLVERCGLKFKSYNSRQQHLVDKHKFPTSFEFFKKAKPSKKHRLKSQRKQAVCKEDSSGMMEVENASMDDLVSAVSKLNTSDSTPSSISFGRRHKGLSFVPRAVQRGGGSNSTASVTKK

SEQ ID NO: 58064 - protein, 252 aa, Glycine max
  peptide (1)..(252): Ceres Seq. ID no. 15220404
MEVEQNQNHQLGFPFWKPLRRRFGPESPFFAHGNLERELLAKQLALELTEEKQQLEKWMQEEEGREVFCPIVGCGARLTSMEDFENHYNARHTASCSVCSRVYPTSWLLSIHVSEVHDSFFQAKVARGYDMYECLVERCGLKFKSYNSRQQHLVDKHKFPTSFEFFKKAKPSKKHRLKSQRKQAVCKEDSSGMMEVENASMDDLVSAVSKLNTSDSTPSSISFGRRHKGLSFVPRAVQRGGGSNSTASVTKK

SEQ ID NO: 58065 - protein, 194 aa, Glycine max
  peptide (1)..(194): Ceres Seq. ID no. 15220405
MQEEEGREVFCPIVGCGARLTSMEDFENHYNARHTASCSVCSRVYPTSWLLSIHVSEVHDSFFQAKVARGYDMYECLVERCGLKFKSYNSRQQHLVDKHKFPTSFEFFKKAKPSKKHRLKSQRKQAVCKEDSSGMMEVENASMDDLVSAVSKLNTSDSTPSSISFGRRHKGLSFVPRAVQRGGGSNSTASVTKK

SEQ ID NO: 58066 - DNA, 1724 bp, Glycine max
  misc_feature (1)..(1724): Ceres Seq. ID no. 13638441
aattaacactcatcacattcgttgtgtttggcttcttcactcgctttctctatttttttctcactaaaaagttccatcttttttttttttttaatttctggggttattattgctttctgtgattctgtctcagttccattttggtatctttgagggaaattcattgggtttgcagggttttatcttgttagaatttagaccaattggctaacagataatagtcttcattgaacatcaatttcaagcattctctctgatttttttgatcaagtggctcttttctagattccgattcccttcaaaatgcttctggatttatccttagtattgttgtggtaaaacctccacttctgttatcattttctctcttctgccttatcttcctcagtttccactcatcaagtttcaatcttcctttgaataagcccaaatttgattgtatgaaccagtagctttttgcttgtacaaaattgaattgatgaagtgggaaagtataaccctctcttctcctacaccttgcactccaaactccaacaccaattggttggtgatggaggataataatagcaggagcacaaaatggacctctgaagagaacaagctctttgaaaatgctcttgcagtgcatgataaggacaccccggatcggtggcacagagtggctgagatgattcctggaaagacagtggttgatgtgataaggcagtacaaggagttggaagtagatgttagcaatatagaagctggtttgattccagttcctggctatagtagcactgctacctcacccttcaccttagattgggtgaacactcctggctatgatgggtttaaaggatgtggaaagagatcttcctcagtgagaccgattgagcatgaaaggaagaaaggagtgccttggactgaagacgaacataaattgtttctattgggtctgaagaagtatgggaaaggtgattggagaaatatatctcgcaattttgttattacaagaactccaacacaggttgctagtcatgctcagaagtacttcataaggcagctttcaggaggcaaagacaagaggagggctagcatacatgacataacaacagtgaatctcacagaaaccataacaacttcttcagaagacaccaatggatcctcttcaccacatgtgctctcacagcaacaacagccaaattctactcctactacaccaagaactcgttttcagtggagtaatcagtctaacacaggagtagctatgactctcaaccctgctcatgaaagagtcttcatgtctcattatggtgctaactcctttggggttaaaattgagggacagaatcttcatgagtcttcttacttgcgacctcagacacagaacatggttttccaaatgcaacagtcctctcaacactagttccatgcattatcacttgttgtagtgaattattaatgggcagaagtagaaccagaatcttctgtccatttcaataagtacagtgcttgagttgagctttttccccaagttcttatgtgaataccctagattgttggttagttattatgaacttgaaggaaggtacatacatttgtttcttcaacaaataagaacttcctgaaaggagtggcaggcaaccaagtccccaacgttggttttggttggtttttctatgtkgtctaagaataatggatttcaagccccgtgtwtaattaatgaaatgtttcmmcttrgrggc

SEQ ID NO: 58067 - protein, 308 aa, Glycine max
  peptide (1)..(308): Ceres Seq. ID no. 15220411
MKWESITLSSPTPCTPNSNTNWLVMEDNNSRSTKWTSEENKLFENALAVHDKDTPDRWHRVAEMIPGKTVVDVIRQYKELEVDVSNIEAGLIPVPGYSSTATSPFTLDWVNTPGYDGFKGCGKRSSSVRPIEHERKKGVPWTEDEHKLFLLGLKKYGKGDWRNISRNFVITRTPTQVASHAQKYFIRQLSGGKDKRRASIHDITTVNLTETITTSSEDTNGSSSPHVLSQQQQPNSTPTTPRTRFQWSNQSNTGVAMTLNPAHERVFMSHYGANSFGVKIEGQNLHESSYLRPQTQNMVFQMQQSSQH

SEQ ID NO: 58068 - protein, 284 aa, Glycine max
  peptide (1)..(284): Ceres Seq. ID no. 15220412
MEDNNSRSTKWTSEENKLFENALAVHDKDTPDRWHRVAEMIPGKTVVDVIRQYKELEVDVSNIEAGLIPVPGYSSTATSPFTLDWVNTPGYDGFKGCGKRSSSVRPIEHERKKGVPWTEDEHKLFLLGLKKYGKGDWRNISRNFVITRTPTQVASHAQKYFIRQLSGGKDKRRASIHDITTVNLTETITTSSEDTNGSSSPHVLSQQQQPNSTPTTPRTRFQWSNQSNTGVAMTLNPAHERVFMSHYGANSFGVKIEGQNLHESSYLRPQTQNMVFQMQQSSQH

SEQ ID NO: 58069 - protein, 245 aa, Glycine max
  peptide (1)..(245): Ceres Seq. ID no. 15220413
MIPGKTVVDVIRQYKELEVDVSNIEAGLIPVPGYSSTATSPFTLDWVNTPGYDGFKGCGKRSSSVRPIEHERKKGVPWTEDEHKLFLLGLKKYGKGDWRNISRNFVITRTPTQVASHAQKYFIRQLSGGKDKRRASIHDITTVNLTETITTSSEDTNGSSSPHVLSQQQQPNSTPTTPRTRFQWSNQSNTGVAMTLNPAHERVFMSHYGANSFGVKIEGQNLHESSYLRPQTQNMVFQMQQSSQH

SEQ ID NO: 58070 - DNA, 1798 bp, Glycine max
  misc_feature (1)..(1798): Ceres Seq. ID no. 14311667
atcttgttggtccattcgtgcggtaacggaaggagacaataagcgtctccatcgcttaaattgccgagaacttcattacccattatctgttacagttctacgctctcgctccaaaccccacttcagatttggtttactggaaggaaagtgcttgaaggacccaatctacacgagagatgcaatggcaataaacacacacatgttagcttcaatgtgttattattgctgccactgtgattaatgagtaagtcactgtgtcaaaggatatagagctgttttcttccagtgcatctttggtttgagatttatgtagttttctctgaaaagtgattactagtttccctcaaacaataatggaggcagcaaaggttctttcacactgcaaaactgccccttttggtttctctatcgtgagcaacaaagtatctctgagacctttcgacaaacattttcatgctgatgtacttgctaacagacccaagagcattagttttcaattgaattgttcctatggaaaccctttttcctctgtgctgaaacctgcaagaaaaagggctaattttttaccttctcccagatgctcaatttccagtagtgccagcactgaatctcaaaatccagtcctagagttctttagaaatgtgccatttgattcaataaaagctacacttctgcagttgactccaattgatgttgtgaagtggtctgggatattatgcatcatagctgcagccacaaaatggactatgaatatgcttttcagtcccttcttttggatgtattttagctggacgtggttgttctggccttggatggtggccatagggcttgcagtctatgggttatattgctttcggaaacatctgcacagtgaggcaaacatatttgagcaattggctattgttacatcagtttttacgtggctcactcttgttccacctggtcatttcaatggctaccttgaaggctggccttatgttttcttttttgtgtatcattatttctttttcttcaatgttagtgttagaaagcggttatatggagattattttgctcagccccatgacccaaagtgggacgtgaacttgccaatgtggtctcgcctattgttcagcacaggagtcatggttggccattggcttgcagcatttgaagggcctgagcttcacctcataccgggtgggtggagcaatcttggaatctgggctttaatcattacaactctgctaatgcagtataatgctacattgtatctcgctaagtattcagaaaatgtggtggagccaacttctgtagtgcaatttggaccttatcgttgggtccgtcatccaatatattcatcaacaatgcttttgtttgtaacatactgcattgcgcttcgagcacctctgagtctgctatttattgtggcagtatgcttgttgtattataagcagaaggcagagaaggaagaggatttgatggttgagacttttggccagagttacacagaatatgcaagcaaagttaagtacaagcttattccttttatctattagttgatctccagaagtttagtcagtcatcaaaatctgattgtactgtcaggtttaggcaaaagatagtgttaattctcaaaatccaagtgtatctctttgtttactctttactctgttatctttagtgtagccttaaattatggtatcatgtgcacttgtggtgattagatttttgaagattttggttttcaatgatgttttgtttcatagaacatgcaaaatttgactatataaatcttgtctatattaagctgtgtgcc

SEQ ID NO: 58071 - protein, 394 aa, Glycine max
  peptide (1)..(394): Ceres Seq. ID no. 14311668
MEAAKVLSHCKTAPFGFSIVSNKVSLRPFDKHFHADVLANRPKSISFQLNCSYGNPFSSVLKPARKRANFLPSPRCSISSSASTESQNPVLEFFRNVPFDSIKATLLQLTPIDVVKWSGILCIIAAATKWTMNMLFSPFFWMYFSWTWLFWPWMVAIGLAVYGLYCFRKHLHSEANIFEQLAIVTSVFTWLTLVPPGHFNGYLEGWPYVFFFVYHYFFFFNVSVRKRLYGDYFAQPHDPKWDVNLPMWSRLLFSTGVMVGHWLAAFEGPELHLIPGGWSNLGIWALIITTLLMQYNATLYLAKYSENVVEPTSVVQFGPYRWVRHPIYSSTMLLFVTYCIALRAPLSLLFIVAVCLLYYKQKAEKEEDLMVETFGQSYTEYASKVKYKLIPFIY

SEQ ID NO: 58072 - protein, 263 aa, Glycine max
  peptide (1)..(263): Ceres Seq. ID no. 14311669
MNMLFSPFFWMYFSWTWLFWPWMVAIGLAVYGLYCFRKHLHSEANIFEQLAIVTSVFTWLTLVPPGHFNGYLEGWPYVFFFVYHYFFFFNVSVRKRLYGDYFAQPHDPKWDVNLPMWSRLLFSTGVMVGHWLAAFEGPELHLIPGGWSNLGIWALIITTLLMQYNATLYLAKYSENVVEPTSVVQFGPYRWVRHPIYSSTMLLFVTYCIALRAPLSLLFIVAVCLLYYKQKAEKEEDLMVETFGQSYTEYASKVKYKLIPFIY

SEQ ID NO: 58073 - protein, 261 aa, Glycine max
  peptide (1)..(261): Ceres Seq. ID no. 14311670
MLFSPFFWMYFSWTWLFWPWMVAIGLAVYGLYCFRKHLHSEANIFEQLAIVTSVFTWLTLVPPGHFNGYLEGWPYVFFFVYHYFFFFNVSVRKRLYGDYFAQPHDPKWDVNLPMWSRLLFSTGVMVGHWLAAFEGPELHLIPGGWSNLGIWALIITTLLMQYNATLYLAKYSENVVEPTSVVQFGPYRWVRHPIYSSTMLLFVTYCIALRAPLSLLFIVAVCLLYYKQKAEKEEDLMVETFGQSYTEYASKVKYKLIPFIY

SEQ ID NO: 58074 - DNA, 1613 bp, Glycine max
  misc_feature (1)..(1613): Ceres Seq. ID no. 15168348
ttggacaggttctaaagtttttgatagcctcagaaacaaaatcagacctcatcatagttttgctaacacaagtacattcattctcaaaaggtttaatttcatcctttctttccctctcttttcattggtgtgcactttcacttgtggagctagctgcaccaacagcagtggaaattgccttgttcttgagatgtctggtgttcttctttgggtgagttctggacccaaagagaacatcaactccttggtgagtttttcatgcaggagtggtggtggtggtgaaagaacacaaaagaggttttctggaatcagttttgcaagtggtgcctctgctttttcaagtgcagtggcagctgagactttaagatcctcagaggagagggtctatgaagtggtgctgaagcaagcagctctggtaaaagaaaacaaaaggggtacaaagatagctctagatttggacaaagacgttgaaggtgatttcaccaatgtggatctgttgaatgcagcttatgatcggtgtggtgaagtctgtgctgagtatgccaagacattttacttaggcacacaattgatgactgcagagcgccgaaaagctatttgggcaatttatgtgtggtgcagaagaactgatgagctagtggatggcccaaatgcttcgcacatcacccccggggccttggacaggtgggagcaacgactgagtgatgtttttgaaggtcgaccctatgatatgtatgatgctgccctctcacatactgtctcaaagtacccagttgatattcagccattcaaggacatgatcgaagggatgaggatggacctgagaaagtcaagatacgataactttgatgagctctacctttattgctactatgttgctgggacagtaggccttatgagtgtcccagtaatggggatagcaccagaagcaaatgcttcaacagagagcatttataatgctgcattggctctaggcattgcaaatcaacttactaacatactcagagatgttggagaggatgctagaagaggaagagtatatctcccacaagatgaattggcactagctggcctttcagatgaagacattttcagcggaagagttacagacaaatggcggaaattcatgaagggacaaataaagagggcgaggatgttttttgatgaagcagagaggggagttgcagacctcaactcagctagcaggtggcctgtgtgggcatcattgttgttgtataggcaaatattagattccattgaagccaatgattataataacttcacaaaaagggcatatgtaggaaaagtaaagaagctattatcactacctactgcctatggtttttcacttctaggccctcagaagtttgccaaaatggttaggagataactgttacaatgtgtgatacttttcagttagagttgtatacatctcaatttaccatgtgttgaagcgcatgagcaacccattcaattcatttaatcaatttgcaagatatcttagtaatcagttttaaaatgtgtaaaaaagaagaaggaagaatgtatcaatccatttgtataccataaatttcagatatcattcttcaaagggatacaacattttacttttg

SEQ ID NO: 58075 - protein, 462 aa, Glycine max
  peptide (1)..(462): Ceres Seq. ID no. 15168349
WTGSKVFDSLRNKIRPHHSFANTSTFILKRFNFILSFPLFSLVCTFTCGASCTNSSGNCLVLEMSGVLLWVSSGPKENINSLVSFSCRSGGGGERTQKRFSGISFASGASAFSSAVAAETLRSSEERVYEVVLKQAALVKENKRGTKIALDLDKDVEGDFTNVDLLNAAYDRCGEVCAEYAKTFYLGTQLMTAERRKAIWAIYVWCRRTDELVDGPNASHITPGALDRWEQRLSDVFEGRPYDMYDAALSHTVSKYPVDIQPFKDMIEGMRMDLRKSRYDNFDELYLYCYYVAGTVGLMSVPVMGIAPEANASTESIYNAALALGIANQLTNILRDVGEDARRGRVYLPQDELALAGLSDEDIFSGRVTDKWRKFMKGQIKRARMFFDEAERGVADLNSASRWPVWASLLLYRQILDSIEANDYNNFTKRAYVGKVKKLLSLPTAYGFSLLGPQKFAKMVRR

SEQ ID NO: 58076 - protein, 399 aa, Glycine max
  peptide (1)..(399): Ceres Seq. ID no. 15168350
MSGVLLWVSSGPKENINSLVSFSCRSGGGGERTQKRFSGISFASGASAFSSAVAAETLRSSEERVYEVVLKQAALVKENKRGTKIALDLDKDVEGDFTNVDLLNAAYDRCGEVCAEYAKTFYLGTQLMTAERRKAIWAIYVWCRRTDELVDGPNASHITPGALDRWEQRLSDVFEGRPYDMYDAALSHTVSKYPVDIQPFKDMIEGMRMDLRKSRYDNFDELYLYCYYVAGTVGLMSVPVMGIAPEANASTESIYNAALALGIANQLTNILRDVGEDARRGRVYLPQDELALAGLSDEDIFSGRVTDKWRKFMKGQIKRARMFFDEAERGVADLNSASRWPVWASLLLYRQILDSIEANDYNNFTKRAYVGKVKKLLSLPTAYGFSLLGPQKFAKMVRR

SEQ ID NO: 58077 - protein, 272 aa, Glycine max
  peptide (1)..(272): Ceres Seq. ID no. 15168351
MTAERRKAIWAIYVWCRRTDELVDGPNASHITPGALDRWEQRLSDVFEGRPYDMYDAALSHTVSKYPVDIQPFKDMIEGMRMDLRKSRYDNFDELYLYCYYVAGTVGLMSVPVMGIAPEANASTESIYNAALALGIANQLTNILRDVGEDARRGRVYLPQDELALAGLSDEDIFSGRVTDKWRKFMKGQIKRARMFFDEAERGVADLNSASRWPVWASLLLYRQILDSIEANDYNNFTKRAYVGKVKKLLSLPTAYGFSLLGPQKFAKMVRR

SEQ ID NO: 58078 - DNA, 1188 bp, Glycine max
  misc_feature (1)..(1188): Ceres Seq. ID no. 15177225
ctgctcaatttgtgagattccaaagcaattctttgctgccaacacaatggattcaagagcttacatccttagagtcaccattgcaattctttgcatctcaatgctagcttccactcttttccctgtgtgtgatgctataaatcatggaagagcaataaggggtcacaaaatccgtagaagctccccaatcaaatctttaaagaaactgaaaataaaatctttaagacatttaaacaagtacacaccatttgattcatttgggtactcagactttgattcatatgggtactcaaactttgatgattcatatggctctccctcttccctacccttaccacctttcaattcactagcaccacatccacaacctacaccatcaagttccattgctcctccaaatttggcacctccaagcataggtggcaactcctctctcccagcactctcaccagttccaagctcacctcatggtgctgtctttgggccaccaaacccaagaagcatgccaccacctccttatcccttaagcccaccaaagcatgctccaagcctaagcccaccaaagagtgctccaagcctaaacccaccaccactagtgtacctcccacctgttgtgttcccaccacccccttcaccttctacgcaccgcaaaaagccgccacaatacgcactttggtgtgtggcaaagcccacggttcctgacccaataattcaggaggccatggactatgcctgtgggtctggtgcggattgcaagtcaattcagcccaatggaatgtgcttccagcccaacactttgctggcccatgcttcgtatgccttcaatagctactggcagaacactaagattggtggaggcacgtgtgattttggtggaactgccatgctagtcactgttgatccaagctatgacaaatgcaacttcatgttgacttagctgcccttgccatatagcacatgtttggagacataatgttcagtgttcaaatattctctctcatcccaacatggatttttgatgtaacaataataattaattccctggcccataagttattggagctacgtaggttgtctttcccccctttcttctcggattattatagctgtcgtatttggaagtatcttatcttttttgtaataatctcattatttttatcgccatttcattatcatgttcgttttgtt

SEQ ID NO: 58079 - protein, 311 aa, Glycine max
  peptide (1)..(311): Ceres Seq. ID no. 15177226
CSICEIPKQFFAANTMDSRAYILRVTIAILCISMLASTLFPVCDAINHGRAIRGHKIRRSSPIKSLKKLKIKSLRHLNKYTPFDSFGYSDFDSYGYSNFDDSYGSPSSLPLPPFNSLAPHPQPTPSSSIAPPNLAPPSIGGNSSLPALSPVPSSPHGAVFGPPNPRSMPPPPYPLSPPKHAPSLSPPKSAPSLNPPPLVYLPPVVFPPPPSPSTHRKKPPQYALWCVAKPTVPDPIIQEAMDYACGSGADCKSIQPNGMCFQPNTLLAHASYAFNSYWQNTKIGGGTCDFGGTAMLVTVDPSYDKCNFMLT

SEQ ID NO: 58080 - protein, 296 aa, Glycine max
  peptide (1)..(296): Ceres Seq. ID no. 15177227
MDSRAYILRVTIAILCISMLASTLFPVCDAINHGRAIRGHKIRRSSPIKSLKKLKIKSLRHLNKYTPFDSFGYSDFDSYGYSNFDDSYGSPSSLPLPPFNSLAPHPQPTPSSSIAPPNLAPPSIGGNSSLPALSPVPSSPHGAVFGPPNPRSMPPPPYPLSPPKHAPSLSPPKSAPSLNPPPLVYLPPVVFPPPPSPSTHRKKPPQYALWCVAKPTVPDPIIQEAMDYACGSGADCKSIQPNGMCFQPNTLLAHASYAFNSYWQNTKIGGGTCDFGGTAMLVTVDPSYDKCNFMLT

SEQ ID NO: 58081 - protein, 278 aa, Glycine max
  peptide (1)..(278): Ceres Seq. ID no. 15177228
MLASTLFPVCDAINHGRAIRGHKIRRSSPIKSLKKLKIKSLRHLNKYTPFDSFGYSDFDSYGYSNFDDSYGSPSSLPLPPFNSLAPHPQPTPSSSIAPPNLAPPSIGGNSSLPALSPVPSSPHGAVFGPPNPRSMPPPPYPLSPPKHAPSLSPPKSAPSLNPPPLVYLPPVVFPPPPSPSTHRKKPPQYALWCVAKPTVPDPIIQEAMDYACGSGADCKSIQPNGMCFQPNTLLAHASYAFNSYWQNTKIGGGTCDFGGTAMLVTVDPSYDKCNFMLT

SEQ ID NO: 58082 - DNA, 921 bp, Glycine max
  misc_feature (1)..(921): Ceres Seq. ID no. 13594354
aaattcctcgacttagctatcaattcattcataaagaaataaaaacaaaagagaagcacgaacagtaactttagaagatcgatcatcatcaatggctgtccaagtttatattgtgtactactctatgtacgggcatgtggagagattagcagaagaaataaagaaaggagctgattcggtggaaggcgttgaggccaaactatggcaggtagctgagatattgccagaagaggttcttggcaaaatgggagcaccaccaaagagtgacgtaccaatcattacccctaatgagctctctgaggctgatgggtttgtctttggcttcccaacaagatttggaatgatggctgctcagttcaaagcttttatagatgcaactggaggtttgtggaaaacacaacaacttgcagggaagccggctggaatcttctatagcactagttcccagggtggtggacaagagactacagcgctaactgctataactcagttggttcatcatggaatgctatttgttccaattggatacacatttggtgctggaatgtttgagatggaggaactcaaaggtggaagcccatatggttcaggaacttatgctggtgatggttcaagacagccaactaagcttgaactggagcaagcattccaccaaggcaagtatattgccggcatcacaaagaagctcaaggaagctgcataatgttgaatcaattaagatttagaattaaatatatgtttgagaatcgttcattatattttagtcctagaatgttctgagttctgtttctttaggtgcttgcatgttatagttttcttatctttcaaaaagaaaatactatgtattgagttatatttttatgttacactacggtgtagtgattattgaaatttattgaataaaggaagtttgttttgtcg

SEQ ID NO: 58083 - protein, 203 aa, Glycine max
  peptide (1)..(203): Ceres Seq. ID no. 15221337
MAVQVYIVYYSMYGHVERLAEEIKKGADSVEGVEAKLWQVAEILPEEVLGKMGAPPKSDVPIITPNELSEADGFVFGFPTRFGMMAAQFKAFIDATGGLWKTQQLAGKPAGIFYSTSSQGGGQETTALTAITQLVHHGMLFVPIGYTFGAGMFEMEELKGGSPYGSGTYAGDGSRQPTKLELEQAFHQGKYIAGITKKLKEAA

SEQ ID NO: 58084 - protein, 192 aa, Glycine max
  peptide (1)..(192): Ceres Seq. ID no. 15221338
MYGHVERLAEEIKKGADSVEGVEAKLWQVAEILPEEVLGKMGAPPKSDVPIITPNELSEADGFVFGFPTRFGMMAAQFKAFIDATGGLWKTQQLAGKPAGIFYSTSSQGGGQETTALTAITQLVHHGMLFVPIGYTFGAGMFEMEELKGGSPYGSGTYAGDGSRQPTKLELEQAFHQGKYIAGITKKLKEAA

SEQ ID NO: 58085 - protein, 152 aa, Glycine max
  peptide (1)..(152): Ceres Seq. ID no. 15221339
MGAPPKSDVPIITPNELSEADGFVFGFPTRFGMMAAQFKAFIDATGGLWKTQQLAGKPAGIFYSTSSQGGGQETTALTAITQLVHHGMLFVPIGYTFGAGMFEMEELKGGSPYGSGTYAGDGSRQPTKLELEQAFHQGKYIAGITKKLKEAA

SEQ ID NO: 58086 - DNA, 1211 bp, Glycine max
  misc_feature (1)..(1211): Ceres Seq. ID no. 13594359
aaaaaaccctataaaacttaaatttcaggcataaactgagagagagataacatcgttgcagtggcgcgcccaatggctctgggaatctctaacatactgcactgccccaaattgagtttctcccacaataattttctccccaaagttccaacctctatcagcctcaggtttccccagacagcagcatggagtgatagaaagattatctgtgctgctgcatctgcggcaggaagctctaatcccgatggtgaatttaatccttatgaggtgctaggtgtaagccctattgagaaatttgacatggtcaaggcagcatatgctaaaaaaaagaaggaggctgagatgaatggcgatgaagcaactgcttcaagactggaaaaggcatatgacaaactcatgatggctcaattgtctaatcggaaaaagggtgtgacttttggatcatttaaggtttcaaaggagatcaagtatgctgacaagcttccagttataccttgggggccaaggcttactaaatcaagtcaaaatgacatgcgcatcaacttggcaatatctgctgtttttacagcttggatccttgtcaagcgcagtgctgaatataaacctttgcagtttttagcctttgcctttgtttataggctttttgagaagttaaaagcctctgaatctcctgtaacccccaaatataatgaagagggtgaagacacaggagaaggactccgcatgggaaaacgactgctccgatcactagccttggtttttggatgtgtagctatttcatctttggcatacactttcattttgaacataattgagtttgcaggtggttttattcctactcttttgtacaacagtcaggagttgataatcaccacttcatcggcactcatgctttatatcatggcatcttattatggatagtggagtgtgtcttgaagacgaagaaaccatgcatctattcaccatccctttttttttttaagtctttttcctcccttctctttcttttgttcttattgtgaactaaagtgcttttcttacaaattttgtcaaaagagatgctttttccttgttttaatatactaaattagggatagtgtcaactttcttatggtacttttttcttttcttttttgggaagggaggggggtcatttatattgattttgactattcacatcatagtggtatataagtcttgtattcttgctc

SEQ ID NO: 58087 - protein, 282 aa, Glycine max
  peptide (1)..(282): Ceres Seq. ID no. 13594360
MALGISNILHCPKLSFSHNNFLPKVPTSISLRFPQTAAWSDRKIICAAASAAGSSNPDGEFNPYEVLGVSPIEKFDMVKAAYAKKKKEAEMNGDEATASRLEKAYDKLMMAQLSNRKKGVTFGSFKVSKEIKYADKLPVIPWGPRLTKSSQNDMRINLAISAVFTAWILVKRSAEYKPLQFLAFAFVYRLFEKLKASESPVTPKYNEEGEDTGEGLRMGKRLLRSLALVFGCVAISSLAYTFILNIIEFAGGFIPTLLYNSQELIITTSSALMLYIMASYYG

SEQ ID NO: 58088 - protein, 206 aa, Glycine max
  peptide (1)..(206): Ceres Seq. ID no. 13594361
MVKAAYAKKKKEAEMNGDEATASRLEKAYDKLMMAQLSNRKKGVTFGSFKVSKEIKYADKLPVIPWGPRLTKSSQNDMRINLAISAVFTAWILVKRSAEYKPLQFLAFAFVYRLFEKLKASESPVTPKYNEEGEDTGEGLRMGKRLLRSLALVFGCVAISSLAYTFILNIIEFAGGFIPTLLYNSQELIITTSSALMLYIMASYYG

SEQ ID NO: 58089 - protein, 192 aa, Glycine max
  peptide (1)..(192): Ceres Seq. ID no. 13594362
MNGDEATASRLEKAYDKLMMAQLSNRKKGVTFGSFKVSKEIKYADKLPVIPWGPRLTKSSQNDMRINLAISAVFTAWILVKRSAEYKPLQFLAFAFVYRLFEKLKASESPVTPKYNEEGEDTGEGLRMGKRLLRSLALVFGCVAISSLAYTFILNIIEFAGGFIPTLLYNSQELIITTSSALMLYIMASYYG

SEQ ID NO: 58090 - DNA, 796 bp, Glycine max
  misc_feature (1)..(796): Ceres Seq. ID no. 12608513
attctctctttcccctgtaatctctatatattgtttacaattattcgagagtcatggcaacaagggtgcttttgttgatggccctcaccctctatatcttccccattgctacagcaacattccatgtcaagggttccgtttattgtgatacctgccgtgctggattcgaaaccaatgccaccttttatattcgaggtgcaagggtcggaattcagtgcaaagagaggaagaccatgaaggtagctttctactctgagggtgtgacggactccacgggaacataccacattgaggttgaaaatgaccaccgtgacaatatttgcgaatgcttgcttgttaaaagccctatcaaatggtgtagcaccccagactctgggcgtgacaaatccagcatagtactaacccactcccaaaatggcatagtcaaccatcttcactatgcaaatgctatgggttacttgagggacgaacccttgcctgaatgccacaaactgcttaaatactacttggcagactcagatgtttgatcaataaggtagaagaacgacttgttctttgtttaaatcatgtgttaatttaacgacggatctatttctatggttaagtatttgttgacatcagagtggtactatgtattagttactagcttgttactacttagttttgcttcatatgtctgtttgtaattaagtcacttaattgtggcgtcgtaatgattgatgatgtttaagtctcttatttaattttatgacaatgaagagaaaaaagggtacagacaatgctaaatgcatggttt

SEQ ID NO: 58091 - protein, 157 aa, Glycine max
  peptide (1)..(157): Ceres Seq. ID no. 12608514
MATRVLLLMALTLYIFPIATATFHVKGSVYCDTCRAGFETNATFYIRGARVGIQCKERKTMKVAFYSEGVTDSTGTYHIEVENDHRDNICECLLVKSPIKWCSTPDSGRDKSSIVLTHSQNGIVNHLHYANAMGYLRDEPLPECHKLLKYYLADSDV

SEQ ID NO: 58092 - protein, 149 aa, Glycine max
  peptide (1)..(149): Ceres Seq. ID no. 12608515
MALTLYIFPIATATFHVKGSVYCDTCRAGFETNATFYIRGARVGIQCKERKTMKVAFYSEGVTDSTGTYHIEVENDHRDNICECLLVKSPIKWCSTPDSGRDKSSIVLTHSQNGIVNHLHYANAMGYLRDEPLPECHKLLKYYLADSDV

SEQ ID NO: 58093 - protein, 97 aa, Glycine max
  peptide (1)..(97): Ceres Seq. ID no. 12608516
MKVAFYSEGVTDSTGTYHIEVENDHRDNICECLLVKSPIKWCSTPDSGRDKSSIVLTHSQNGIVNHLHYANAMGYLRDEPLPECHKLLKYYLADSDV

SEQ ID NO: 58094 - DNA, 1298 bp, Glycine max
  misc_feature (1)..(1298): Ceres Seq. ID no. 14315846
aaaacccacgtccgtgcccttgaagctaagcaacagtacaaccaaagactcctccaagctgtctgttttcctgtgtagttcttttgtctgctttcctttgtccttgagagggtttcatttttttgcgtatcacaaaaggtaacagagtcaaaaccctgcaaaaagtacaaaatgatgccaggcaatggacagttaactgttcctccgggcttcaggttccaccctactgatgaggagcttctctactattatctgaggaagaaagtttcttatgaagtcattgatcttgatgtcataagagaagtagatctcaacaaacttgagccttgggacctcaaagataagtgtaggattggatcagggcctcagaatgagtggtatttcttcagccataaggacaagaaatacccaacaggaaccagaacaaatcgagcaactacagctggtttttggaaagcaactggaagagacaagtccatataccacactaattccaagaggattggcatgaggaaaaccctagttttctacactggtcgtgctcctcatggccagaagactgattggatcatgcatgagtatcgccttgatgaagatgatgctgatgttcaagaagatgggtgggtggtatgcagggtcttcaaaaagaaaaaccaaagccgaggtttccaacaagaacttgaagaagaagagcacttaaccacccacatgagagcaagtggtccatgccaggttctagagcagaagcatcttcacatgcaaggaggaccatatgatcattacaactttgatgggacaatgcacctcccacagttgttcagtccagaatcagctattgcaccacctacaaattcttccttggccttatccatgaatgccatggacatccttgagtgctctcaaaacctgttgaggctcacaaccactggctgtggacttaatcttatgcagcaacaacaagaagagaggttcagtggtgactggtctttcttggacaagctactagcatcacaccatggcatggatcaaagcaaatgtaaccctcctactaatcatcatgctgcaactgttgtgggcacttctgctcaaaaattcccatttcattaccttggctgtgacaccacccatgatatcatgaaattttccaagtaggaagggatattgcattttaatgtgttattatacttaaggtgatcatgaggtgagaaatatttggtttctaagtatgtgtaatatgtagcaccttgttagatactcattgagattccactcattaatttagttatttcttgagtgtc

SEQ ID NO: 58095 - protein, 326 aa, Glycine max
  peptide (1)..(326): Ceres Seq. ID no. 14315847
MMPGNGQLTVPPGFRFHPTDEELLYYYLRKKVSYEVIDLDVIREVDLNKLEPWDLKDKCRIGSGPQNEWYFFSHKDKKYPTGTRTNRATTAGFWKATGRDKSIYHTNSKRIGMRKTLVFYTGRAPHGQKTDWIMHEYRLDEDDADVQEDGWVVCRVFKKKNQSRGFQQELEEEEHLTTHMRASGPCQVLEQKHLHMQGGPYDHYNFDGTMHLPQLFSPESAIAPPTNSSLALSMNAMDILECSQNLLRLTTTGCGLNLMQQQQEERFSGDWSFLDKLLASHHGMDQSKCNPPTNHHAATVVGTSAQKFPFHYLGCDTTHDIMKFSK

SEQ ID NO: 58096 - protein, 325 aa, Glycine max
  peptide (1)..(325): Ceres Seq. ID no. 14315848
MPGNGQLTVPPGFRFHPTDEELLYYYLRKKVSYEVIDLDVIREVDLNKLEPWDLKDKCRIGSGPQNEWYFFSHKDKKYPTGTRTNRATTAGFWKATGRDKSIYHTNSKRIGMRKTLVFYTGRAPHGQKTDWIMHEYRLDEDDADVQEDGWVVCRVFKKKNQSRGFQQELEEEEHLTTHMRASGPCQVLEQKHLHMQGGPYDHYNFDGTMHLPQLFSPESAIAPPTNSSLALSMNAMDILECSQNLLRLTTTGCGLNLMQQQQEERFSGDWSFLDKLLASHHGMDQSKCNPPTNHHAATVVGTSAQKFPFHYLGCDTTHDIMKFSK

SEQ ID NO: 58097 - protein, 214 aa, Glycine max
  peptide (1)..(214): Ceres Seq. ID no. 14315849
MRKTLVFYTGRAPHGQKTDWIMHEYRLDEDDADVQEDGWVVCRVFKKKNQSRGFQQELEEEEHLTTHMRASGPCQVLEQKHLHMQGGPYDHYNFDGTMHLPQLFSPESAIAPPTNSSLALSMNAMDILECSQNLLRLTTTGCGLNLMQQQQEERFSGDWSFLDKLLASHHGMDQSKCNPPTNHHAATVVGTSAQKFPFHYLGCDTTHDIMKFSK

SEQ ID NO: 58098 - DNA, 432 bp, Glycine max
  misc_feature (1)..(432): Ceres Seq. ID no. 12608522
agctaggtagggttttctctttctcacgttcctcttcgcagcaccacagtagcttcgcattagcaatggcgagaatcaaggtgtacgagctgaggtacaagacaaaagcagagcttctgaaccaacttaaggatctcaaagcagaactcgctctcctccgcgtcgntaaggagagcgagttctgctttgagatccttaagtgtcgtatgctcttctttgcttttgagaagatatagaaaacccaaacttactacaatacttgaaatagttgtaaattaacgagaattgaaacagaataacttgagggtgcaaatgaatttgacccttgtaattccaattttgtgcattttcctttagatccgctgcacccattggggtgcaattgtaattgtagctgccaattcattgtaaatgctcttgtaatttcatagt

SEQ ID NO: 58099 - protein, 77 aa, Glycine max
  peptide (1)..(77): Ceres Seq. ID no. 12608523
  misc_feature (55)..(55): Xaa is any aa, unknown or other
LGRVFSFSRSSSQHHSSFALAMARIKVYELRYKTKAELLNQLKDLKAELALLRVXKESEFCFEILKCRMLFFAFEKI

SEQ ID NO: 58100 - protein, 56 aa, Glycine max
  peptide (1)..(56): Ceres Seq. ID no. 12608524
  misc_feature (34)..(34): Xaa is any aa, unknown or other
MARIKVYELRYKTKAELLNQLKDLKAELALLRVXKESEFCFEILKCRMLFFAFEKI

SEQ ID NO: 58101 - DNA, 505 bp, Glycine max
  misc_feature (1)..(505): Ceres Seq. ID no. 13594351
acaagggaggcttggagatttctttattcttctggtcttaccaatcaaattgacctttttttgctttgccccggtatgattccttgtgatcaacgtcacttgttaatggtgcatgcaatatgaataagtagtgtatggaacagtgccaccataaggtttcttttgttgtattctttcttataacatggtagcagcggaggatttctgcacctttacggcatttttcttatgtccatagagcatggatgctacatcctcaccgtttgtttcctcaagaagaatgggtgtatatgatcctatccaccaaattagcacgtgggaagaaaatttcaaaagtaatgatactaataatttaactgtatccacatccataattggggaggtggacatgaagttagataatcagtttcaggtgcaatcagaggatgatactcatggaatatttggcacatctgtgaagtacgaccaagacactaacagacttactgataagacacaacgacgt

SEQ ID NO: 58102 - protein, 88 aa, Glycine max
  peptide (1)..(88): Ceres Seq. ID no. 13594352
MDATSSPFVSSRRMGVYDPIHQISTWEENFKSNDTNNLTVSTSIIGEVDMKLDNQFQVQSEDDTHGIFGTSVKYDQDTNRLTDKTQRR

SEQ ID NO: 58103 - protein, 75 aa, Glycine max
  peptide (1)..(75): Ceres Seq. ID no. 13594353
MGVYDPIHQISTWEENFKSNDTNNLTVSTSIIGEVDMKLDNQFQVQSEDDTHGIFGTSVKYDQDTNRLTDKTQRR

SEQ ID NO: 58104 - DNA, 1409 bp, Glycine max
  misc_feature (1)..(1409): Ceres Seq. ID no. 15168492
aacgaaatcttcctctgaaatcatagtaaaatacatccccactgaagttcaagttcttgtgtgtaaaatggccaacattttcctacacaatgggggcaacacttgcaaggctaccctctatctcttattcataaccacagccttttttatcgcaaactctgcaaggattctagatgaagtggaatcccaaccccaagccataggcaatctaccagcacctggagctaccaatccttcactcacaacagctccagtcaccaccacaccacagatagatcctgccaccactttgccaagtggccaaacatctgcacccaccaccatatcacagcaggtaggtcctgccaccactttgccaagtggccaaacacctgcaaccgccgccaccatgaaccctgctactaaagaagactctggagaggaagatgataaccaagtagagccgccagttccagaaacagaagctccagctgctgtcactgcaccggctgaagaggaaactccagctatccctagtgcagctccagtgacaccaaactctttggcaaaagagccatctttttctttcttcatgcatgacatccttggagggtcacgtccatcagcaagagtggtagcaggaatagtagcaaacactgatgtcactggcctaccattctcaaagctcaacaacaacctcttcccaatcactggaggaattccactggtaaaccccaagctcaacggcatcataaccaacaacaatctcccaaaccttgtaggcctcagtggtgcacaatcctccactgtgttcaagaacagtggcaccagcaacactgtcactggtggcaacaaccaaccatttgtctcagcaggtaacctccctgcaggattcaccatccagaagctcatgttcggctcggtgacggtgatcgacgaccagctaactgaagggcacgagcttgattctgctgtgattggaaaggcacaagggttctacttggcaagttcattggatggtagcagccagaccattttgttgacagttttggtgcatggtggtgaacatgatcaacatcatgatgtggtggatgacagtatcaatttctttgggattcataggacagcttcatcagaatctgaggtagcagtgattggtgggactggcaagtatgagaatgctagagggtatgcttcacttgagactcttctcaaggaggaccagcacaccactgatggggtggacaccatcctgcatttcaatgtctacctcactgagtagagagactagctacctgtcattgtgattgattgcctttcatatttagagtttgaatttgaatatttgtgtatggtttgttcaaattggtgctatatgtctctgttaatgcttcatcaagtttgaaacaaagctcattctgctttctttt

SEQ ID NO: 58105 - protein, 419 aa, Glycine max
  peptide (1)..(419): Ceres Seq. ID no. 15168493
TKSSSEIIVKYIPTEVQVLVCKMANIFLHNGGNTCKATLYLLFITTAFFIANSARILDEVESQPQAIGNLPAPGATNPSLTTAPVTTTPQIDPATTLPSGQTSAPTTISQQVGPATTLPSGQTPATAATMNPATKEDSGEEDDNQVEPPVPETEAPAAVTAPAEEETPAIPSAAPVTPNSLAKEPSFSFFMHDILGGSRPSARVVAGIVANTDVTGLPFSKLNNNLFPITGGIPLVNPKLNGIITNNNLPNLVGLSGAQSSTVFKNSGTSNTVTGGNNQPFVSAGNLPAGFTIQKLMFGSVTVIDDQLTEGHELDSAVIGKAQGFYLASSLDGSSQTILLTVLVHGGEHDQHHDVVDDSINFFGIHRTASSESEVAVIGGTGKYENARGYASLETLLKEDQHTTDGVDTILHFNVYLTE

SEQ ID NO: 58106 - protein, 397 aa, Glycine max
  peptide (1)..(397): Ceres Seq. ID no. 15168494
MANIFLHNGGNTCKATLYLLFITTAFFIANSARILDEVESQPQAIGNLPAPGATNPSLTTAPVTTTPQIDPATTLPSGQTSAPTTISQQVGPATTLPSGQTPATAATMNPATKEDSGEEDDNQVEPPVPETEAPAAVTAPAEEETPAIPSAAPVTPNSLAKEPSFSFFMHDILGGSRPSARVVAGIVANTDVTGLPFSKLNNNLFPITGGIPLVNPKLNGIITNNNLPNLVGLSGAQSSTVFKNSGTSNTVTGGNNQPFVSAGNLPAGFTIQKLMFGSVTVIDDQLTEGHELDSAVIGKAQGFYLASSLDGSSQTILLTVLVHGGEHDQHHDVVDDSINFFGIHRTASSESEVAVIGGTGKYENARGYASLETLLKEDQHTTDGVDTILHFNVYLTE

SEQ ID NO: 58107 - protein, 290 aa, Glycine max
  peptide (1)..(290): Ceres Seq. ID no. 15168495
MNPATKEDSGEEDDNQVEPPVPETEAPAAVTAPAEEETPAIPSAAPVTPNSLAKEPSFSFFMHDILGGSRPSARVVAGIVANTDVTGLPFSKLNNNLFPITGGIPLVNPKLNGIITNNNLPNLVGLSGAQSSTVFKNSGTSNTVTGGNNQPFVSAGNLPAGFTIQKLMFGSVTVIDDQLTEGHELDSAVIGKAQGFYLASSLDGSSQTILLTVLVHGGEHDQHHDVVDDSINFFGIHRTASSESEVAVIGGTGKYENARGYASLETLLKEDQHTTDGVDTILHFNVYLTE

SEQ ID NO: 58108 - DNA, 1372 bp, Glycine max
  misc_feature (1)..(1372): Ceres Seq. ID no. 13518893
accttaaacttttgcattgacattgcaaactgtttttctctcttagcttaaaagttctctcttgctatccctcctccattaaccccattaataataagcaccatcaatttccttaattgcttcatatataggaaaatacaatgaccaagatctttgtgctgttatgtctgctcttcttagcttcttctgggtttgtccatggctcttctaagaaggatcatattaggttatttgagctcaagaaaggtgatttttctataaaggtcaccaattggggtgcaacacttgtgtccgtaatacttcccgataagaatgggaagttgggtgatattgttcttggatatgattctcccaaggcatacacaaatgatacatcatactttggagctactgtgggccgggttgctaacagaattggaggagctcagttcactctaaatggaatccattacaaattagttgctaatgaaggaaacaacacacttcattctggacccaaagcattcagtgatgttctttggaaagtgacaaggtacataaaagatgatgacaaacccagaatcaccttcagttatcacagttatgatggtgaaggaggatttcctggggacctcctagtaactgtgagctacattcttgggaaaaactcattaagcataatcatgaaagcaaaagctctgaacaagcctaccccagtgaacatggtgaaccatgcttactggaacctaggaaaccacaacagtggcaacattctagatgaagtggttcagatctttggatcccaagtcacactatttgatgacaatctcattcccacaggccaatatgcctcagttagaggaaccccaaatgatttccttgagccacacattgttggagaaaggatcaaccaattgcctaagacaaatggctataacatcaactatgtgcttgatggtgaaaaaggcaatgcagagattaagctggcagctatagcggtggataagaagtcagggagagtgatgaagctcttcacaaatgctcctggtttgcagttttacactgctaattttgtcaagaatgacaagggaaaaggagggtttgtttatcagccacgttcagcactttgtttggagagtcaagcatttcctgactccgtgaatcaccctaattttccatcaactattgtgaccccagataagccttacaagcatgtcatgttgcttaagttttccaccaaagttccatatgctttttcacagttctaattagaattgtgtgctttgatgaaccactttttatgtgtttggtatcaatgtatagcacgactctttttgtgctcttgcaaaacttggcttgggttcattaaaatgaataatgagatattttaatt

SEQ ID NO: 58109 - protein, 368 aa, Glycine max
  peptide (1)..(368): Ceres Seq. ID no. 13518894
MTKIFVLLCLLFLASSGFVHGSSKKDHIRLFELKKGDFSIKVTNWGATLVSVILPDKNGKLGDIVLGYDSPKAYTNDTSYFGATVGRVANRIGGAQFTLNGIHYKLVANEGNNTLHSGPKAFSDVLWKVTRYIKDDDKPRITFSYHSYDGEGGFPGDLLVTVSYILGKNSLSIIMKAKALNKPTPVNMVNHAYWNLGNHNSGNILDEVVQIFGSQVTLFDDNLIPTGQYASVRGTPNDFLEPHIVGERINQLPKTNGYNINYVLDGEKGNAEIKLAAIAVDKKSGRVMKLFTNAPGLQFYTANFVKNDKGKGGFVYQPRSALCLESQAFPDSVNHPNFPSTIVTPDKPYKHVMLLKFSTKVPYAFSQF

SEQ ID NO: 58110 - protein, 194 aa, Glycine max
  peptide (1)..(194): Ceres Seq. ID no. 13518895
MKAKALNKPTPVNMVNHAYWNLGNHNSGNILDEVVQIFGSQVTLFDDNLIPTGQYASVRGTPNDFLEPHIVGERINQLPKTNGYNINYVLDGEKGNAEIKLAAIAVDKKSGRVMKLFTNAPGLQFYTANFVKNDKGKGGFVYQPRSALCLESQAFPDSVNHPNFPSTIVTPDKPYKHVMLLKFSTKVPYAFSQF

SEQ ID NO: 58111 - DNA, 1461 bp, Glycine max
  misc_feature (1)..(1461): Ceres Seq. ID no. 15171131
aggaagtaatagcccctacactcgacagtctcttcttctcttctctgcagcttctctcccctcaacagtgagtaattttggcagaatctccgccaagtatcccaaaatttcctccaatctcttcagagttctgcagacattcatccactttccctctataaaaccattcacaatcccaatccaacttgcaaaaccaaaacctagggttcccaaatcctaattgcactaaaacccagaatgaaagcctctttgaagttccgcgaggaacagcaaaaacccctcttgagagcaaaagtcccactcggcatcctcggcatgcccttccaatccggcatagtcgctggcgaatccaaagaactcactctcaacctttctaccttcttcgaatcgggtccttctctcaaagttgcgtatcgacccaacgactcaaagaaccctttttccttcatagtgaaaacgggaaccggacccttcggttcccctctcaagagctccatgctcatgagctgcgagtttaaccttcccggtacaaccggtaccccgttgtttatgcttcacttcaaaccccgcttcggcgactttactttcaagaagacgcagtcttcgatttttgatgggaaagggtttgggtcttttaacacgcaaaacgacgccgttgagaatgggaataatgctgaaacgccgttgatggaatcggccaaggtttcgattcttgactccggcgcctcgatgttctccggcatggaggtggctgcgcggacgactctgccggtgcggggacgtgctgccgtgaagttccggtggggagttaggattccggcggagttcaaggggaacaacgcgtttcagaagattccgtttctcgtaatggataagatcggcgtggagcacatgatggagtgcggagattcgaagaaggggaagggggacgccggagagaaaccgagggttccggctagtgctgacgtggcggaggcgtgctttgcggtgaagcggcagatggaggttctgcaggcggagaacgggttgcttaggaacgccgtggaagatctccggcgagaaattgtcggcggccgaagcggaggctcgattttggggaaaaaccctaaaaagaacgataggaaaacgacgtcggattacggtaattttcccgggaaatcgacggaggctgaagcgagtgaggaattgaagaaagcattaatgggagcagctggtggtagtagtgcttgaatttgaatctgtagaattgtgtttttctctgttgcaattttagtttcagttttgatgctgcgaaattttcttgtgtagtgttatatatattatgataatgatgatatataggttcattaggttggttcgtcaaggctgcttgttcttgtattcaattcaattttgaagctttgaacggaggatcatgaaaataagaaaatttgaggtttttagtagttggtacgaaatcag

SEQ ID NO: 58112 - protein, 330 aa, Glycine max
  peptide (1)..(330): Ceres Seq. ID no. 15171132
MKASLKFREEQQKPLLRAKVPLGILGMPFQSGIVAGESKELTLNLSTFFESGPSLKVAYRPNDSKNPFSFIVKTGTGPFGSPLKSSMLMSCEFNLPGTTGTPLFMLHFKPRFGDFTFKKTQSSIFDGKGFGSFNTQNDAVENGNNAETPLMESAKVSILDSGASMFSGMEVAARTTLPVRGRAAVKFRWGVRIPAEFKGNNAFQKIPFLVMDKIGVEHMMECGDSKKGKGDAGEKPRVPASADVAEACFAVKRQMEVLQAENGLLRNAVEDLRREIVGGRSGGSILGKNPKKNDRKTTSDYGNFPGKSTEAEASEELKKALMGAAGGSSA

SEQ ID NO: 58113 - protein, 304 aa, Glycine max
  peptide (1)..(304): Ceres Seq. ID no. 15171133
MPFQSGIVAGESKELTLNLSTFFESGPSLKVAYRPNDSKNPFSFIVKTGTGPFGSPLKSSMLMSCEFNLPGTTGTPLFMLHFKPRFGDFTFKKTQSSIFDGKGFGSFNTQNDAVENGNNAETPLMESAKVSILDSGASMFSGMEVAARTTLPVRGRAAVKFRWGVRIPAEFKGNNAFQKIPFLVMDKIGVEHMMECGDSKKGKGDAGEKPRVPASADVAEACFAVKRQMEVLQAENGLLRNAVEDLRREIVGGRSGGSILGKNPKKNDRKTTSDYGNFPGKSTEAEASEELKKALMGAAGGSSA

SEQ ID NO: 58114 - protein, 244 aa, Glycine max
  peptide (1)..(244): Ceres Seq. ID no. 15171134
MLMSCEFNLPGTTGTPLFMLHFKPRFGDFTFKKTQSSIFDGKGFGSFNTQNDAVENGNNAETPLMESAKVSILDSGASMFSGMEVAARTTLPVRGRAAVKFRWGVRIPAEFKGNNAFQKIPFLVMDKIGVEHMMECGDSKKGKGDAGEKPRVPASADVAEACFAVKRQMEVLQAENGLLRNAVEDLRREIVGGRSGGSILGKNPKKNDRKTTSDYGNFPGKSTEAEASEELKKALMGAAGGSSA

SEQ ID NO: 58115 - DNA, 1363 bp, Glycine max
  misc_feature (1)..(1363): Ceres Seq. ID no. 15168468
aattatttctgataaaatcttgaacatctttttctctcattctaagaattggagacttttcaaaagtttagggactgcaaattctctgcttctctacacatggagccggtgtcgcgtgctaatttcttttcattccaaagattttggctaccgtttcagggacagggagggatgaggcagcaagttgatccctcggctcacacaatcaagtcccatggagcatcacttgcaagaaaacacgctcgtgattggcttatattgctgcttctcatagtgatagagattgtcctttttgtcattcatccatttaaacgctttgtgggaagggacatgatggaggaccttagatatcctatgaaagaaaacacggtgcctgtatgggctgttcctttatatgcggttctgttgccaatggccgttttccttctcttctatatgcgcaggagagatgtttatgatttgcaccacagtgttctaggtttgttatttgctgttctgataactggggtcttcaccgatgcaataaaaaatgcagttggccggcctcgcccagacttctattggcgttgcttccccgatggggtagagaattatgatagttggggaggtgtggtatgtcatggcaatgctagcgatataaaagaaggacacaagagtttcccaagcggccatacatcatggtcctttgcaggtctaggttttctgtctctgtacctatcggggaagattaaagcttttgatcgcaaagggcacgtggcaaaattatgcattgtgtttcttcctctacttgttgcttgcctagttgcaatctctcgagtggatgactattggcaccattggcaagatgtgtttgccggaggcattctagggcttgttgtggcaaccttttgttatatgcagttcttccctgcgccctataatgatgaaggatggggtccatatgcatatttccgggcaatggaggaatcacgagcgaatgcaaatattaatcgggaattaccagttgggcaggccatggaggatcgggtaacgaatcaagaaccaaggagaaatggtgataccacctttaccccttactcttaccgtagcccaaccttggaagccatggaaatgggacagaagtaatagtcttctatagcactaatcttctccctagctacctagttccttacttttgtgtatacttatgagcttctctacacggcaaccactagatttagctaattgtgcagcttctgtttcttcttgcattattattattattggcactgccactgtaaaaaatgaaaaatgacggcttctttccgctgaattagattatgttgatagatggtacgttaatgggatcccattttgaccttac

SEQ ID NO: 58116 - protein, 341 aa, Glycine max; identical to SEQ ID NO: 57831
  peptide (1)..(341): Ceres Seq. ID no. 15168469

SEQ ID NO: 58117 - protein, 317 aa, Glycine max; identical to SEQ ID NO: 57832
  peptide (1)..(317): Ceres Seq. ID no. 15168470

SEQ ID NO: 58118 - protein, 264 aa, Glycine max
  peptide (1)..(264): Ceres Seq. ID no. 15168471
MMEDLRYPMKENTVPVWAVPLYAVLLPMAVFLLFYMRRRDVYDLHHSVLGLLFAVLITGVFTDAIKNAVGRPRPDFYWRCFPDGVENYDSWGGVVCHGNASDIKEGHKSFPSGHTSWSFAGLGFLSLYLSGKIKAFDRKGHVAKLCIVFLPLLVACLVAISRVDDYWHHWQDVFAGGILGLVVATFCYMQFFPAPYNDEGWGPYAYFRAMEESRANANINRELPVGQAMEDRVTNQEPRRNGDTTFTPYSYRSPTLEAMEMGQK

SEQ ID NO: 58119 - DNA, 985 bp, Glycine max
  misc_feature (1)..(985): Ceres Seq. ID no. 15168557
attgcctcacacacacaaacacaacagtgtctgctgcaccctacaatggtttcgctaccaacatggtttcgctactttcaccacaaggtcggatactccgtttccctcgccgtgaagaacaataaaggagatccaatcacagccagagagataaatgatgctgtttggaaaaacttctttctaggaaagctgacatacttgctctggaataaaggagaggagatggcccctactattgatggaaaagcagtaactcttgttcggaaattaccagctgtagacccaacgagtgtttttgtaggagatgttgtggttatgaaggaccctgagaagccagataactacctactcagaagattaactgcaattgaaggctatgaagtggtttctactgatgaaaaggatgaaccctttattcttgagaaggatcaatgctgggtagaggctgaaaatgaaaaattgaatgccaaggaagcgaaggatagccgaacatttggtccagttcagatgacagacattgtaggcagagtcatatattgcctgcgaagtgctgtagaccatggccgtgtacaaaacagtgatttcggcatgcgaaacgatacaccagtgctggaagtggaacttgatgttgatgagatggcaaagagtcacaaagcctgaaacatttttcccaagaaacactaactagtttactttacgcatgccttagtttcttcttgtggattttccttgaagcacagattgaagaataaaaaaatatgatttttaaattgttgcaatgggatgatggtgttatgtggatgtcctctgcatgctaggcaattggctgcggcctgtgttaaagcttgagttcaacattattgtatgctaagttctagcaaggactcctctgccctttgttctattcatttggctgtaaaattgaccaagttttggtctttttttgttaatggtcgaggaagataataaaagatgctgcgttgtt

SEQ ID NO: 58120 - protein, 219 aa, Glycine max
  peptide (1)..(219): Ceres Seq. ID no. 15168558
IASHTQTQQCLLHPTMVSLPTWFRYFHHKVGYSVSLAVKNNKGDPITAREINDAVWKNFFLGKLTYLLWNKGEEMAPTIDGKAVTLVRKLPAVDPTSVFVGDVVVMKDPEKPDNYLLRRLTAIEGYEVVSTDEKDEPFILEKDQCWVEAENEKLNAKEAKDSRTFGPVQMTDIVGRVIYCLRSAVDHGRVQNSDFGMRNDTPVLEVELDVDEMAKSHKA

SEQ ID NO: 58121 - protein, 204 aa, Glycine max
  peptide (1)..(204): Ceres Seq. ID no. 15168559
MVSLPTWFRYFHHKVGYSVSLAVKNNKGDPITAREINDAVWKNFFLGKLTYLLWNKGEEMAPTIDGKAVTLVRKLPAVDPTSVFVGDVVVMKDPEKPDNYLLRRLTAIEGYEVVSTDEKDEPFILEKDQCWVEAENEKLNAKEAKDSRTFGPVQMTDIVGRVIYCLRSAVDHGRVQNSDFGMRNDTPVLEVELDVDEMAKSHKA

SEQ ID NO: 58122 - protein, 145 aa, Glycine max
  peptide (1)..(145): Ceres Seq. ID no. 15168560
MAPTIDGKAVTLVRKLPAVDPTSVFVGDVVVMKDPEKPDNYLLRRLTAIEGYEVVSTDEKDEPFILEKDQCWVEAENEKLNAKEAKDSRTFGPVQMTDIVGRVIYCLRSAVDHGRVQNSDFGMRNDTPVLEVELDVDEMAKSHKA

SEQ ID NO: 58123 - DNA, 1754 bp, Glycine max
  misc_feature (1)..(1754): Ceres Seq. ID no. 15168569
aaaccctagaagttcgtcgtcttgtcttccagaatctgacaactttcctcatccgaacctaaattctctcatcaaaccctcacttatccaatccccacccaaattccccgcatcgacctcactcccctaaattcccccatcgccggctctctcacggccgaattcatcgcatcgccggttccgctacggtggctatcgcatgggtaagattctccgagaaaacgcgaagccgtcggcaaattcctcatcggcgtacccctctgcggcgcccgccaccacttcgtcgacatcggtgacggagacggtgagggggtcacaccagttcaagatcacggggtactcgctctcgaaggggatcgggattgggaagtacatggcctccgacgtgttttctgtcggagggtacaattgggcgatttatttctaccccgatgggaagagcgtggaggacaatgcaacctacgtgtcgctcttcatcgcgctggccagcgaaggcaccgatgttagggcacttttcgagttgacccttttggatcagagtgggaaggagaggcacaaggtgcatagccatttcgagaggactcttgaaagcgggccttacaccttaaaataccgcggtagtatgtggggttacaagcggtttttcaagagaacagctctagagacatcagactaccttaaagatgattgtctgtctgtgaattgtagtgttggtgttgtgaggtcacacacggaaggtccgaaaatctataccatagcaatacctccttctagcattggtcagaaatttggacaactgctggaaagtggtaaaggcagtgatgtaaattttgaagttaatggtgatatttttgctgcacataaattggtactagcagctcgttcacctgttttcagagcacagctttttggtcctatgaaagatcagaatacccagcgtattaaagttgaagacatggaggctccagttttcaaggcattgcttcattttatatactgggactcactaccagacatgcaagagcttactgggttgaactcaaaatgggcatcaaccttgatggctcagcatcttctagcagcagctgatcgatatggcttagagagacttaggctgatgtgtgaagcgagtctctgtgaagatgttgctattaatactgtggctacaactctagccttggcagagcagcaccattgtttccaactgaaagctgtctgtctcaagtttattgctacctctgaaaatcttagagctgtgatgcaaactgacggatttgagtacttgaaggaaagctgcccatctgttctgactgagctattggagtacgtggccagatttactgagcattcggacatcatgtgcaagcataggaatgaagcattacttgatggcagtgacataaatgggaggcgggtgaagcaaaggctctaatatgtgaagaacactgcacagctttctgtacatccctcttctactctccgttttaaaagatagcgagagcatggttagagggagaatatatataatcttttataggatcagaggcaatttttaattttcttagcttattcatgtgtaagagatgtaaatgtaatttgtgttgttgctgttactgttctgtttcacgtgtaggtttctgtaatatcttcagtatcactttttactggaaaacatgccttgcaagtgttgatcattactttttatattctgtatgcttattattcaaatgtagtagcgtaagtgcccttgaaac

SEQ ID NO: 58124 - protein, 410 aa, Glycine max
  peptide (1)..(410): Ceres Seq. ID no. 15168570
MGKILRENAKPSANSSSAYPSAAPATTSSTSVTETVRGSHQFKITGYSLSKGIGIGKYMASDVFSVGGYNWAIYFYPDGKSVEDNATYVSLFIALASEGTDVRALFELTLLDQSGKERHKVHSHFERTLESGPYTLKYRGSMWGYKRFFKRTALETSDYLKDDCLSVNCSVGVVRSHTEGPKIYTIAIPPSSIGQKFGQLLESGKGSDVNFEVNGDIFAAHKLVLAARSPVFRAQLFGPMKDQNTQRIKVEDMEAPVFKALLHFIYWDSLPDMQELTGLNSKWASTLMAQHLLAAADRYGLERLRLMCEASLCEDVAINTVATTLALAEQHHCFQLKAVCLKFIATSENLRAVMQTDGFEYLKESCPSVLTELLEYVARFTEHSDIMCKHRNEALLDGSDINGRRVKQRL

SEQ ID NO: 58125 - protein, 352 aa, Glycine max
  peptide (1)..(352): Ceres Seq. ID no. 15168571
MASDVFSVGGYNWAIYFYPDGKSVEDNATYVSLFIALASEGTDVRALFELTLLDQSGKERHKVHSHFERTLESGPYTLKYRGSMWGYKRFFKRTALETSDYLKDDCLSVNCSVGVVRSHTEGPKIYTIAIPPSSIGQKFGQLLESGKGSDVNFEVNGDIFAAHKLVLAARSPVFRAQLFGPMKDQNTQRIKVEDMEAPVFKALLHFIYWDSLPDMQELTGLNSKWASTLMAQHLLAAADRYGLERLRLMCEASLCEDVAINTVATTLALAEQHHCFQLKAVCLKFIATSENLRAVMQTDGFEYLKESCPSVLTELLEYVARFTEHSDIMCKHRNEALLDGSDINGRRVKQRL

SEQ ID NO: 58126 - protein, 269 aa, Glycine max
  peptide (1)..(269): Ceres Seq. ID no. 15168572
MWGYKRFFKRTALETSDYLKDDCLSVNCSVGVVRSHTEGPKIYTIAIPPSSIGQKFGQLLESGKGSDVNFEVNGDIFAAHKLVLAARSPVFRAQLFGPMKDQNTQRIKVEDMEAPVFKALLHFIYWDSLPDMQELTGLNSKWASTLMAQHLLAAADRYGLERLRLMCEASLCEDVAINTVATTLALAEQHHCFQLKAVCLKFIATSENLRAVMQTDGFEYLKESCPSVLTELLEYVARFTEHSDIMCKHRNEALLDGSDINGRRVKQRL

SEQ ID NO: 58127 - DNA, 949 bp, Glycine max
  misc_feature (1)..(949): Ceres Seq. ID no. 13639640
aaagataatgtctagacacaaactgctacgccaaaatactagcttcaacgcagcttgtctttgactcttctttcttggatcttgaagagccatttagttagctagatctgagtttaggaaacctaacaaactacacataactacttcactcacttgtgtttgagcctttccaccatcaaaatgctgagtgaaagttccaacacccacaactcatctaaaatgtccttcagaataacgaaggaggatgggttcttctctaggctaatagccaaggaaactaccacccccaactcttcttcaaggatcttctactacggagaaacttcggttgcggttcctttcacatgggaggcacaacctggtaccccgaaacaccctttgtcagagacatctttgccacctcttacacccccaccttcctacttttcaagccccaaaaagtcccacaacaccaagagaagaaactactactcaaataaggccagcaacatattttcaagcatttttctgaggcttgtaggatcaagaaagtctcttcataatcatcatcatgtgtcaccatcgtcatcttggtcgtcaccttcttcatcgtcttcatcttcttcttcgtggtctttggcgcattataataataataataataactcatcgccctcgttttccatgagagacaaaggtcgaggtcaaggaggaagaagcagcaaacacaacaaatgttctaatggatttagaggctgctatccctttggcaacatgaggaacgcaaatgtaagccatggtagtgtggactaattaattagttagtttaatttgatctattttggaaattaactattctgcatgattttaatatttttgtagagatcttcgaaagtttatatagctgctaagtgctaagtgtatttattggaagatgttagtgttggcctgggatgtcccccccttttcc

SEQ ID NO: 58128 - protein, 203 aa, Glycine max
  peptide (1)..(203): Ceres Seq. ID no. 13639641
MLSESSNTHNSSKMSFRITKEDGFFSRLIAKETTTPNSSSRIFYYGETSVAVPFTWEAQPGTPKHPLSETSLPPLTPPPSYFSSPKKSHNTKRRNYYSNKASNIFSSIFLRLVGSRKSLHNHHHVSPSSSWSSPSSSSSSSSSWSLAHYNNNNNNSSPSFSMRDKGRGQGGRSSKHNKCSNGFRGCYPFGNMRNANVSHGSVD

SEQ ID NO: 58129 - protein, 190 aa, Glycine max
  peptide (1)..(190): Ceres Seq. ID no. 13639642
MSFRITKEDGFFSRLIAKETTTPNSSSRIFYYGETSVAVPFTWEAQPGTPKHPLSETSLPPLTPPPSYFSSPKKSHNTKRRNYYSNKASNIFSSIFLRLVGSRKSLHNHHHVSPSSSWSSPSSSSSSSSSWSLAHYNNNNNNSSPSFSMRDKGRGQGGRSSKHNKCSNGFRGCYPFGNMRNANVSHGSVD

SEQ ID NO: 58130 - DNA, 749 bp, Glycine max
  misc_feature (1)..(749): Ceres Seq. ID no. 15173273
ctctctctctctctcctctaaaaaaaacacctaatctgatctgagttcctgacatgtccatcgaatttgattctgaatccattcccactcccacggcccaagcccaagcccaggagcgatccaactctcgctgcgccttgttattttcttcctacaactgcttcggcggccaacgacgtcgttcctcatggtgggagcgcgtccgctcccactcccactccgctccagcctcagccggtgaccggtggtggtcgcgtgggctcagggcgctgaagaagcttcgcgagtggtcggagatcgtagcggggcctaagtggaagaccttcattcgcaggttcaaccgcaaccgccccaacaaacgcatacccacgtaccagtatgaccccttcagttacgccctcaacttcgacgaggggcctaacggggatttcaaccaccaccacgacgatgctgcgcttcgcaatttctccacgcgctacgctgccgcgaacaacgtcaagtcgctttcccccaaggcccgtgactgcgatgacgccgttttggtgtgagtggtgtggagtggccacgcggtgtttggtttgtggcttagcttcagtccgaaaaggggcaggagtgggtgccccttcgcgtcattatttagttttatttttttgcttaaattacttattttttctttatattttcatgatttttttaattttttttagtcttgtaataatttttttgaaagtgatatttttagcttttac

SEQ ID NO: 58131 - protein, 164 aa, Glycine max
  peptide (1)..(164): Ceres Seq. ID no. 15173274
MSIEFDSESIPTPTAQAQAQERSNSRCALLFSSYNCFGGQRRRSSWWERVRSHSHSAPASAGDRWWSRGLRALKKLREWSEIVAGPKWKTFIRRFNRNRPNKRIPTYQYDPFSYALNFDEGPNGDFNHHHDDAALRNFSTRYAAANNVKSLSPKARDCDDAVLV

SEQ ID NO: 58132 - protein, 123 aa, Glycine max
  peptide (1)..(123): Ceres Seq. ID no. 15173275
MTPSVTPSTSTRGLTGISTTTTTMLRFAISPRATLPRTTSSRFPPRPVTAMTPFWCEWCGVATRCLVCGLASVRKGAGVGAPSRHYLVLFFCLNYLFFLYIFMIFLIFFSLVIIFLKVIFLAF

SEQ ID NO: 58133 - protein, 100 aa, Glycine max
  peptide (1)..(100): Ceres Seq. ID no. 15173276
MLRFAISPRATLPRTTSSRFPPRPVTAMTPFWCEWCGVATRCLVCGLASVRKGAGVGAPSRHYLVLFFCLNYLFFLYIFMIFLIFFSLVIIFLKVIFLAF

SEQ ID NO: 58134 - DNA, 1292 bp, Glycine max
  misc_feature (1)..(1292): Ceres Seq. ID no. 14315330
ttcctaaaaggctgtccctgtccatgttgagcgcgtttgttcacgcgccttcaatttgttcttccaacaccctcagtcattgtgtgagtccgaagctcaacctctctcgctcttcaatggccgtatcctctattcgaatcgccgtcgtcggtgatgtgcatgattgctggaaccttgaacaagattcgaaagcacttgagctcttgcagccagatttggtgctgtttacaggtgattttggtgaagaaaatcttgaagtcattaagagtgttgtgaatcttgaatttgctaaagcagttatattgggaaaccacgatgcctggtttactaaacagttttctggaagcaaggagaaggataaagttcagcttcagctagaatgccttggtaaggagcacgtggcttatcaacgttcagacttccctcagataaaagtaagcgttgttggtggacgaccattttctattgggggtaaaccaatgtttcggaaaaagcttcttttggcaagatacggagtcaaagacatggatgagagtgctaagagaatccagaaagctgctcttggaacaccagaggaccattttcttatattacttgcacataatggacccacaggccttggttctgattcaaatgatatatgtggaaaggattgggaatttgagggtgatggtgatcatggtgacccagatctagcacaagcaatatccttgctaaaggagaacaatcagatatccattccattggttgtgttcggtcacatgcacaaagagctggcatatggcaatggctttaggaaaatgattgtggttggcgctgataacaccatatacttgaatggggcaattgttccaagggtcaaaaggttgggtggtgatgaagacaagaaaagcttagatgatgaaagtgcccttgcctcaccagaggccaaaggtacaagaagagcctttactttagttgagatttcggaaggaagagttgccaagattgcagaaagttgggtctcggttgtcgaagataggaccacattagaagaagagcacatactatttgagagcagctaggatcctcatcctccacatataggttcctgcttcagtcacatggattttaatgcgcatagataaatgcagccaggggtgaattatgtctcgatactcatgaatacatcgtatttaatgttagtaactactgtatagacttgataaatggtacatgctctgataccaattcccccttatctaggtggtgatttattgcttgtaccgctcctccattctatgtggcaattc

SEQ ID NO: 58135 - protein, 353 aa, Glycine max
  peptide (1)..(353): Ceres Seq. ID no. 14315331
PKRLSLSMLSAFVHAPSICSSNTLSHCVSPKLNLSRSSMAVSSIRIAVVGDVHDCWNLEQDSKALELLQPDLVLFTGDFGEENLEVIKSVVNLEFAKAVILGNHDAWFTKQFSGSKEKDKVQLQLECLGKEHVAYQRSDFPQIKVSVVGGRPFSIGGKPMFRKKLLLARYGVKDMDESAKRIQKAALGTPEDHFLILLAHNGPTGLGSDSNDICGKDWEFEGDGDHGDPDLAQAISLLKENNQISIPLVVFGHMHKELAYGNGFRKMIVVGADNTIYLNGAIVPRVKRLGGDEDKKSLDDESALASPEAKGTRRAFTLVEISEGRVAKIAESWVSVVEDRTTLEEEHILFESS

SEQ ID NO: 58136 - protein, 346 aa, Glycine max
  peptide (1)..(346): Ceres Seq. ID no. 14315332
MLSAFVHAPSICSSNTLSHCVSPKLNLSRSSMAVSSIRIAVVGDVHDCWNLEQDSKALELLQPDLVLFTGDFGEENLEVIKSVVNLEFAKAVILGNHDAWFTKQFSGSKEKDKVQLQLECLGKEHVAYQRSDFPQIKVSVVGGRPFSIGGKPMFRKKLLLARYGVKDMDESAKRIQKAALGTPEDHFLILLAHNGPTGLGSDSNDICGKDWEFEGDGDHGDPDLAQAISLLKENNQISIPLVVFGHMHKELAYGNGFRKMIVVGADNTIYLNGAIVPRVKRLGGDEDKKSLDDESALASPEAKGTRRAFTLVEISEGRVAKIAESWVSVVEDRTTLEEEHILFESS

SEQ ID NO: 58137 - protein, 315 aa, Glycine max
  peptide (1)..(315): Ceres Seq. ID no. 14315333
MAVSSIRIAVVGDVHDCWNLEQDSKALELLQPDLVLFTGDFGEENLEVIKSVVNLEFAKAVILGNHDAWFTKQFSGSKEKDKVQLQLECLGKEHVAYQRSDFPQIKVSVVGGRPFSIGGKPMFRKKLLLARYGVKDMDESAKRIQKAALGTPEDHFLILLAHNGPTGLGSDSNDICGKDWEFEGDGDHGDPDLAQAISLLKENNQISIPLVVFGHMHKELAYGNGFRKMIVVGADNTIYLNGAIVPRVKRLGGDEDKKSLDDESALASPEAKGTRRAFTLVEISEGRVAKIAESWVSVVEDRTTLEEEHILFESS

SEQ ID NO: 58138 - DNA, 1460 bp, Glycine max
  misc_feature (1)..(1460): Ceres Seq. ID no. 15224973
ctggataacatttcaaccacttactccactcttgagtccttcacactcgacgctatcaccggccggtaacgtcacacaaacccaaaatcacaatggcgttctcatcgtccctatggtcttccctcttcgttgcttacccaaacagaaccgccatttccactcgattctctcacaaaccgcccaaactccctctctcgccggcgttcgccatcccgccgctctccacggccactgcggcggacgtctcgggcgccatcgacgggactacgatcgcggtggtgagcgggggattcgtggcggcactggcggcggtgctgtcgctgacggacccggagcggcggcggcagttacaggcggaggaggtgggcggcggcgacaaggaggtggtgagggagtacttcaacaactccgggttccagcgctggaagaagatctacggcgacaccgacgaggtgaaccgggttcagcgcgacattaggttgggccacgccaagaccgtggagaacacgctgagcatgttgaaggacgaaggttcccttcagggcgttacggtttgcgacgctgggtgcggtaccggttctctctctattcctcttgccaaagagggcgctgttgtgttcgccagtgatatctccgccgctatggttgccgaggctgagaaacaggcaaaagaacagcttgcaaccagtgaagatggatctgtgcccgtgatgcctaagtttgtagtgaaggatttagagagcttggatggcaagtatgatacggtggtctgcctcgatgtcttgattcattacccacaacataaagccgatgggatgattgcacaccttgcatcattggccaacaaccgattgattctgagttttgccccaaagacgttttattatgatctgctaaagagggttggagagttgttccctggtccttcaaaggcaacaagagcatatcttcactctgaggcagatgtagagagagcattgcaaaaggttggctggaccataaggaagagaggcttaaccactacccaattttactttgctaggcttattgaggctgttcctatgtagtggggattgaaaggtgagttttgcatgattagaggaaattcttagtgtaaattgttaggccttctattaagtgattttgtatgctattatcctccacatggaccacatataattctattgtgtatatttcttcatagcctagaagatgctgacgaattgaggctatgttttctgggagaaatagagtgtaagtggttcatgataatttgtgtggagctagtgcctagtgagttaccggtccattgggttggtggaatggaggcaagctccctttaagctgttcagaagttacagcgattattactcaagggtagtaattagttcctgtattgcattttttttataacaatgataacgataataataataataataataatatcacactttttg

SEQ ID NO: 58139 - protein, 324 aa, Glycine max
  peptide (1)..(324): Ceres Seq. ID no. 15224974
MAFSSSLWSSLFVAYPNRTAISTRFSHKPPKLPLSPAFAIPPLSTATAADVSGAIDGTTIAVVSGGFVAALAAVLSLTDPERRRQLQAEEVGGGDKEVVREYFNNSGFQRWKKIYGDTDEVNRVQRDIRLGHAKTVENTLSMLKDEGSLQGVTVCDAGCGTGSLSIPLAKEGAVVFASDISAAMVAEAEKQAKEQLATSEDGSVPVMPKFVVKDLESLDGKYDTVVCLDVLIHYPQHKADGMIAHLASLANNRLILSFAPKTFYYDLLKRVGELFPGPSKATRAYLHSEADVERALQKVGWTIRKRGLTTTQFYFARLIEAVPM

SEQ ID NO: 58140 - protein, 183 aa, Glycine max
  peptide (1)..(183): Ceres Seq. ID no. 15224975
MLKDEGSLQGVTVCDAGCGTGSLSIPLAKEGAVVFASDISAAMVAEAEKQAKEQLATSEDGSVPVMPKFVVKDLESLDGKYDTVVCLDVLIHYPQHKADGMIAHLASLANNRLILSFAPKTFYYDLLKRVGELFPGPSKATRAYLHSEADVERALQKVGWTIRKRGLTTTQFYFARLIEAVPM

SEQ ID NO: 58141 - DNA, 714 bp, Glycine max
  misc_feature (1)..(714): Ceres Seq. ID no. 12612236
attattcaccgaaaaagaggatctgcagagtgagtgatggggattgcggcggctattggattgttgtcaccgtttccgttctattactgcctctggatttggccacagtggtgggtggacttgtgtggcagaggccgagaggcccgagatccatctaaggttatggcttacgtttcttacttcttgaagctcgttcagttcatctccctcttctatgtttcttctttccactggcctcctcctttctacttctggcccctcattgcctttggccaattcctaaatttcagggtttatcagctacttggtgagactggcacatactatggtgtacgctttggaaaaacaattccctgggtaactgaattcccttttggtgtcatcaaagatcctcagtacgttggcagcatcatgagcattcttgcatgcttttcgtgggttccttttcaatacattctcctttgggttttaggatatgtgtttatgatgcatgtggaatcaaaggaagatccatctactcgtgccaagccactccattgattgagtgaatttcagtagattagaaggaatttggaggatttagcagcacctgaggtgccaaattctttgtatcttgctgtttctttcctttgctctggaatgaacatctctattttatatgttctgattccagcaaattatttctaatgaattgcgaacttatttttgtttctc

SEQ ID NO: 58142 - protein, 167 aa, Glycine max
  peptide (1)..(167): Ceres Seq. ID no. 12612237
MGIAAAIGLLSPFPFYYCLWIWPQWWVDLCGRGREARDPSKVMAYVSYFLKLVQFISLFYVSSFHWPPPFYFWPLIAFGQFLNFRVYQLLGETGTYYGVRFGKTIPWVTEFPFGVIKDPQYVGSIMSILACFSWVPFQYILLWVLGYVFMMHVESKEDPSTRAKPLH

SEQ ID NO: 58143 - protein, 125 aa, Glycine max
  peptide (1)..(125): Ceres Seq. ID no. 12612238
MAYVSYFLKLVQFISLFYVSSFHWPPPFYFWPLIAFGQFLNFRVYQLLGETGTYYGVRFGKTIPWVTEFPFGVIKDPQYVGSIMSILACFSWVPFQYILLWVLGYVFMMHVESKEDPSTRAKPLH

SEQ ID NO: 58144 - DNA, 846 bp, Glycine max
  misc_feature (1)..(846): Ceres Seq. ID no. 15173278
cttgttcaaacaattccccaacattcaaagctacacttaatcttagccaaaaggcctataaaggtatatatacctttttttttctgatcaagattcaaaccctagatcagttttaatttcctagctatagttttattcatagagcaagaatgggaaacagcttaaggtgttgtttggcttgtgttcttccatgtggggctctagacttgattcgaatagtccatttaaacggctatgtggaagagattacacgtccaatcacagcaggagaggttctaaaagccaaccctaaccatgttctaagcaaacctagctctcaaggagtcgttcgtcggattttgatcctctcgccggagaccgagctcaagaggggcagcatatacttcttgatcccggaatcttcactgccggagaataaacggcacgccggaaagggaagcattggtggtgatagtggtataaaaaagaaagcatcaacaatgaaaagcaacaagggtagtagtgatgttgattattcttcactaccacaagggtacctcaaagtcactcacaaaggttctaaagagaagagatcgtcgtgccgggatcgccggaaaggccgcatcggaatatggaggcctcatttagagagtatattggaagattagtcggttttttgtgccggcggtcggtggccggaatccaacttggccggaaaagaagagaagaaaaagaaaaaaaaatgttcaattattgaaatatagcgacacgacttttttttttccctgtgttttataaatgtatgtgggaatttgattttgtggataaaaaagtttactttcccttcgaaattgtcttgctgagtgc

SEQ ID NO: 58145 - protein, 165 aa, Glycine max
  peptide (1)..(165): Ceres Seq. ID no. 15173279
MGNSLRCCLACVLPCGALDLIRIVHLNGYVEEITRPITAGEVLKANPNHVLSKPSSQGVVRRILILSPETELKRGSIYFLIPESSLPENKRHAGKGSIGGDSGIKKKASTMKSNKGSSDVDYSSLPQGYLKVTHKGSKEKRSSCRDRRKGRIGIWRPHLESILED

SEQ ID NO: 58146 - DNA, 1052 bp, Glycine max
  misc_feature (1)..(1052): Ceres Seq. ID no. 13595755
attacctagaacatcctaatcgaaaaccttttctttcttttgtgtttcttgctttcttcttcttcgctttcgtcccttttcggagtatccctcccaaccatggacgttgatccttgccaatacgaacaaattgctataaatgaaaaagatgtcaacaacatcattctgtcataccttatacataattgctacaaagagtcatcagagtcattcatttcttgcactgggatgaagcagcctgcagatcatttggagaacatggaaaaaagaaaaagaatctttcaccatgcattggagggaaatgtacttaaggcgattgagctcacagggcagctggcacaggatattctggagaacaataatgatttgctgtttgatcttctaagccttcattttgtagaccttgtctgctctaaggaatgggcagaagctttggagtttgctcagaccaagttgagtccttttagtgtgaaggagcagaaatatatggaaaaaatagaaggttttatgtcccttcttgcttatgagaatccagtggaatgcccaatgtttcatctgattggcttagactatcggcaacaagttgtggatagtttgaatcaaactattctcgatgttggtgatggccagcacactttaaccttcccatccacactgccatggagcggcttatacaacagacctcagtagttagacaatgcttaagcctggaggatggggggcctccaccattttccttgaaggatattcttaaaagtcaatgaaaagcagttaaatatccactgggatgttgaggaatgaagcatgtgtacattgtgccttttttgccacataagggattggtgcatgcatgatttgatcactagtgtaaagttgtcttcgtatacttttgtataaattttttggtagcaggctatctagatctttcgggtcatattgcattctttaggtattagtgttccatgaaaatggagaaaattgcaattctaccggattaagataatattttctttctggggaatttgatctaattgtggccttaagatgtcgtc

SEQ ID NO: 58147 - protein, 196 aa, Glycine max
  peptide (1)..(196): Ceres Seq. ID no. 13595756
MDVDPCQYEQIAINEKDVNNIILSYLIHNCYKESSESFISCTGMKQPADHLENMEKRKRIFHHALEGNVLKAIELTGQLAQDILENNNDLLFDLLSLHFVDLVCSKEWAEALEFAQTKLSPFSVKEQKYMEKIEGFMSLLAYENPVECPMFHLIGLDYRQQVVDSLNQTILDVGDGQHTLTFPSTLPWSGLYNRPQ

SEQ ID NO: 58148 - protein, 153 aa, Glycine max
  peptide (1)..(153): Ceres Seq. ID no. 13595757
MKQPADHLENMEKRKRIFHHALEGNVLKAIELTGQLAQDILENNNDLLFDLLSLHFVDLVCSKEWAEALEFAQTKLSPFSVKEQKYMEKIEGFMSLLAYENPVECPMFHLIGLDYRQQVVDSLNQTILDVGDGQHTLTFPSTLPWSGLYNRPQ

SEQ ID NO: 58149 - protein, 143 aa, Glycine max
  peptide (1)..(143): Ceres Seq. ID no. 13595758
MEKRKRIFHHALEGNVLKAIELTGQLAQDILENNNDLLFDLLSLHFVDLVCSKEWAEALEFAQTKLSPFSVKEQKYMEKIEGFMSLLAYENPVECPMFHLIGLDYRQQVVDSLNQTILDVGDGQHTLTFPSTLPWSGLYNRPQ

SEQ ID NO: 58150 - DNA, 852 bp, Glycine max
  misc_feature (1)..(852): Ceres Seq. ID no. 15173288
atcatctctttgagttgccattgaagaagaagctcagatcggaaaaattcacctctccaatcccaatcccatcgttgcaaatgatccgattcattctgttgcagaacaggcagggcaagacccgtcttgccaaatactacgttcctctcgaggactccgagaagcacaaggtcgaatacgaggttcatcggctcgtcgtaaacagagaccctaaatacacaaatttcgtcgagtttcgtacgcacaagataatatacaggcgatatgctgggttatttttctcactctgtgttgatatcactgataatgagttggcgtatttagagtgcatccatttgtttgtggaaatattggatcacttcttcagcaatgtctgtgagctcgatttggtttttaacttccacaaggtctatcttatacttgatgaattcattctagcgggtgaactgcaagaaacaagcaagaaggctatcattgagagaatgggggaacttgaaaaactagaatgaaaaattacttttcagcagtcatatcaatttggagatttcgatgacttactcatgcccttggcttaattcttgtatttcaattgtgatacagaattttgaaaatcttttccgttgagccatgtattcaatgccctttaccttcgcttcttattcggcttatgtttatatttgtaagacatttataaaatcagggttttcagtagcctttctgttactgtctctgttttgtttcactttttataaatttatttgctcttcttggttgttagtaaaacacttaatggaaatgtaattggatgattgtagtatataagcaatgcaaaacgattaattttgatggtac

SEQ ID NO: 58151 - protein, 168 aa, Glycine max
  peptide (1)..(168): Ceres Seq. ID no. 15173289
HLFELPLKKKLRSEKFTSPIPIPSLQMIRFILLQNRQGKTRLAKYYVPLEDSEKHKVEYEVHRLVVNRDPKYTNFVEFRTHKIIYRRYAGLFFSLCVDITDNELAYLECIHLFVEILDHFFSNVCELDLVFNFHKVYLILDEFILAGELQETSKKAIIERMGELEKLE

SEQ ID NO: 58152 - protein, 142 aa, Glycine max
  peptide (1)..(142): Ceres Seq. ID no. 15173290
MIRFILLQNRQGKTRLAKYYVPLEDSEKHKVEYEVHRLVVNRDPKYTNFVEFRTHKIIYRRYAGLFFSLCVDITDNELAYLECIHLFVEILDHFFSNVCELDLVFNFHKVYLILDEFILAGELQETSKKAIIERMGELEKLE

SEQ ID NO: 58153 - DNA, 1324 bp, Glycine max
  misc_feature (1)..(1324): Ceres Seq. ID no. 13595861
atcgaaagtcgaaacatcccctgtcactttgactcaactcacacaccaatctccatatccctaccaattttccctattcactcatcaattttctcgtatcagattttgtggtagtgtagtccaactgtccaacttagagcaggcagcatggaggatattctgttggataccaggtgggaagatgtaatctgccccatatgcttggaagtccctcataatagtgtgctccttcagtgttcatcttatgataaggggtgtcgttcttttgtatgtgacacaagtcagttgcactcaaattgcttggatcgttttaaaagcacacatagcatgccatcctcttcaacatatgattcaacctcccaaatgtctgatgcaaattccatggcaaatagtgagtcagtggtatctgattgtcaatacaagctgagttgtccgttgtgtagaggtgatgtttttgggtggattattgttgataaagctcgtgtgcatcttgatgagaagaagcgttgctgtgaagaggagcaatgtgcatttattggaagttactccgagctacaaaaacatgctcaactggaacaccctcatgcttgtccatcgaaaattgatcctgtccgacagcttgattggaaaaattttcagcagtcatctgagatcatagatgttttgagcactattcattcagaaattccacggggagtggtcttgggagattatgtgattgaatatggggatgatgacagtgcagatgagtttgaggacttccctggagatgaaggttctgtagcatctgtagagtatggcgagtataggctagatgagattgatgatgattttgttagtacaattggccacttgagaggtggaagtggttttcgcagatcgcggagacgtcattctcgctccaatgacaattagtatttgaactgaaggaagcagaatgagaggaagagatacactcaacatagaaaccagtgtgatcttgatgcagctggtgtgacaactcgcaaaggttacatttaggtcatctaatgcatttgtgataacttgagggatcaacattacaagattgatagttgaatgtggattatattccaagtttctgttatgcttaccattaactaccatttagtatgctagccattgggagcctgttaatttactcctgtgccaccaaagtgattccgctagctttatgctctgtagaacaatgaattacttcttttccttgtatatatagccgcttagttgtgatgtattataatgattctaaagtagggatgtttccatgtcactgaataaaacttttgtttttttttcctccccc

SEQ ID NO: 58154 - protein, 255 aa, Glycine max
  peptide (1)..(255): Ceres Seq. ID no. 13595862
MEDILLDTRWEDVICPICLEVPHNSVLLQCSSYDKGCRSFVCDTSQLHSNCLDRFKSTHSMPSSSTYDSTSQMSDANSMANSESVVSDCQYKLSCPLCRGDVFGWIIVDKARVHLDEKKRCCEEEQCAFIGSYSELQKHAQLEHPHACPSKIDPVRQLDWKNFQQSSEIIDVLSTIHSEIPRGVVLGDYVIEYGDDDSADEFEDFPGDEGSVASVEYGEYRLDEIDDDFVSTIGHLRGGSGFRRSRRRHSRSNDN

SEQ ID NO: 58155 - protein, 195 aa, Glycine max
  peptide (1)..(195): Ceres Seq. ID no. 13595863
MPSSSTYDSTSQMSDANSMANSESVVSDCQYKLSCPLCRGDVFGWIIVDKARVHLDEKKRCCEEEQCAFIGSYSELQKHAQLEHPHACPSKIDPVRQLDWKNFQQSSEIIDVLSTIHSEIPRGVVLGDYVIEYGDDDSADEFEDFPGDEGSVASVEYGEYRLDEIDDDFVSTIGHLRGGSGFRRSRRRHSRSNDN

SEQ ID NO: 58156 - protein, 183 aa, Glycine max
  peptide (1)..(183): Ceres Seq. ID no. 13595864
MSDANSMANSESVVSDCQYKLSCPLCRGDVFGWIIVDKARVHLDEKKRCCEEEQCAFIGSYSELQKHAQLEHPHACPSKIDPVRQLDWKNFQQSSEIIDVLSTIHSEIPRGVVLGDYVIEYGDDDSADEFEDFPGDEGSVASVEYGEYRLDEIDDDFVSTIGHLRGGSGFRRSRRRHSRSNDN

SEQ ID NO: 58157 - DNA, 1653 bp, Glycine max
  misc_feature (1)..(1653): Ceres Seq. ID no. 15177184
gcactttatcacaatcacaggctaagcttcaacaatggacaagtcgtgcgtgatttctccaagttgctacgacaatcatcacctctgctttgcatttctcttctcctttctcttttgctctctgctgttatcctttcatgctcccaacctcctccgactcacatccaagaccaaaaatgtcacagattcctgcactggccgctatgtttacattcaccaactcccctcccgcttcaacgattacttgcttcagaattgccagtccctcactagaggcactgacaaacccaacatgtgtccatacatgcaaaacaatggtttaggtcctcacattacctactcccaagggcttttctccaacaacacttgctatgccaccaaccagttcttgttggaagttatttttcacaacaggatgaccaaatatggctgcttgaccaacgattcctccctcgcctctgcaattttcgtcccattctatgctggtcttgatgttagccgtttcctttggctctctaatctcacagagagagattcctctggtcgtgatcttcttcaatgggtcgcaaaaagacccgagtggaagcaaatgtggggcagagatcatttccttgtttctgggaggattgcttgggatttcaggagacaatatgatgatgcgtcctattggggtagtaagttcaggtttatacccgaatccatgaacatgtccatgttagcagttgaagcaagttcgtggaataatgactacgcaattccgtacccaacttctttccacccatcagaggacactcatgtttaccggtggcagagaaaaatcagacatcaaaagcggccatacttgttcactttcaccggagctccaaggcctgaacttgaaggttctatcaggggtaagattatagaccagtgtcgagcttcgagtgtttgcaaattcgttgactgcagctatggtgtagagagatgtgacgaccccatcaatgttataaaggtgtttgaaagttctgtgttctgtttgcagcctccgggtgactcatacaccagaaggtccatttttgattccatcttggccggttgtattcccgttttctttcatcctggtactgcttactcgcagtacaagtggcatttacccaagaataggactaagtactctgtgtatatacccgtgaaggatgtaaaacaatggaatgtcaacgtggagcaggtgttgctgggaattccagagggtgaggtgtttgcaatgagagaggaggttataaagctgcttccaaatattatctatgcagatcctaggtctaagttagattgctttgaagacgcgtttgatttagcagtaaaaggaatgcttgaaagaatagagaaggtgagggaagcaatgaggagtgggagagatcctagcattggttttgcggatgaagaccattataagtatacattttcacaaaattacagctaaaggaagacacatcatattatagtgcatatcgtttcatagttaacatattcccttcagagaatcccgtgtaacacttttttttttttttttgtgggtattctggcttttctgatttacttttgattttgctttttcttggcctataaagaaggaaatccgattgcaatgataacaagtgaagaaaaaatgtttgt

SEQ ID NO: 58158 - protein, 474 aa, Glycine max
  peptide (1)..(474): Ceres Seq. ID no. 15177185
MDKSCVISPSCYDNHHLCFAFLFSFLFCSLLLSFHAPNLLRLTSKTKNVTDSCTGRYVYIHQLPSRFNDYLLQNCQSLTRGTDKPNMCPYMQNNGLGPHITYSQGLFSNNTCYATNQFLLEVIFHNRMTKYGCLTNDSSLASAIFVPFYAGLDVSRFLWLSNLTERDSSGRDLLQWVAKRPEWKQMWGRDHFLVSGRIAWDFRRQYDDASYWGSKFRFIPESMNMSMLAVEASSWNNDYAIPYPTSFHPSEDTHVYRWQRKIRHQKRPYLFTFTGAPRPELEGSIRGKIIDQCRASSVCKFVDCSYGVERCDDPINVIKVFESSVFCLQPPGDSYTRRSIFDSILAGCIPVFFHPGTAYSQYKWHLPKNRTKYSVYIPVKDVKQWNVNVEQVLLGIPEGEVFAMREEVIKLLPNIIYADPRSKLDCFEDAFDLAVKGMLERIEKVREAMRSGRDPSIGFADEDHYKYTFSQNYS

SEQ ID NO: 58159 - protein, 388 aa, Glycine max
  peptide (1)..(388): Ceres Seq. ID no. 15177186
MCPYMQNNGLGPHITYSQGLFSNNTCYATNQFLLEVIFHNRMTKYGCLTNDSSLASAIFVPFYAGLDVSRFLWLSNLTERDSSGRDLLQWVAKRPEWKQMWGRDHFLVSGRIAWDFRRQYDDASYWGSKFRFIPESMNMSMLAVEASSWNNDYAIPYPTSFHPSEDTHVYRWQRKIRHQKRPYLFTFTGAPRPELEGSIRGKIIDQCRASSVCKFVDCSYGVERCDDPINVIKVFESSVFCLQPPGDSYTRRSIFDSILAGCIPVFFHPGTAYSQYKWHLPKNRTKYSVYIPVKDVKQWNVNVEQVLLGIPEGEVFAMREEVIKLLPNIIYADPRSKLDCFEDAFDLAVKGMLERIEKVREAMRSGRDPSIGFADEDHYKYTFSQNYS

SEQ ID NO: 58160 - protein, 384 aa, Glycine max
  peptide (1)..(384): Ceres Seq. ID no. 15177187
MQNNGLGPHITYSQGLFSNNTCYATNQFLLEVIFHNRMTKYGCLTNDSSLASAIFVPFYAGLDVSRFLWLSNLTERDSSGRDLLQWVAKRPEWKQMWGRDHFLVSGRIAWDFRRQYDDASYWGSKFRFIPESMNMSMLAVEASSWNNDYAIPYPTSFHPSEDTHVYRWQRKIRHQKRPYLFTFTGAPRPELEGSIRGKIIDQCRASSVCKFVDCSYGVERCDDPINVIKVFESSVFCLQPPGDSYTRRSIFDSILAGCIPVFFHPGTAYSQYKWHLPKNRTKYSVYIPVKDVKQWNVNVEQVLLGIPEGEVFAMREEVIKLLPNIIYADPRSKLDCFEDAFDLAVKGMLERIEKVREAMRSGRDPSIGFADEDHYKYTFSQNYS

SEQ ID NO: 58161 - DNA, 656 bp, Glycine max
  misc_feature (1)..(656): Ceres Seq. ID no. 13594349
gaggaagtgagtccagagacagggatcagttatggctccgtgttcagtttttttcaattttcttcttctgcttcttctttctttcaccaaagaagctttaggtgtttcagagcaagaagctgacagagtgcatggactacccggacagcctccggtgaagttcaaacaatattctggttatatcactgtcaatgaaacccatggaagagcactcttctattggttctttgaggccactcataaaccagaagaaaagcctcttctcttatggctcaatggaggccctggttgttcctcaattggttatggagaagcagaggagctaggacccttctttcctcaggacagcagccaaccaaagctaaagttaaatccttattcttggaataacgctgccaatcttttgtttttggaatcccctgttggggtggggttctcctacaccaacaccagcagtgatataagtgagcttggtgacaccattaccgctaaagattcacacacctttatcatcaagtggtttagaagatttccacaattcagatcacacgaattctacatttccggtgaaagctatgcagggcactatgttccgcaactttcagagctcattttcgataataatcgcaatcctgtcgagaaagactacattaact

SEQ ID NO: 58162 - protein, 208 aa, Glycine max
  peptide (1)..(208): Ceres Seq. ID no. 13594350
MAPCSVFFNFLLLLLLSFTKEALGVSEQEADRVHGLPGQPPVKFKQYSGYITVNETHGRALFYWFFEATHKPEEKPLLLWLNGGPGCSSIGYGEAEELGPFFPQDSSQPKLKLNPYSWNNAANLLFLESPVGVGFSYTNTSSDISELGDTITAKDSHTFIIKWFRRFPQFRSHEFYISGESYAGHYVPQLSELIFDNNRNPVEKDYIN

SEQ ID NO: 58163 - DNA, 1425 bp, Glycine max
  misc_feature (1)..(1425): Ceres Seq. ID no. 12476493
caacaaagtcacaaatcacacatacacacactcaaatacatacactagtagtgtggtgtgtgcccttcctttatccttttgctttttgtgtgcaattaacacacactcacacaaaaatgacggcatgccaagattggccagagccagtgattcgagtccaagccttggctgcaagtggcttagccacaatccccgaacgtttcataaagcctaagtcccaaagacccactaatagtaacaattatgctccaaagaccaatttctctcaaattggtcatcataagaacaataccaccaacagcaacatcccagtgattgacatgaagcacatctacagtggtgacgagggaaagagggctgagacgctccggctcgtgtcggaggcgtgccaagaatggggttttttccaggtggtgaaccatggagtgagccatgagttgatgaagggggcaagggaggtgtggagggagttctttcaccagccacttgatgtgaaagaggtgtatgctaatacacccctcacttatgaagggtatggaagcaggttgggagtgaaaaaaggggccattttggattggagtgattacttctttctccattacatgccttgttccctaagggaccaagccaagtggcctgccctcccaacatccttaaggagcatcatctctgaatatggtgaacaaattgttaagctaggaggaaggatacttgagataatgtcaataaatcttggccttagagaggattttctcctaaatgcatttggtggggaaaatgaccttggtgcttgcttgagggtgaatttctaccctaagtgcccacagcctgacctcactcttggactttcctctcactcagatcctggtggcatgaccattcttctccctgatgaaaatgtatcaggacttcaagtacgcagaggagaagattgggtcactgttaagccagtcccaaatgctttcatcatcaacatgggtgaccaaattcaggtgctgagcaatgcaacttacaagagtatagagcacagggtgatcgtgaactcagacaaagatcgcgtttcattggcctttttctataaccccaggagcgatataccgatccaaccagccaaggagcttgtgactaaggataggccagcactatacccaccaatgacatttgatgagtatagactttacattaggacaagaggaccaagtggaaaagctcaagttgaatctttgacttccaaatgagatgagattccaattgagcagtagtttgcagtgcacaaaattaatttgcatatgaataatttatcatctttgtgtttgtctcaatatcagactcaattaatcaagtatcatatcccacttaaattctatgtaacactttactctgtatttttcttatctcaaatataatatatggttgagttattgc

SEQ ID NO: 58164 - protein, 411 aa, Glycine max
  peptide (1)..(411): Ceres Seq. ID no. 12476494
TKSQITHTHTQIHTLVVWCVPFLYPFAFCVQLTHTHTKMTACQDWPEPVIRVQALAASGLATIPERFIKPKSQRPTNSNNYAPKTNFSQIGHHKNNTTNSNIPVIDMKHIYSGDEGKRAETLRLVSEACQEWGFFQVVNHGVSHELMKGAREVWREFFHQPLDVKEVYANTPLTYEGYGSRLGVKKGAILDWSDYFFLHYMPCSLRDQAKWPALPTSLRSIISEYGEQIVKLGGRILEIMSINLGLREDFLLNAFGGENDLGACLRVNFYPKCPQPDLTLGLSSHSDPGGMTILLPDENVSGLQVRRGEDWVTVKPVPNAFIINMGDQIQVLSNATYKSIEHRVIVNSDKDRVSLAFFYNPRSDIPIQPAKELVTKDRPALYPPMTFDEYRLYIRTRGPSGKAQVESLTSK

SEQ ID NO: 58165 - protein, 373 aa, Glycine max
  peptide (1)..(373): Ceres Seq. ID no. 12476495
MTACQDWPEPVIRVQALAASGLATIPERFIKPKSQRPTNSNNYAPKTNFSQIGHHKNNTTNSNIPVIDMKHIYSGDEGKRAETLRLVSEACQEWGFFQVVNHGVSHELMKGAREVWREFFHQPLDVKEVYANTPLTYEGYGSRLGVKKGAILDWSDYFFLHYMPCSLRDQAKWPALPTSLRSIISEYGEQIVKLGGRILEIMSINLGLREDFLLNAFGGENDLGACLRVNFYPKCPQPDLTLGLSSHSDPGGMTILLPDENVSGLQVRRGEDWVTVKPVPNAFIINMGDQIQVLSNATYKSIEHRVIVNSDKDRVSLAFFYNPRSDIPIQPAKELVTKDRPALYPPMTFDEYRLYIRTRGPSGKAQVESLTSK

SEQ ID NO: 58166 - protein, 305 aa, Glycine max
  peptide (1)..(305): Ceres Seq. ID no. 12476496
MKHIYSGDEGKRAETLRLVSEACQEWGFFQVVNHGVSHELMKGAREVWREFFHQPLDVKEVYANTPLTYEGYGSRLGVKKGAILDWSDYFFLHYMPCSLRDQAKWPALPTSLRSIISEYGEQIVKLGGRILEIMSINLGLREDFLLNAFGGENDLGACLRVNFYPKCPQPDLTLGLSSHSDPGGMTILLPDENVSGLQVRRGEDWVTVKPVPNAFIINMGDQIQVLSNATYKSIEHRVIVNSDKDRVSLAFFYNPRSDIPIQPAKELVTKDRPALYPPMTFDEYRLYIRTRGPSGKAQVESLTSK

SEQ ID NO: 58167 - DNA, 1794 bp, Glycine max
  misc_feature (1)..(1794): Ceres Seq. ID no. 15171148
aaaaaaggaaacgtatagaaaaagcttctccaaagaatttgaaggagaaagattcattcatgttcattttttccttttccccttcgtccccatcaagtttctgattctctcttttcacttcctttctctttcttcattcttctttctcttttcaactattttctttacatttttttctttttctctcgcttttttcgcgttcactttctctactctgttttacgcattttatttattgttttgttagttaattttgcgattcgagtaattggtatgcttgtgttttctagaagacgatattttcacgacgattaagctgcgttttcgccggtgtcgttttaccgcaagatggtgtcgttttcggaaatatgcaaaaagggttgaagttctttcttcagcattgaatctttgattacataggttggtttctttggaactcaattcaattcaataattggtcctccctttttgtggaactcaattcaattaggttagtggaaaaaatatggttgaatcaattgctgcaacttcactccttggccaccgcccaatttgtggtggaagtttaaccagggatgtttctgctaaacgcaaatctttgaatactgttcggttcccaacaactgagtttcttggtgggggaaggattgtggtttctctggctttgcctaaatctgataagcaggataggtttgtgttttcatcaattaaggccttggctgtggagttaacaagagaagcacatgcttatagggaaaagaaattgcccaatagggataacaagattgaccgtggatttgatcagaggcctgatttgtggcctccggcgaatagggcggataagctgtcacttcggaatcccttgctccggcatgagaggatgggatgtggttggttgggtgctatatttgagtgggagggtgttctaattgaagacaaccccgatttagagaagcaggcttggctggcactctctcaggaagaaggcaaaccctctcctcctgcttttatcctcaagagaatagaaggcatgaagaatgaacaggcgatttcggaagtgctgtgttggtctagggatccggcacagctgagaagaatggctaatagaaaggaagaaatctaccaagctttgctgggtgggatatatagtttcttgtctgggtccaaggagtttgtgagtgttttgatgcattataagataccaatggcattggtttccacgcggcctagaaaggctcttgagtctgctatgggggagattgggattgaggacactttcagtgttattgtagcagcagaggatgttcataggggaaagcctgatccagaaatgtttgtgtatgctgcacagcttttgaacttcatacctgagagggtcattgtgtttggtaactccaatctaacagtggaggctgctcatgaagcccggatgaagtgtgtggctgttgctagcaggcatcctgtatatgagcttggggctgcagacttggttgtcaggcgccttgacgagctttcagtggttgatttgaagaatcttgcagacattgaaatgactgaatttgggtctgtggagcctgagatggagctggaggtggaaaaagatcatgatacatcatcacttgatgacaatttctggtaaatcctataaatgtacagttgattgaactcatctgattgttgatgatattagttacaggttagttacttgtgtatatggtaaacagaataaatggggaaaaaatgataagtggtatgcattgaacattgatgttactactaatgaattttctgttc

SEQ ID NO: 58168 - protein, 377 aa, Glycine max
  peptide (1)..(377): Ceres Seq. ID no. 15171149
MVESIAATSLLGHRPICGGSLTRDVSAKRKSLNTVRFPTTEFLGGGRIVVSLALPKSDKQDRFVFSSIKALAVELTREAHAYREKKLPNRDNKIDRGFDQRPDLWPPANRADKLSLRNPLLRHERMGCGWLGAIFEWEGVLIEDNPDLEKQAWLALSQEEGKPSPPAFILKRIEGMKNEQAISEVLCWSRDPAQLRRMANRKEEIYQALLGGIYSFLSGSKEFVSVLMHYKIPMALVSTRPRKALESAMGEIGIEDTFSVIVAAEDVHRGKPDPEMFVYAAQLLNFIPERVIVFGNSNLTVEAAHEARMKCVAVASRHPVYELGAADLVVRRLDELSVVDLKNLADIEMTEFGSVEPEMELEVEKDHDTSSLDDNFW

SEQ ID NO: 58169 - protein, 252 aa, Glycine max
  peptide (1)..(252): Ceres Seq. ID no. 15171150
MGCGWLGAIFEWEGVLIEDNPDLEKQAWLALSQEEGKPSPPAFILKRIEGMKNEQAISEVLCWSRDPAQLRRMANRKEEIYQALLGGIYSFLSGSKEFVSVLMHYKIPMALVSTRPRKALESAMGEIGIEDTFSVIVAAEDVHRGKPDPEMFVYAAQLLNFIPERVIVFGNSNLTVEAAHEARMKCVAVASRHPVYELGAADLVVRRLDELSVVDLKNLADIEMTEFGSVEPEMELEVEKDHDTSSLDDNFW

SEQ ID NO: 58170 - protein, 202 aa, Glycine max
  peptide (1)..(202): Ceres Seq. ID no. 15171151
MKNEQAISEVLCWSRDPAQLRRMANRKEEIYQALLGGIYSFLSGSKEFVSVLMHYKIPMALVSTRPRKALESAMGEIGIEDTFSVIVAAEDVHRGKPDPEMFVYAAQLLNFIPERVIVFGNSNLTVEAAHEARMKCVAVASRHPVYELGAADLVVRRLDELSVVDLKNLADIEMTEFGSVEPEMELEVEKDHDTSSLDDNFW

SEQ ID NO: 58171 - DNA, 866 bp, Glycine max
  misc_feature (1)..(866): Ceres Seq. ID no. 15177027
agttgtgacggattgatccaaagttgatggagaggatctaaatctgagttttgacgaactgggaagttacggcggaagaaaacctcttgcagttgttgacttgttggtgcaggtagttgaatatagtacattttgtcacacgaaagtttctgtgttacaatggaggagctgaaatctgctatggaggagcacatggaccttatggcagatcttgttcagaagctctcttcagatcttcgcgctggctttcgccccgcttacgataactttatcggttttttccatgccattgactggaaggaaccttggctaatgggattattaggattccatgttgtgttgctgcttgtagctatcatctctaggaagaagacaaactttcaaatgttcttgttccttttgacattggctggtgtatattttgcggagagtctgaacagatttttgggtaaaaactggaaaagcttctctagtcagaattactttgatccaaggggactatttatgtctgttctttggtctggaccacttcttgttatttctatgataatcttgatcaatacactcttctccttatgttacatgattgttaggtggaaaagagccgaactgagacatcgtgcaagggctgctcgtaataagcaggattagttgttttgttgtgggattttgatggattaaactctgaaggagttcatgtcaatggtaatgtaatcatatgttttacaaatgaattttgtttttccttttttttatttataattttcagatttagtacttgttatttccagttatgtctgtgtacactattaacgggaattttttctctccttttactgaaggaactgagaatttaacaaagtgct

SEQ ID NO: 58172 - protein, 163 aa, Glycine max
  peptide (1)..(163): Ceres Seq. ID no. 15177028
MEELKSAMEEHMDLMADLVQKLSSDLRAGFRPAYDNFIGFFHAIDWKEPWLMGLLGFHVVLLLVAIISRKKTNFQMFLFLLTLAGVYFAESLNRFLGKNWKSFSSQNYFDPRGLFMSVLWSGPLLVISMIILINTLFSLCYMIVRWKRAELRHRARAARNKQD

SEQ ID NO: 58173 - protein, 156 aa, Glycine max
  peptide (1)..(156): Ceres Seq. ID no. 15177029
MEEHMDLMADLVQKLSSDLRAGFRPAYDNFIGFFHAIDWKEPWLMGLLGFHVVLLLVAIISRKKTNFQMFLFLLTLAGVYFAESLNRFLGKNWKSFSSQNYFDPRGLFMSVLWSGPLLVISMIILINTLFSLCYMIVRWKRAELRHRARAARNKQD

SEQ ID NO: 58174 - protein, 152 aa, Glycine max
  peptide (1)..(152): Ceres Seq. ID no. 15177030
MDLMADLVQKLSSDLRAGFRPAYDNFIGFFHAIDWKEPWLMGLLGFHVVLLLVAIISRKKTNFQMFLFLLTLAGVYFAESLNRFLGKNWKSFSSQNYFDPRGLFMSVLWSGPLLVISMIILINTLFSLCYMIVRWKRAELRHRARAARNKQD

SEQ ID NO: 58175 - DNA, 1392 bp, Glycine max
  misc_feature (1)..(1392): Ceres Seq. ID no. 13497992
taacaatcattattataacgcaaacttcaacttgtaatcaagggagagagaaaatttcaagcacaaaaaatggcggagaagaaagtggtgatcctaggaggtggtgttgccggtgccaaccttgcaaaaactatacaacgtcaagccaacgtcacccttattgatccgaaggaatattttgagattccatgggcaagtttgaggggattggttgagccaacttttgctgaaaggatagtgatcaaccatagagagtacttcaaaaagggtaaccttgttgtatccagtgctgtcaacataactgaaactgcagtggtgactgaagatggccagcagattgcctatgactatcttgttattgccactggacacacagaaccaatccccaaaaccaggagtgaaagacttgaccaatacaaaggagaaaatgcaaagatcaaatctgcaagttcagttttgattgttgggggaggtccaactggtgttgagcttgcagcagagattgctgttgattttcctgataagaaggtcaccatagtgcataaaggaacgaggttgcttgaatacattgggacaaaagcttccagcaagactttaaagtggctcaaatcaaagaaaattgatgtgaaactagaacaatcggtcgatttgagctcctcttcagaagaaaataagacatatcaaacttcaaatggagagactataaaagcagatcttcattttctatgcacagggaaaccacttggttcaacatggattagagaaactcttctaaagaatgacttggatgctgatggaaggatcaaggtcgatgagcacttgagagtgaagggcaagagcaacatttttgcaattggagatattacagatgttcaagaaatcaaacaagggatgtatgcaagtgctcatgctcaagtggttgccaagaacctgaagctattgatagagggaggaggcaaagagcgtaagttgggaacatacaaggcacagccaccaatatctatagtttcacttggaaggaaaatagctgttgcacagttcccattcatgactgtgcttggaaggcttcctggcatgatcaagtcaggggatttgtttgttgggaaaaccagaaaggaattaggactcgaacctaatgttaaaaaatcttaaatttggtatattgagtgagtgttgtggtgtgtaattgtgtatatacacttcttcaactctttttcttccttgtcattgttgtgcatgtgtaagttgattgtatgtgtttactttcctattgtattcaacaaattactttgtatctgtaatgtttcttaatgattttgatgttgtcggtgttgtctcttgagatatgggattggagtcagaagcagaatgagttagagtgttattcattgg

SEQ ID NO: 58176 - protein, 360 aa, Glycine max
  peptide (1)..(360): Ceres Seq. ID no. 13497993
MAEKKVVILGGGVAGANLAKTIQRQANVTLIDPKEYFEIPWASLRGLVEPTFAERIVINHREYFKKGNLVVSSAVNITETAVVTEDGQQIAYDYLVIATGHTEPIPKTRSERLDQYKGENAKIKSASSVLIVGGGPTGVELAAEIAVDFPDKKVTIVHKGTRLLEYIGTKASSKTLKWLKSKKIDVKLEQSVDLSSSSEENKTYQTSNGETIKADLHFLCTGKPLGSTWIRETLLKNDLDADGRIKVDEHLRVKGKSNIFAIGDITDVQEIKQGMYASAHAQVVAKNLKLLIEGGGKERKLGTYKAQPPISIVSLGRKIAVAQFPFMTVLGRLPGMIKSGDLFVGKTRKELGLEPNVKKS

SEQ ID NO: 58177 - DNA, 1114 bp, Glycine max
  misc_feature (1)..(1114): Ceres Seq. ID no. 13594377
atcatcacttggaagaaaaaagagaggcaaaagtaaaagatggcaccttacatttctagagatagagcctctatttttgttttacttgcctcactagtccttccctttattctcctggactattcttcttctgtgttgtttgcaagtgcaaaatccccaaaatccaaggatgctgatttgttagaatttgctctcaatttggaatacttagaggctgagtttttcttgtttggggctttggggcatggattagatgtagttgctccaaacctaactgggggaggaccccttcccattggtgccaaaaaggttgaacttgacgatcttaccaatgatgtcatcttgcagtttgcttttcaggaagttggacacttaagggctataaagagcaaagtgacagggttccctaggccattgttggatctaagctcaaaatcttttgccaaactaatggacaatgcatttgggaaacctctggttcctccctttgatccctatgctaattccctcaactttataattgcatcttatgtgattccctatgttggcctcactggttatgttggtgccaatcgactactggaaagtgctacttctagggagcttgttgcggggcttctaggagtagagtctggacaagatgcaattttaagagaattgttgtatgaacgtaaagaacagttggtgccaccgtacggagtggccgtggaagagttcacaaaccgcatttctatacttaggagcaagttaggaaacagaggtttgaaagatgaaggtattgttgtgccttttggactcggtgccgagggtaaagttagaggtaacattcttgctggtgacgtaaactcactggcatattcaaggactccagaagaaatattaaggatagtatatggaagtggtgatgaacatgtttgtggtggtttctatcctataggagcaagtggtcaaatagctcaatcttacttaaattaagctaaagcatttgttttaaacttttatagattatacaacttgtctttaatccattgctaattttcttgttgctaaatattgttgatgggtgaagaccttgaaaaaacttttgataatatgcaaataataaaggagaaat

SEQ ID NO: 58178 - protein, 311 aa, Glycine max
  peptide (1)..(311): Ceres Seq. ID no. 13594378
MAPYISRDRASIFVLLASLVLPFILLDYSSSVLFASAKSPKSKDADLLEFALNLEYLEAEFFLFGALGHGLDVVAPNLTGGGPLPIGAKKVELDDLTNDVILQFAFQEVGHLRAIKSKVTGFPRPLLDLSSKSFAKLMDNAFGKPLVPPFDPYANSLNFIIASYVIPYVGLTGYVGANRLLESATSRELVAGLLGVESGQDAILRELLYERKEQLVPPYGVAVEEFTNRISILRSKLGNRGLKDEGIVVPFGLGAEGKVRGNILAGDVNSLAYSRTPEEILRIVYGSGDEHVCGGFYPIGASGQIAQSYLN

SEQ ID NO: 58179 - protein, 174 aa, Glycine max
  peptide (1)..(174): Ceres Seq. ID no. 13594379
MDNAFGKPLVPPFDPYANSLNFIIASYVIPYVGLTGYVGANRLLESATSRELVAGLLGVESGQDAILRELLYERKEQLVPPYGVAVEEFTNRISILRSKLGNRGLKDEGIVVPFGLGAEGKVRGNILAGDVNSLAYSRTPEEILRIVYGSGDEHVCGGFYPIGASGQIAQSYLN

SEQ ID NO: 58180 - DNA, 1471 bp, Glycine max
  misc_feature (1)..(1471): Ceres Seq. ID no. 15168521
aaggtttcaattccgtcaaattctcaaaccctaaaataaattcagcaaatcacaaaagagaactatttattcctattccttgtatgcaatcttcctgaatataccagaattgttttcattattactactcaacaatttctttctttctttctttcttttggttttgcagcaacaaaatcaacaccaagcaaatggaagtaacagtcctcatgagctgcttccgccgctgcctcagccgccacaggcccctcacgtgggggttgaatccgagcaaatccggtccggtctgatggcggatcgggccaagattccggcaccggaaggagttctgaagtgtcctcggtgtgaatccaccaacacaaagttttgctacttcaacaattacagcctctctcagccaaggcacttctgcaagacatgtaggcgttattggacaagaggtggtgctctcaggaacgttcctgttggtggaggatgccgtaggaacaaaaagaacaaaaggtctcgctccaaatctccggtttctactgagaaaccatcacttcccaataatacaagtgcaatccctgagcttattggtcgtttcccacaacctttcatggcctctcttcagagtatgaaccgctatggtgtagggattaacacaggtgttaacttgcgtgagattcaagcacagaacgcttctcaaatggagtttcaaattggaggtcttggcaatggttcaagcgttgctactgcaggaggaggaggaggaggaggagtggagcagtggcggtttcagcagtttcctttcttgaatggttttgagtcaacttcagctgcttctaattcctacccttttcaaagtgaaattgttgaaggtttggttggagatattaatgccacaagttctaggattactcagctgccagcacgggttaaaatggaatataacggtggcttgaatttgtcaagatctcctttgaatgtctcagaaaatagtaaccatttctattcatggacggatttatctggtcttgcatcttcttcagcgagtcatctcttgtaactttgacctctcatatgggttagtagccacaaaaatttaagggttttggtgctgttattttttgatcaataattgaatgagtttccattttatgaagctctctctctccctttctcttggcatgtttaaactcatttatttatcgatccaaaaaatatttgtaccaataaactcttagatttatatatccgggttagaatgacagctctccaatgtcgttccaccgtcttcacgcgtcagtgttgttaacagaaatccaatcaggctggtagaatttaatcttcaattgtatatttttcttatcattggtttgtttatgtttttgcatcgagtcaagtttcttttgtgttctttttggctttctttgaacaacagtgtgtgcatgtattatgttttgtttgtttatgcgatatcatttgggct

SEQ ID NO: 58181 - protein, 252 aa, Glycine max
  peptide (1)..(252): Ceres Seq. ID no. 15168522
MADRAKIPAPEGVLKCPRCESTNTKFCYFNNYSLSQPRHFCKTCRRYWTRGGALRNVPVGGGCRRNKKNKRSRSKSPVSTEKPSLPNNTSAIPELIGRFPQPFMASLQSMNRYGVGINTGVNLREIQAQNASQMEFQIGGLGNGSSVATAGGGGGGGVEQWRFQQFPFLNGFESTSAASNSYPFQSEIVEGLVGDINATSSRITQLPARVKMEYNGGLNLSRSPLNVSENSNHFYSWTDLSGLASSSASHLL

SEQ ID NO: 58182 - protein, 149 aa, Glycine max
  peptide (1)..(149): Ceres Seq. ID no. 15168523
MASLQSMNRYGVGINTGVNLREIQAQNASQMEFQIGGLGNGSSVATAGGGGGGGVEQWRFQQFPFLNGFESTSAASNSYPFQSEIVEGLVGDINATSSRITQLPARVKMEYNGGLNLSRSPLNVSENSNHFYSWTDLSGLASSSASHLL

SEQ ID NO: 58183 - protein, 143 aa, Glycine max
  peptide (1)..(143): Ceres Seq. ID no. 15168524
MNRYGVGINTGVNLREIQAQNASQMEFQIGGLGNGSSVATAGGGGGGGVEQWRFQQFPFLNGFESTSAASNSYPFQSEIVEGLVGDINATSSRITQLPARVKMEYNGGLNLSRSPLNVSENSNHFYSWTDLSGLASSSASHLL

SEQ ID NO: 58184 - DNA, 1663 bp, Glycine max
  misc_feature (1)..(1663): Ceres Seq. ID no. 15176532
aaacttcttttatttccttcttcttctcttctctgttacagcaatggcttctttgccaacacttctctcgttcgccgtcatcttcttcaccgtcgccctcttatacctccgccgcgtgttccgccgccgtcagttccgcctcccgccggggagccacggcctgccgttgatcggcgagacgctgcagctgatatcggcgtacaagagcgacaatccggagcctttcatcgacgagcgcgtggagcggtacggttcgatcttcacgacgcacgtgttcggcgagccgacggtgttctcggcggacccggaggtgaaccggttcattctgcagaacgaagggaagctgttggattgcagttatcccggttcgatatcgaacctgctcggaaaacactctcttctgttgatgaaaggtgctctccacaagagaatgcactctctcacaatgagcttcgccaactcctccatcatcaaggatcatcttcttcaccacatcgaccgcctcatctgcctcaacctcgatgcctggtccgacactgtctttctcatggatcaggcaaaaaagataacatttgagttaacggtgaagcagttgatgagctttgacccagatgaatggactgagaatctaaggaaagagtatgttcttgtgattgaaggattcttcactctcccttttcctctcttctccaccacataccgcagagccatcaaggcaagaacaaaggtggcagaggcactagcgttggtagtgaggcagaggagaaaagagtatggtgaaaacaaagagaaaaagagtgacatgcttggggcactgttggcctccggcgaccacctttccgacgaggaaatagtggattttttgttggctttgctcgtcgccggttacgaaaccacctctaccataatgactcttgcgatcaagttcctcactgagactcctctggccttggcacagctcaaggaagagcatgaccaaatcagagcaaagagtcacccaggggcaccactggaatggacggattacaagtcaatggcatttactcaatgtgttgtgaatgagaccttgagagtggcaaacataattggtgggatatttaggagagcaacgacagacatcaacataaaaggttacactattcctaagggatggaaagtctttgcatcatttcgtgctgtacatctgaatcctgaacattacaaagatgcccggtccttcaatccctggagatggcagagtaactcatcagaaacagcaaatcctgggaatgtttatacaccatttggaggagggccaaggttgtgccctggctatgagctagccagagttgtactgtctgtcttccttcaccgcattgttacccgcttcagttgggttcctgctgaggaagataagttggtgttttttccaactactaggacgcagaagaggtatcctattattgtgcagcgtagacattagagaggaatgaccatgtatagcaatatgaaaattaagagcacaacagatagagaagggaaaaaaggaagctgagtgtagatcagtttaataagttaattttcatcacatgtaaataaataataaaattcatatctccccgttcatatatcaattgtctctgcaatgctcaacaaccagaaaagttggcaagaattttaacgc

SEQ ID NO: 58185 - protein, 486 aa, Glycine max
  peptide (1)..(486): Ceres Seq. ID no. 15176533
NFFYFLLLLFSVTAMASLPTLLSFAVIFFTVALLYLRRVFRRRQFRLPPGSHGLPLIGETLQLISAYKSDNPEPFIDERVERYGSIFTTHVFGEPTVFSADPEVNRFILQNEGKLLDCSYPGSISNLLGKHSLLLMKGALHKRMHSLTMSFANSSIIKDHLLHHIDRLICLNLDAWSDTVFLMDQAKKITFELTVKQLMSFDPDEWTENLRKEYVLVIEGFFTLPFPLFSTTYRRAIKARTKVAEALALVVRQRRKEYGENKEKKSDMLGALLASGDHLSDEEIVDFLLALLVAGYETTSTIMTLAIKFLTETPLALAQLKEEHDQIRAKSHPGAPLEWTDYKSMAFTQCVVNETLRVANIIGGIFRRATTDINIKGYTIPKGWKVFASFRAVHLNPEHYKDARSFNPWRWQSNSSETANPGNVYTPFGGGPRLCPGYELARVVLSVFLHRIVTRFSWVPAEEDKLVFFPTTRTQKRYPIIVQRRH

SEQ ID NO: 58186 - protein, 472 aa, Glycine max
  peptide (1)..(472): Ceres Seq. ID no. 15176534
MASLPTLLSFAVIFFTVALLYLRRVFRRRQFRLPPGSHGLPLIGETLQLISAYKSDNPEPFIDERVERYGSIFTTHVFGEPTVFSADPEVNRFILQNEGKLLDCSYPGSISNLLGKHSLLLMKGALHKRMHSLTMSFANSSIIKDHLLHHIDRLICLNLDAWSDTVFLMDQAKKITFELTVKQLMSFDPDEWTENLRKEYVLVIEGFFTLPFPLFSTTYRRAIKARTKVAEALALVVRQRRKEYGENKEKKSDMLGALLASGDHLSDEEIVDFLLALLVAGYETTSTIMTLAIKFLTETPLALAQLKEEHDQIRAKSHPGAPLEWTDYKSMAFTQCVVNETLRVANIIGGIFRRATTDINIKGYTIPKGWKVFASFRAVHLNPEHYKDARSFNPWRWQSNSSETANPGNVYTPFGGGPRLCPGYELARVVLSVFLHRIVTRFSWVPAEEDKLVFFPTTRTQKRYPIIVQRRH

SEQ ID NO: 58187 - protein, 351 aa, Glycine max
  peptide (1)..(351): Ceres Seq. ID no. 15176535
MKGALHKRMHSLTMSFANSSIIKDHLLHHIDRLICLNLDAWSDTVFLMDQAKKITFELTVKQLMSFDPDEWTENLRKEYVLVIEGFFTLPFPLFSTTYRRAIKARTKVAEALALVVRQRRKEYGENKEKKSDMLGALLASGDHLSDEEIVDFLLALLVAGYETTSTIMTLAIKFLTETPLALAQLKEEHDQIRAKSHPGAPLEWTDYKSMAFTQCVVNETLRVANIIGGIFRRATTDINIKGYTIPKGWKVFASFRAVHLNPEHYKDARSFNPWRWQSNSSETANPGNVYTPFGGGPRLCPGYELARVVLSVFLHRIVTRFSWVPAEEDKLVFFPTTRTQKRYPIIVQRRH

SEQ ID NO: 58188 - DNA, 1375 bp, Glycine max
  misc_feature (1)..(1375): Ceres Seq. ID no. 15224520
ggataaattatttagggggcagaaaagatcaaccgagtctaattccagcctttggctgattctctttgcaaaccaatctcatcatatattctcaaaccatatcagcttccccaccacacaaaaccataaaccaaaaactccattgattgaagaaaaagagagcatcatatcatcgtattcatggacacagaacaagaagagatgcagttcatggggctctacggcgtctacagagaatcctacaagatcatattcgcatggagcaaggtcttcaacaagatcaccttaaccctaatcctccctctctccttcatctttctcatccacatcgaagtctccaacatcctcttcggaaaaatcctccacaacacccaacaaatgatggaaaccccacaagacacgccccaataccacaacctcaccaacatgctctcttccgaatgggccattttcattctcttcaagctcctctacttcaccttcctcctcgtcttctccctcttatccacctcagcagcagtctacaccgtggcctcaatctacacttcacgagaagtcaccttctccaaagtcatgaacgttgttcccaaagtatggaaaagactcatggtaacttttttatgcacctttgtggcgtttttcgcgtacaacgttatgacactcgttgttttcgttatatgggcacttgcaataggactaaggaatggtggggttgtggttttggttgtgttggggatgttgtatttcgcggggtttgtgtacttaacggtggtttggcaactggcgagtgtggtgaccgtgttggaggaagacacgtgcggggtaagagcaatgatgaagaccaacgagttgataaaagggagaatagggttgaccgtactcatattcttgaagctcgtgatttcttttgggttgatacagtttctgttcaagaaaacggtggtacaagggtggaagttggggtctgtggatagaacgatttatggggtggtgtgtttggtgctgttctctcagttgtaccttttccaacttgttatacaaaccgtgctctatttcgtttgcaagtcctaccaccatcagaatattgacaaatctgctttgtcggatcaccttgaagtgtatcatggtgagtatgagcctttgaaggctaaagatgttcagatggaagagtgccatgtttgatagatatagcaaaattatgtgcatatctatctgctatagtttctaggtgtcataagaaatatgttccaatgtttgaaattaaatcaatcagatatatatgtcagagtgctgaatacacaggattagttatctgcagcatgtgccttaatttgcttttgcgctacgtgttaataaattcttgtagtttttattc

SEQ ID NO: 58189 - protein, 333 aa, Glycine max
  peptide (1)..(333): Ceres Seq. ID no. 15224521
MDTEQEEMQFMGLYGVYRESYKIIFAWSKVFNKITLTLILPLSFIFLIHIEVSNILFGKILHNTQQMMETPQDTPQYHNLTNMLSSEWAIFILFKLLYFTFLLVFSLLSTSAAVYTVASIYTSREVTFSKVMNVVPKVWKRLMVTFLCTFVAFFAYNVMTLVVFVIWALAIGLRNGGVVVLVVLGMLYFAGFVYLTVVWQLASVVTVLEEDTCGVRAMMKTNELIKGRIGLTVLIFLKLVISFGLIQFLFKKTVVQGWKLGSVDRTIYGVVCLVLFSQLYLFQLVIQTVLYFVCKSYHHQNIDKSALSDHLEVYHGEYEPLKAKDVQMEECHV

SEQ ID NO: 58190 - protein, 326 aa, Glycine max
  peptide (1)..(326): Ceres Seq. ID no. 15224522
MQFMGLYGVYRESYKIIFAWSKVFNKITLTLILPLSFIFLIHIEVSNILFGKILHNTQQMMETPQDTPQYHNLTNMLSSEWAIFILFKLLYFTFLLVFSLLSTSAAVYTVASIYTSREVTFSKVMNVVPKVWKRLMVTFLCTFVAFFAYNVMTLVVFVIWALAIGLRNGGVVVLVVLGMLYFAGFVYLTVVWQLASVVTVLEEDTCGVRAMMKTNELIKGRIGLTVLIFLKLVISFGLIQFLFKKTVVQGWKLGSVDRTIYGVVCLVLFSQLYLFQLVIQTVLYFVCKSYHHQNIDKSALSDHLEVYHGEYEPLKAKDVQMEECHV

SEQ ID NO: 58191 - protein, 323 aa, Glycine max
  peptide (1)..(323): Ceres Seq. ID no. 15224523
MGLYGVYRESYKIIFAWSKVFNKITLTLILPLSFIFLIHIEVSNILFGKILHNTQQMMETPQDTPQYHNLTNMLSSEWAIFILFKLLYFTFLLVFSLLSTSAAVYTVASIYTSREVTFSKVMNVVPKVWKRLMVTFLCTFVAFFAYNVMTLVVFVIWALAIGLRNGGVVVLVVLGMLYFAGFVYLTVVWQLASVVTVLEEDTCGVRAMMKTNELIKGRIGLTVLIFLKLVISFGLIQFLFKKTVVQGWKLGSVDRTIYGVVCLVLFSQLYLFQLVIQTVLYFVCKSYHHQNIDKSALSDHLEVYHGEYEPLKAKDVQMEECHV

SEQ ID NO: 58192 - DNA, 1412 bp, Glycine max
  misc_feature (1)..(1412): Ceres Seq. ID no. 15168525
attctattccatgtctcttcttgagagagttcacttctctcactctaaaagtctaaatcaccttgttttcaactgtctctctttccttttctagtcgagtacttttctttcacttttcacttagctgataggtttcaacttgcaccatcttttcattagcattctgtatcagtcctcatcccactgtatgcattgctagctctcatattaccccaactccttgattttctttttgtttgagtcgtagaagatgttacttagaagctcctcggcaccgattctaacttcattgttacactattcaaaggagtcctcctccgaaccagaacacattcttaaccttcctaaaacagcatcagctttaagtctaagccaaaacttggtggagatagaccttaaaaagtcatcaagtcccaagagaaaaaatcgtgtgccacttagtagtgttcctaaaaatcaacagagtaaaaagataaaagaaagagatgaagggaaagatccacaacaaaaaacttgcatgaaagcaaaatcttcaattcaagaactgttttctagtttggatttagataagggactcctggatcatgaagagcgtggttcggggaagaaagatagttggttacagacttcagtgatgggtggtggaatggggagtgatggtggttggatttgtggtggttgcaatggaagtggaagaggctcaggtggtggacatggaaaaaagtggggtttccatgaaggaaatgatcatggtagagataggacggaagcttattaccagaacatgattgaagcaaaccccagtgatgcacttttgctaggaaattatgcaaagtttttgaaagaggtttgtgacgattatcctaaatcaaaagagtatctcgaaagggcgattttggctaatcctgatgatggtcatattctgtccctctatgcggagttaatatggcaattagagaaggatgctaatcgagctgaaggatattttgatcaagccattaaaagtgccccatatgatagctatgtcctagcttcatatgctaatttcctttgggatgccgaagaagacgaggaagataaagactgtaaaaataaatcgaatcacagccatacatatccaactgatctctttcatggagctaaccatcacattcatttaactgcagccatagaaacctcaccactgtttcttaagtgaaggtgtgtgacttgtatgacaaatgtaagtaaataatagtcttttgtcagctattgtgaatagcagcttggatcatactaagagaaagcatctttaatttggtgcctcttgtgctggtaaaaaggcttccaccattgtatcttttaagaataatgttagttttgtatgcagagactaaggagtaaagagcaacactgtattatatacctttaac

SEQ ID NO: 58193 - protein, 315 aa, Glycine max
  peptide (1)..(315): Ceres Seq. ID no. 15168526
MLLRSSSAPILTSLLHYSKESSSEPEHILNLPKTASALSLSQNLVEIDLKKSSSPKRKNRVPLSSVPKNQQSKKIKERDEGKDPQQKTCMKAKSSIQELFSSLDLDKGLLDHEERGSGKKDSWLQTSVMGGGMGSDGGWICGGCNGSGRGSGGGHGKKWGFHEGNDHGRDRTEAYYQNMIEANPSDALLLGNYAKFLKEVCDDYPKSKEYLERAILANPDDGHILSLYAELIWQLEKDANRAEGYFDQAIKSAPYDSYVLASYANFLWDAEEDEEDKDCKNKSNHSHTYPTDLFHGANHHIHLTAAIETSPLFLK

SEQ ID NO: 58194 - protein, 226 aa, Glycine max
  peptide (1)..(226): Ceres Seq. ID no. 15168527
MKAKSSIQELFSSLDLDKGLLDHEERGSGKKDSWLQTSVMGGGMGSDGGWICGGCNGSGRGSGGGHGKKWGFHEGNDHGRDRTEAYYQNMIEANPSDALLLGNYAKFLKEVCDDYPKSKEYLERAILANPDDGHILSLYAELIWQLEKDANRAEGYFDQAIKSAPYDSYVLASYANFLWDAEEDEEDKDCKNKSNHSHTYPTDLFHGANHHIHLTAAIETSPLFLK

SEQ ID NO: 58195 - protein, 187 aa, Glycine max
  peptide (1)..(187): Ceres Seq. ID no. 15168528
MGGGMGSDGGWICGGCNGSGRGSGGGHGKKWGFHEGNDHGRDRTEAYYQNMIEANPSDALLLGNYAKFLKEVCDDYPKSKEYLERAILANPDDGHILSLYAELIWQLEKDANRAEGYFDQAIKSAPYDSYVLASYANFLWDAEEDEEDKDCKNKSNHSHTYPTDLFHGANHHIHLTAAIETSPLFLK

SEQ ID NO: 58196 - DNA, 1324 bp, Glycine max
  misc_feature (1)..(1324): Ceres Seq. ID no. 13594402
ctaatcgaaaaaaccaaaatctggtaattaagatcttctcttcagaagatgtgtaacaccctcaagttcaacccctttaagaaccgtttgctaataatgttcatgctggttctttctctccccttcaatgttcaatcccaagccaaagatagtgaagaacagaacctggcagaactccctcaaacggttcatccaagcaagggaatagtaatagcagttctctccacaatgtttgccataacattactcttacttctctatgttaaattctgccgaactatccctcatgaactccttagtcaaaactcaaatctccaaaactttcagggcctaactcgatcaaggtctagagtttctgggattgacaaacaagtagttgaaacacttcctttcttcaagttctcttccctcaagggttccaaagaaggcctagaatgcaccgtttgtctctccaaattcgaggacacagagactctaagacttcttccaaagtgcaagcacgctttccacatgaattgcattgacaagtggtttgaaagccactctacgtgccctctttgtagacgcagggttgaagcaggggacattaaaaacctcaacttttcattaagctcgcggttcctccgagttccttcaaatctcacggaggatccaaaccttgaaatctttgttcacagagagccatctcatggagggtcagcatcgatccaaaggtcatatttacccttagaccagcggtgtcgaggatcatcgagaagaggcttttgggacgtgggcaagtgcaagaaacaagaactactgcttattgatgatagcagttctattggtgggacaagaaagtggaacaaaccggtgcacgtgatgaatcataagatagttatctctaatgtttttacgaggagcaggtggagtgatcttaatgcttcggacctgttgtcattgaacagtgagatgcttaatgatgtttgcagtgggagattctgtttgtgtcctttggaatccagcgacgacagcggaaattttcatgggatttcgagttctaatgaggaagaaaactcgtttacggcactgaatagtcctgcggagaagaggtgcatgtctgagaggtttacacaaaaggggaaggagaataggatcagagaatgtgtgacatctaatggggccagtgagaggctgtggaaggtttggttgccaattgcgcgaagaacggtccaatggtttgcgatacaagaaaggaattcggttgaattagaacacaaaaccttagcttcaaatgtctgatcaatgcgactaaattgttggtaacgtgtatgtttgtgcattc

SEQ ID NO: 58197 - protein, 410 aa, Glycine max
  peptide (1)..(410): Ceres Seq. ID no. 13594403
MCNTLKFNPFKNRLLIMFMLVLSLPFNVQSQAKDSEEQNLAELPQTVHPSKGIVIAVLSTMFAITLLLLLYVKFCRTIPHELLSQNSNLQNFQGLTRSRSRVSGIDKQVVETLPFFKFSSLKGSKEGLECTVCLSKFEDTETLRLLPKCKHAFHMNCIDKWFESHSTCPLCRRRVEAGDIKNLNFSLSSRFLRVPSNLTEDPNLEIFVHREPSHGGSASIQRSYLPLDQRCRGSSRRGFWDVGKCKKQELLLIDDSSSIGGTRKWNKPVHVMNHKIVISNVFTRSRWSDLNASDLLSLNSEMLNDVCSGRFCLCPLESSDDSGNFHGISSSNEEENSFTALNSPAEKRCMSERFTQKGKENRIRECVTSNGASERLWKVWLPIARRTVQWFAIQERNSVELEHKTLASNV

SEQ ID NO: 58198 - protein, 394 aa, Glycine max
  peptide (1)..(394): Ceres Seq. ID no. 13594404
MFMLVLSLPFNVQSQAKDSEEQNLAELPQTVHPSKGIVIAVLSTMFAITLLLLLYVKFCRTIPHELLSQNSNLQNFQGLTRSRSRVSGIDKQVVETLPFFKFSSLKGSKEGLECTVCLSKFEDTETLRLLPKCKHAFHMNCIDKWFESHSTCPLCRRRVEAGDIKNLNFSLSSRFLRVPSNLTEDPNLEIFVHREPSHGGSASIQRSYLPLDQRCRGSSRRGFWDVGKCKKQELLLIDDSSSIGGTRKWNKPVHVMNHKIVISNVFTRSRWSDLNASDLLSLNSEMLNDVCSGRFCLCPLESSDDSGNFHGISSSNEEENSFTALNSPAEKRCMSERFTQKGKENRIRECVTSNGASERLWKVWLPIARRTVQWFAIQERNSVELEHKTLASNV

SEQ ID NO: 58199 - protein, 392 aa, Glycine max
  peptide (1)..(392): Ceres Seq. ID no. 13594405
MLVLSLPFNVQSQAKDSEEQNLAELPQTVHPSKGIVIAVLSTMFAITLLLLLYVKFCRTIPHELLSQNSNLQNFQGLTRSRSRVSGIDKQVVETLPFFKFSSLKGSKEGLECTVCLSKFEDTETLRLLPKCKHAFHMNCIDKWFESHSTCPLCRRRVEAGDIKNLNFSLSSRFLRVPSNLTEDPNLEIFVHREPSHGGSASIQRSYLPLDQRCRGSSRRGFWDVGKCKKQELLLIDDSSSIGGTRKWNKPVHVMNHKIVISNVFTRSRWSDLNASDLLSLNSEMLNDVCSGRFCLCPLESSDDSGNFHGISSSNEEENSFTALNSPAEKRCMSERFTQKGKENRIRECVTSNGASERLWKVWLPIARRTVQWFAIQERNSVELEHKTLASNV

SEQ ID NO: 58200 - DNA, 1037 bp, Glycine max
  misc_feature (1)..(1037): Ceres Seq. ID no. 13581740
gaaaagagaattgagctggcttggtgatccctgctccatcagaggttagggtttggcagagaacagaaattgggaaattcctcaatcttttgaactcgtcaagtgcgtgcaacactgtacaataatcttcatcgtccttgaaattcccaatcccctgtagtggtagtaagttgctagcaatcgagaatgggagggcacggaggtctcaacattctcccccaaaagcgatggaacgtttacaatttcgacaacagagagaaggtccgtcgcgacgaagagcaagccgccagggaggagcagctcaagcgtgaagagacccggaagcgcgacgccgagctccgcctcgaccgactccgcgtcgctcgcggcttggcgccgtcgattccgccgcctcccgaatccgaacctcagccttcctcccgctccgaacccgtgccttcctccgaccctggccacatcaacctcttcgaggggatcaacatttttgacccaattcagaaggacggtgctgctgaaagggattgggcgaagaggaggaagaagattgagaagggaggaggacccaagcccaagcccacagtttctgtgggcccggaggatgagaagtataggctgggctatgggcttgcggggaagggggttcagttgccgtggtatcttcggaagcctgatggtgaaggtgtcggtgatgataataaggatgaaggtggtgacgtggataggagagaaaataagggtgagaagaagaggaagactatggaggaattgagggaagagaggttgaaaagggagaggaaagagaaggatagggagagggctttgagacacgagaagatgcagagtcacagagatggttctggttatggcagtaggaggaggttcaccagatgaacataggttttttgtgttctttttctgaactgatttttgtttctgaagtttcatgtaattggaagttatgcaatttggattcagtagtatattgtataagggaagataggtttatatagttaatcaaagtggtttggttttctttc

SEQ ID NO: 58201 - protein, 234 aa, Glycine max
  peptide (1)..(234): Ceres Seq. ID no. 13581741
MGGHGGLNILPQKRWNVYNFDNREKVRRDEEQAAREEQLKREETRKRDAELRLDRLRVARGLAPSIPPPPESEPQPSSRSEPVPSSDPGHINLFEGINIFDPIQKDGAAERDWAKRRKKIEKGGGPKPKPTVSVGPEDEKYRLGYGLAGKGVQLPWYLRKPDGEGVGDDNKDEGGDVDRRENKGEKKRKTMEELREERLKRERKEKDRERALRHEKMQSHRDGSGYGSRRRFTR

SEQ ID NO: 58202 - DNA, 512 bp, Glycine max
  misc_feature (1)..(512): Ceres Seq. ID no. 13581734
atttcatactacaacctcgcagttcaaaagttcaaaccccaaatcttcaaaatcctcacagcaaacccaaaataaaacaacaacaacataaaaaaaccttaacaaaaccaaaaccccaagagaaaaacaccacacttccaatcaaatgttcttcctctctttgcccttctcttcctgcttcagagcttcacaacccaaccacgatcccaccaccctctcaacgaacctcaccacctacatctaccacaccgaatacggcaccgtttcgctgacatggtcacgctccatgctaggccgctccctccacgtgaacctccacaaccactcctcctttcacctccacgtcaaaccctgaaggaaaaaagggtccaagaagctttctcacaacacnnnnttcctctggaacctctcctccgcgagattcgaatccggacgacccgaacctcgctcnnnnntctacctcgccatcgaggtagaacacagcctcagcctcctcgtgggggacttatccc

SEQ ID NO: 58203 - protein, 89 aa, Glycine max
  peptide (1)..(89): Ceres Seq. ID no. 13581735
FILQPRSSKVQTPNLQNPHSKPKIKQQQHKKTLTKPKPQEKNTTLPIKCSSSLCPSLPASELHNPTTIPPPSQRTSPPTSTTPNTAPFR

SEQ ID NO: 58204 - protein, 79 aa, Glycine max
  peptide (1)..(79): Ceres Seq. ID no. 13581736
  misc_feature (40)..(40): Xaa is any aa, unknown or other
  misc_feature (41)..(41): Xaa is any aa, unknown or other
  misc_feature (60)..(60): Xaa is any aa, unknown or other
  misc_feature (61)..(61): Xaa is any aa, unknown or other
MVTLHARPLPPREPPQPLLLSPPRQTLKEKRVQEAFSQHXXPLEPLLREIRIRTTRTSLXXLPRHRGRTQPQPPRGGLI

SEQ ID NO: 58205 - protein, 69 aa, Glycine max
  peptide (1)..(69): Ceres Seq. ID no. 13581737
MFFLSLPFSSCFRASQPNHDPTTLSTNLTTYIYHTEYGTVSLTWSRSMLGRSLHVNLHNHSSFHLHVKP

SEQ ID NO: 58206 - DNA, 1822 bp, Glycine max
  misc_feature (1)..(1822): Ceres Seq. ID no. 15171286
gtaacatcttagtcgtcctatacatagagaagaagtagtacgtagtagatgctttcgaaaccctactctaacaaaaaccaagacatttagtttcatcaccactgttgagaaacttggagaagattttcaccaatggatccctgtcccttcgtgcgtctcatggtagactctttagctctcaaccttccctccgccaccaaaccgccacctgtctccggcgtccacccttccactaccccatgcttctgccaaatccgcatcaccaatttcccctctcaaaccgcgcttcttccactctcttcttcctcctccggcgacgccaaccccgaagccgcaacctccgccccgggcttccacctcgactccagcgcgctccgtcgcctctccgccaaacctctcaccctccgcctcgccgtctactccggcagcaccgcccgcgcctgcggcatctcctccgccaaactcctcggccgcctcaacctcaccctcgacctctccgccgcgctctcccgccccaacaccttccactccggctggctcaacctgagaaagaacagaaccggcttcgaaccggagcacaagcctgcgcctcgggttcacattgtggtccggtccgaaccggacccgcggttcgtgttccagttcggtggcgaaccggagtgtagcccggtggttttccagattcaggagaataatatcagacagcctgtctttagttgcaagttcagtgcggatcgtaactctagatccaggtgtctaccctcagattttgccaacaaccccagtagatggaggagaaccttgaagggtattagagagcgtcatgggagggagagaaagggttggatgataatgatccatgatctctctggctcacccgttgcagctgcctccatgataaccccatttgtcccttcccctggttcagacagagtatcaagatcaaacccaggtgcatggctcattcttcgcaccaacaatggtgcctctgtgagtagctggaagccatggggccgtctcgaagcgtggcgagaacgaggccctgtcgatggcttgggctacaagtttgagctcgtcactgagaatggacctgccaatgggataccaattgctgaggccacaatgaatgtgaaaaagggtggccagttctgcattgactacaaagtgatgagggattctggattgggttcaaggttgaaaggaaaagggtttgtgatgggttccacagtggaaggtgaaggcaaagttagcaagcctgttgtgcaagttggtgcacagcatgtgacatgcatggctgatgctgctttgttcattgcactttctgctgccattgatcttagcatggatgcatgcaagctcttctcgcataaactaaggaaagagctttgccatgaagaacaacaagtttcctttccctaaaaacctgctagaagaattgaattgttgtccttagttaaattacaagttagttatcatctgctgcagtgatagccaatgcgttcctagcttgatggatagtgggaactctggtttgagcatagagacagacttgcaattaattatcaagtctttgcagctgctatggcggattcagttttgtgaatgttgtcaggaaattaatcagagttgctagttttgttgattctacctttttctggttggattttctaaacagcagaaattagaggggtgattttagcagcattttttgtactgaacatgtacagagtacagacaaaccacaggcaaatgtatgtttatatatttttatttttttatatatttattaattttttttatgtcttacttgattttatgtctt

SEQ ID NO: 58207 - protein, 428 aa, Glycine max
  peptide (1)..(428): Ceres Seq. ID no. 15171287
MDPCPFVRLMVDSLALNLPSATKPPPVSGVHPSTTPCFCQIRITNFPSQTALLPLSSSSSGDANPEAATSAPGFHLDSSALRRLSAKPLTLRLAVYSGSTARACGISSAKLLGRLNLTLDLSAALSRPNTFHSGWLNLRKNRTGFEPEHKPAPRVHIVVRSEPDPRFVFQFGGEPECSPVVFQIQENNIRQPVFSCKFSADRNSRSRCLPSDFANNPSRWRRTLKGIRERHGRERKGWMIMIHDLSGSPVAAASMITPFVPSPGSDRVSRSNPGAWLILRTNNGASVSSWKPWGRLEAWRERGPVDGLGYKFELVTENGPANGIPIAEATMNVKKGGQFCIDYKVMRDSGLGSRLKGKGFVMGSTVEGEGKVSKPVVQVGAQHVTCMADAALFIALSAAIDLSMDACKLFSHKLRKELCHEEQQVSFP

SEQ ID NO: 58208 - protein, 419 aa, Glycine max
  peptide (1)..(419): Ceres Seq. ID no. 15171288
MVDSLALNLPSATKPPPVSGVHPSTTPCFCQIRITNFPSQTALLPLSSSSSGDANPEAATSAPGFHLDSSALRRLSAKPLTLRLAVYSGSTARACGISSAKLLGRLNLTLDLSAALSRPNTFHSGWLNLRKNRTGFEPEHKPAPRVHIVVRSEPDPRFVFQFGGEPECSPVVFQIQENNIRQPVFSCKFSADRNSRSRCLPSDFANNPSRWRRTLKGIRERHGRERKGWMIMIHDLSGSPVAAASMITPFVPSPGSDRVSRSNPGAWLILRTNNGASVSSWKPWGRLEAWRERGPVDGLGYKFELVTENGPANGIPIAEATMNVKKGGQFCIDYKVMRDSGLGSRLKGKGFVMGSTVEGEGKVSKPVVQVGAQHVTCMADAALFIALSAAIDLSMDACKLFSHKLRKELCHEEQQVSFP

SEQ ID NO: 58209 - DNA, 1440 bp, Glycine max
  misc_feature (1)..(1440): Ceres Seq. ID no. 14302817
gcacgataggaggcactacgctgtcgtttgcggtgttagaagacgtagtcgggcgtgatggcgaagaagcgatcagccccgagtggcggtcgtcgggaaaaccgagccgaatcatcttcccgacggctcaactcagcttccggtcgcagaaaactcgttgcgttcttcatcgtatcgtccatcatcgctatcgtcacttatcgttatcgcttcagacaatcttctccttcgcaaggccttgtcacaactcatgctaattgccaacatatactcgccgaaaattcaaaagtatcaggaaattcgtctcagcgccattatacttatcctgtgcttggctacattactccctggaattctcgaggttatgaattggcaaaaaggttcaactctaagttcacacatttatcacccatttggtatgatctaaagagccaacagactagcttagttctagaggggagacataatgctgacagaggatggatctcagagcttaaaaaggcaggagaagctttgattttgcctagagttgttctggaagcatcaccagcagtgctgttgggaaaggaaaaacaaaggaacaaagccattaaccttatagtaacagagtgcaaggaaatgggatatgatggtattgttttggaatcttggtcaaggtgggcagcttatggtatcttgcatgatccaagcatgcggaatttggcattgcagtttgtaaaacagcttggagatgcactgcattctataagctcagagaaaattagtgggcagcagctgcagttggtctatgttataggtccaccttctgagaagttgcaagagcatgattttggtcctaaagatcttgagactttaagtgaagctgtggatggattctcgttaatgacatatgatttctctaatcctcataatcctggtcctaatgcacctttgaaatggattcaaattgttctacagctgcttctcggtacctctggcaatagagcccaaagccttgcccccaagatacttcttggtatcaacttctatggaaatgatttctccctttcaagggatgcagggggtggagctattattgggagagattacctggcacttttggagaagcactggcctgaactgcagtgggataagaatagtggggagcattttttcttttacactgacgacaaggatatcaggcatgtggtattttatccatctttgaagtcaatttctttgcggttagaggaagctcgttcatggggatgtggcatctcgatctgggaaattggccaaggtctggattatttttttgaccttctgtgatagcttgttatgtgtacttcttttgtggcccatgctaatgtttattcctacgtcgtaatgttgtgtattcagtataatcgaaacgtacttcagttaaattgggattttgtttttcagaaatctagtttgagg

SEQ ID NO: 58210 - protein, 416 aa, Glycine max
  peptide (1)..(416): Ceres Seq. ID no. 14302818
MAKKRSAPSGGRRENRAESSSRRLNSASGRRKLVAFFIVSSIIAIVTYRYRFRQSSPSQGLVTTHANCQHILAENSKVSGNSSQRHYTYPVLGYITPWNSRGYELAKRFNSKFTHLSPIWYDLKSQQTSLVLEGRHNADRGWISELKKAGEALILPRVVLEASPAVLLGKEKQRNKAINLIVTECKEMGYDGIVLESWSRWAAYGILHDPSMRNLALQFVKQLGDALHSISSEKISGQQLQLVYVIGPPSEKLQEHDFGPKDLETLSEAVDGFSLMTYDFSNPHNPGPNAPLKWIQIVLQLLLGTSGNRAQSLAPKILLGINFYGNDFSLSRDAGGGAIIGRDYLALLEKHWPELQWDKNSGEHFFFYTDDKDIRHVVFYPSLKSISLRLEEARSWGCGISIWEIGQGLDYFFDLL

SEQ ID NO: 58211 - protein, 229 aa, Glycine max
  peptide (1)..(229): Ceres Seq. ID no. 14302819
MGYDGIVLESWSRWAAYGILHDPSMRNLALQFVKQLGDALHSISSEKISGQQLQLVYVIGPPSEKLQEHDFGPKDLETLSEAVDGFSLMTYDFSNPHNPGPNAPLKWIQIVLQLLLGTSGNRAQSLAPKILLGINFYGNDFSLSRDAGGGAIIGRDYLALLEKHWPELQWDKNSGEHFFFYTDDKDIRHVVFYPSLKSISLRLEEARSWGCGISIWEIGQGLDYFFDLL

SEQ ID NO: 58212 - DNA, 1288 bp, Glycine max
  misc_feature (1)..(1288): Ceres Seq. ID no. 15171141
agaggaagagaagagaaagaggagcacataataaccctcaaactccatttcactcacagaaaaatagagatatagagagagaaagtgctgcagaatacacacatacacaccacttcttcaagagagagaggtgtgtgaaggaaaataagaactgaaagaaaaattgttttgcaaaggaagatatgaaactttgcaaatttaacaactgagaaagaagatctgtgatttctctctctctttttgttgttgttgttgtttgcagagaaaatcacacaaacgcacacacacacacacacacacacacacacccttcttcgtgtctgaatttttatcattgacaattttttcacaaagggttgttgtctcttcagagagacacagatcttgaggttggaggcaaaatccttcacacactttggtggttatggaaacagaagagaggaaccagaaagattgcaaggcttcggagccagagtttttcttgcagtgggggaacaggaagaggctgagatgtgtgagggtgaaggaccctcggatttcagcgaggctcaacggtggaatcagaaggaaacttggttctgcaatggagcatcatcgctctggcctcactgtgccagaaaaagaacatcatcaccatcatcatcatcaacaacttaatcgccttacaaggaattccgacggggcgattctccggtcatcggccggcgagacaaggaaatcggcgtcgccggagaaggaggaccggtactacacgacgcggggttcggcggaggagaacggcaaggtcaccggcggcgaaggcatcaacggcgaagaacgagccctagtttggcccaagctctacatcactctctcaagcaaggagaaagaggaagattttctggccatgaagggttgcaagcttcctcagcgacccaaaaagagggccaaaatcattcaaagaagcttacttagaccaagagggttgaaggctatgggaagcatggaaagtgattctgaatgaatgatatgatggaaagaaagaaaaaaaaatcaattgagcggatccacaagaagggggaagaaggaagcccttttaagaagcatgaagaagaaatgttttggagatggtgatgatgatgatgatgttgtttgaattgatgaatggtgaagataatgatgattcaagttttttttatatttgtgtggcatgtatgttgccccctcaatgtttttttgtaaacgagtaagattcgatccgatccaatccatttcaattaattaagaaaaaatattttctcatcttcac

SEQ ID NO: 58213 - protein, 192 aa, Glycine max
  peptide (1)..(192): Ceres Seq. ID no. 15171142
METEERNQKDCKASEPEFFLQWGNRKRLRCVRVKDPRISARLNGGIRRKLGSAMEHHRSGLTVPEKEHHHHHHHQQLNRLTRNSDGAILRSSAGETRKSASPEKEDRYYTTRGSAEENGKVTGGEGINGEERALVWPKLYITLSSKEKEEDFLAMKGCKLPQRPKKRAKIIQRSLLRPRGLKAMGSMESDSE

SEQ ID NO: 58214 - protein, 139 aa, Glycine max
  peptide (1)..(139): Ceres Seq. ID no. 15171143
MEHHRSGLTVPEKEHHHHHHHQQLNRLTRNSDGAILRSSAGETRKSASPEKEDRYYTTRGSAEENGKVTGGEGINGEERALVWPKLYITLSSKEKEEDFLAMKGCKLPQRPKKRAKIIQRSLLRPRGLKAMGSMESDSE

SEQ ID NO: 58215 - DNA, 1356 bp, Glycine max
  misc_feature (1)..(1356): Ceres Seq. ID no. 15179800
atatattgaatgttctggtcttcctttgtgtttttgtagatagaagccatcagtcatggataggcttctatcatcgtcttcacccccttcttttacatttctcactcgattcgaatctgcaactgcaagattcaatttctctccgtcaacacgttctcactctcacttgaagcggctctcctcaatttgttgccagcatgcaaatccatctcctttttcctcttccactccctttctcgcttcttccaaccaccccattaattttccatccttttcctcttcttcagatccctccacactcgaatcccattctctcaatcaaatcaaaaccggggctttcccaaaaccaaaggtaataacagctcggacgcttgtaatactttctgctcttgctatgatcttaatccaaccaactattgcaccagcagcttttgcaacctttcaaactgctgccaagactggtggtcctgctgctgcagctgcagttggtagaaaactaatccacacggagctactaagtagtgcttggactggtttcttggctggctgcttacacaccttatcagggcctgaccacctagctgccttggctccattgtcaatcggtcgaacccgaatggagagtgctgctgttggagccctttggggttgtggccatgatgctggtcaagttctttttgggttaatatttctaatcctcaaggatcaactccatattgaaattatccgaacttggggtaccagagtggtgggtcttactctgctaataattggtgctatgggaattagagaagcatcagaagtacatgccccaattgttgctttagaaagtggtgaatgtgatgtcaacgtgtatgaatcgcttgataatccaacagtgggcaaaaagaagataggttttgctacttttgcaacagggatagttcatggcctgcaaccagatgcattgatgatggttttgcctgcccttgctttgccttcgcgtttggctggtgctgcgtttctcatcatgttcttaattggaactgtaattgcaatgggaagttataccgtgtttataggttcgtgtagccaggcactgaaggatagagtacctaggataactgagaaactcacttgggtttcctcccttattgcaatagccctcggatttgctatcattattagccagttttttgggtttagtctgtattaaaacatctttaataagaaaggtactttttttcttatgaacattgttttagtatttagaaaaagtagacgttggacagaaaattggttgtttataggaagtacatcatccagaaaacatgtgaaattgattgttaattatttactttgcattcgaatgtgtat

SEQ ID NO: 58216 - protein, 379 aa, Glycine max
  peptide (1)..(379): Ceres Seq. ID no. 15179801
MDRLLSSSSPPSFTFLTRFESATARFNFSPSTRSHSHLKRLSSICCQHANPSPFSSSTPFLASSNHPINFPSFSSSSDPSTLESHSLNQIKTGAFPKPKVITARTLVILSALAMILIQPTIAPAAFATFQTAAKTGGPAAAAAVGRKLIHTELLSSAWTGFLAGCLHTLSGPDHLAALAPLSIGRTRMESAAVGALWGCGHDAGQVLFGLIFLILKDQLHIEIIRTWGTRVVGLTLLIIGAMGIREASEVHAPIVALESGECDVNVYESLDNPTVGKKKIGFATFATGIVHGLQPDALMMVLPALALPSRLAGAAFLIMFLIGTVIAMGSYTVFIGSCSQALKDRVPRITEKLTWVSSLIAIALGFAIIISQFFGFSLY

SEQ ID NO: 58217 - protein, 266 aa, Glycine max
  peptide (1)..(266): Ceres Seq. ID no. 15179802
MILIQPTIAPAAFATFQTAAKTGGPAAAAAVGRKLIHTELLSSAWTGFLAGCLHTLSGPDHLAALAPLSIGRTRMESAAVGALWGCGHDAGQVLFGLIFLILKDQLHIEIIRTWGTRVVGLTLLIIGAMGIREASEVHAPIVALESGECDVNVYESLDNPTVGKKKIGFATFATGIVHGLQPDALMMVLPALALPSRLAGAAFLIMFLIGTVIAMGSYTVFIGSCSQALKDRVPRITEKLTWVSSLIAIALGFAIIISQFFGFSLY

SEQ ID NO: 58218 - protein, 192 aa, Glycine max
  peptide (1)..(192): Ceres Seq. ID no. 15179803
MESAAVGALWGCGHDAGQVLFGLIFLILKDQLHIEIIRTWGTRVVGLTLLIIGAMGIREASEVHAPIVALESGECDVNVYESLDNPTVGKKKIGFATFATGIVHGLQPDALMMVLPALALPSRLAGAAFLIMFLIGTVIAMGSYTVFIGSCSQALKDRVPRITEKLTWVSSLIAIALGFAIIISQFFGFSLY

SEQ ID NO: 58219 - DNA, 1292 bp, Glycine max
  misc_feature (1)..(1292): Ceres Seq. ID no. 15170306
gttctcattcatttcatttttcgtggtttcaatctcaggcataaggctcccgcgtcgcaccccactcctcccctccaaaccctcccagccacgctccctcgcacgtgaggctcttgcgtcgcagcaacaactccgcaatacttgactcgagaatgagccattcattcattccaagggacgacccctgacgcttccactctttctttggtggcggcatcgttttctctccgctttacccattcattcattcacgttctttatatgcatgctgagagtcgtgtggagatgccactgcctatgtacgtaccaagagacgaacaatttgatgagtctaagctgaacacattcttaatcaagaggctcaaggcagtggtccataacttgatccctggtcttaaggctagtctttctgctaataaccatgacttcaatagattttcagacattgacgacctttacagtgatggcctgcccttgcaagatgaaattttgaagaaaattccattgttacaagtgctcacaaagatacaagaatgcagccaggggcttcttaagtatgacactcccaagattatttctaaggacaagttttcctggctgcgagatgatgaattttcccggcaagcaatagcaggagtcaaccctgttaacattgaggggcttaaagttttcccactggtgagcaaactcgacccggaaacatatgaccaccaagattctgcactcaaaaaagagcatattctaggacaacttaatggcatgaccgtgcaacaggcaatagtggaaaataagctgtttatggtaaagtaacgcgatgtctatgttccatttcttgacgggatcaatgccctttatgggagaaaatcctatgctacccgcaccatatttttcttgataccgcttggcactctcaagcctattgctatagagcttagcctcggaccaagtttcggatgaaaacgtgtagttactcctcctgtggatgcaactacaaattggaagtggcagcttgccaaagctcatgtgtgtgccaatgatgctggggtgcaccaacttgttaaccattgtacctcttgaggttgtatcttatttatcctctatcatctgaaatcgtcaaggcaaatggggtaatgatggaaaaagcatggactgggacactggatcgtgtgcagacattttggggcctaagacgaaaatgttaaagggtcttttttttacaaaaattttaaagagacttagtacattatataaaatatcaatttttatattaatcttctagcttttttagctgc

SEQ ID NO: 58220 - protein, 182 aa, Glycine max
  peptide (1)..(182): Ceres Seq. ID no. 15170307
MHAESRVEMPLPMYVPRDEQFDESKLNTFLIKRLKAVVHNLIPGLKASLSANNHDFNRFSDIDDLYSDGLPLQDEILKKIPLLQVLTKIQECSQGLLKYDTPKIISKDKFSWLRDDEFSRQAIAGVNPVNIEGLKVFPLVSKLDPETYDHQDSALKKEHILGQLNGMTVQQAIVENKLFMVK

SEQ ID NO: 58221 - protein, 174 aa, Glycine max
  peptide (1)..(174): Ceres Seq. ID no. 15170308
MPLPMYVPRDEQFDESKLNTFLIKRLKAVVHNLIPGLKASLSANNHDFNRFSDIDDLYSDGLPLQDEILKKIPLLQVLTKIQECSQGLLKYDTPKIISKDKFSWLRDDEFSRQAIAGVNPVNIEGLKVFPLVSKLDPETYDHQDSALKKEHILGQLNGMTVQQAIVENKLFMVK

SEQ ID NO: 58222 - protein, 170 aa, Glycine max
  peptide (1)..(170): Ceres Seq. ID no. 15170309
MYVPRDEQFDESKLNTFLIKRLKAVVHNLIPGLKASLSANNHDFNRFSDIDDLYSDGLPLQDEILKKIPLLQVLTKIQECSQGLLKYDTPKIISKDKFSWLRDDEFSRQAIAGVNPVNIEGLKVFPLVSKLDPETYDHQDSALKKEHILGQLNGMTVQQAIVENKLFMVK

SEQ ID NO: 58223 - DNA, 904 bp, Glycine max
  misc_feature (1)..(904): Ceres Seq. ID no. 13594411
ctagaacatcctaatcgaaaaataacaccacattacattggcttgggagctatggcggcaaggatgttgcagaggcgattcatttcaatcttctcaagacaaacccatcaccccattactcaagaatcttggtattctcctaccagtgcaatattaaacagttatggattccatcaacggggggtcatgacccatacaaatccaatcaaacctgtctgtgaagatgtagagaataatgaagcagacaccttaaaatcaagtccaaacccagatgaagttgctacatctattagtgttaatgaaacctcttctgtaaagttttctgccaagtccagtttgaagacatcctcaaggcatgatcttgctatggttttcacctgcaaggtctgtgaaacgagatccattaagacggcttgtcgcgaatcgtatgagaaaggtgtagtggtggcaagatgtggggggtgtaataaccttcacctgattgcagatcaccttgggtggtttggtgaaccaggaagcgttgaggacttcctggctgctcgtggagaagaagtgaaaagaggttcagttgacacactgaatcttacattggaagatttagctggaaggaaaccttgaaagatagaatttgaccaagtgtatgttctgcaatagggtgtcactgagagtttggaagtgcaagggaggtaacaatagttggttttgtaaactcggctcttctgtctataattatgctagtaatattaaaaagcaacatattcaatgtactgtttgctttatcaattatttttggtgcctgccaaaggaatgtttttagaccatgatacaccttcatgtgcaaaacttagccaagaaaggaatttatgaaaaaaaaaaaaaaaaaagctyatcgataccgtcgacc

SEQ ID NO: 58224 - protein, 205 aa, Glycine max
  peptide (1)..(205): Ceres Seq. ID no. 15221345
LEHPNRKITPHYIGLGAMAARMLQRRFISIFSRQTHHPITQESWYSPTSAILNSYGFHQRGVMTHTNPIKPVCEDVENNEADTLKSSPNPDEVATSISVNETSSVKFSAKSSLKTSSRHDLAMVFTCKVCETRSIKTACRESYEKGVVVARCGGCNNLHLIADHLGWFGEPGSVEDFLAARGEEVKRGSVDTLNLTLEDLAGRKP

SEQ ID NO: 58225 - protein, 188 aa, Glycine max
  peptide (1)..(188): Ceres Seq. ID no. 15221346
MAARMLQRRFISIFSRQTHHPITQESWYSPTSAILNSYGFHQRGVMTHTNPIKPVCEDVENNEADTLKSSPNPDEVATSISVNETSSVKFSAKSSLKTSSRHDLAMVFTCKVCETRSIKTACRESYEKGVVVARCGGCNNLHLIADHLGWFGEPGSVEDFLAARGEEVKRGSVDTLNLTLEDLAGRKP

SEQ ID NO: 58226 - protein, 184 aa, Glycine max
  peptide (1)..(184): Ceres Seq. ID no. 15221347
MLQRRFISIFSRQTHHPITQESWYSPTSAILNSYGFHQRGVMTHTNPIKPVCEDVENNEADTLKSSPNPDEVATSISVNETSSVKFSAKSSLKTSSRHDLAMVFTCKVCETRSIKTACRESYEKGVVVARCGGCNNLHLIADHLGWFGEPGSVEDFLAARGEEVKRGSVDTLNLTLEDLAGRKP

SEQ ID NO: 58227 - protein, 143 aa, Glycine max
  peptide (1)..(143): Ceres Seq. ID no. 15221348
MTHTNPIKPVCEDVENNEADTLKSSPNPDEVATSISVNETSSVKFSAKSSLKTSSRHDLAMVFTCKVCETRSIKTACRESYEKGVVVARCGGCNNLHLIADHLGWFGEPGSVEDFLAARGEEVKRGSVDTLNLTLEDLAGRKP

SEQ ID NO: 58228 - DNA, 1150 bp, Glycine max
  misc_feature (1)..(1150): Ceres Seq. ID no. 14316408
atattcatctcagttcaaaggtttgtttctctcctattatcgatttgcctaacttgtattgttttttgtcgaaaccatcacactttacaactcaactattatgattttcctgttgtttatcccttcatcttattcatctttcatggaggaccacaccccatttctctagcactgattaaacaataatctttgatttttttggtcctccggtcatccttgatgtgttcacaggagtggctagtatagaagaaccataagcactgagggaaaaagtgattagtactttagccaacaaattaaaaatggctgtcaccaaggtctacattgtgtattactccttatatggacatgtagacaccatggctagagaagtacacagaggggctgctacagttgaaggtgttgaagcaacactttggagggtacctgagatgctttcggaactaatattggataagttgaaggcccctcctaaaccaaatgatgtaccagacataatgccagaacaatttgtggaggctgatggtttgatatttggttttccttctcgttttgggatgatgccgagccagctcaaggccttctttgatgcaactagtgagctatgggcatcccaagcacttgccggcaaacctgctggaatcttctggagtactggtttttatggtggaggccaagaactatcagcattgacagctataactcaattagctcatcatggtatgctttttgttcctcttggatacacctttggaagtggcatgtttgagatagatgaggtaaaaggaggatctgcatatggtgctggaacttttgcaggagatggatctcgtcaacctacagaactagaactgcagcaggcattttaccagggtaaatatcttgccgaagtaacaaaaaagctgaaaagctaacttctctgcctaacaaatacatgacaggatactatgaactgtgatgtgctacattatctataacatttgattgaagactcgatgattatttttaccggtaagacaagatagaaagacctcatgtggcttttctttttctgggttctgttgttgcaacaatgtatatcttctgttatctctttcagaaaactctcaaattattccaatgaaatgataaacaagatattcagttttcc

SEQ ID NO: 58229 - protein, 203 aa, Glycine max
  peptide (1)..(203): Ceres Seq. ID no. 14316409
MAVTKVYIVYYSLYGHVDTMAREVHRGAATVEGVEATLWRVPEMLSELILDKLKAPPKPNDVPDIMPEQFVEADGLIFGFPSRFGMMPSQLKAFFDATSELWASQALAGKPAGIFWSTGFYGGGQELSALTAITQLAHHGMLFVPLGYTFGSGMFEIDEVKGGSAYGAGTFAGDGSRQPTELELQQAFYQGKYLAEVTKKLKS

SEQ ID NO: 58230 - protein, 184 aa, Glycine max
  peptide (1)..(184): Ceres Seq. ID no. 14316410
MAREVHRGAATVEGVEATLWRVPEMLSELILDKLKAPPKPNDVPDIMPEQFVEADGLIFGFPSRFGMMPSQLKAFFDATSELWASQALAGKPAGIFWSTGFYGGGQELSALTAITQLAHHGMLFVPLGYTFGSGMFEIDEVKGGSAYGAGTFAGDGSRQPTELELQQAFYQGKYLAEVTKKLKS

SEQ ID NO: 58231 - protein, 160 aa, Glycine max
  peptide (1)..(160): Ceres Seq. ID no. 14316411
MLSELILDKLKAPPKPNDVPDIMPEQFVEADGLIFGFPSRFGMMPSQLKAFFDATSELWASQALAGKPAGIFWSTGFYGGGQELSALTAITQLAHHGMLFVPLGYTFGSGMFEIDEVKGGSAYGAGTFAGDGSRQPTELELQQAFYQGKYLAEVTKKLKS

SEQ ID NO: 58232 - DNA, 1423 bp, Glycine max
  misc_feature (1)..(1423): Ceres Seq. ID no. 14315354
gattggagggagtgaagtctttccctccacaagaaaaaaaaatcagaaaaaggaaatgagagattgttggacaccgtgcaaatcaagcactttgcttgttatttcacgcgccctctctccattttgacctccctttcctcttcgttccccactcactgcaacggcgccggagatccgtcgctctcctcctcctcctcctcctcctcctcctcctccgccgcgatgggcgccaattccatgctctccgagtcctctcacgatctcgacgaccagatctcccagctcatgcagtgcaagccactctccgagcaacaggtcagaggtttatgtgagaaggctaaggagattttaatggatgaaagtaatgttcagcctgttaaaagccctgtgacaatttgtggcgatattcatgggcaatttcatgatcttgctgaactgtttcgaattggagggaagtgtccagatactaactacttgtttatgggtgattatgtggaccggggttattattcagttgagactgtatcgctccttgtggcactgaaagttcggtatccccagcgaattactattcttagaggaaaccatgaaagccgtcagattactcaagtatatggattttatgatgaatgccttagaaagtatggtaatgctaatgtttggaagacctttacagacctttttgatttttttccattgactgcattggttgaatctgaaatattctgtttgcatggtggactgtcaccttcaattgagacccttgataacataaggaactttgatcgtgttcaagaggttcctcatgaaggccccatgtgtgatctattgtggtctgacccagatgacagatgtggctggggaatttctcctcgtggtgctggatatacttttggccaggatatatctgaacaattcaatcacactaacagccttaaattgattgctagagctcatcagcttgttatggatggatttaactgggctcatgaacaaaaggtggttaccatttttagtgcacctaactactgttaccgatgtgggaacatggcttccatattggaggttgatgattgcaagggtcacacattcatccagtttgaacctgctcctaggagaggagaacctgatgtcactcgtagaacgcctgattacttcttataatgtagctgttgaatgtcatactgttatatcatggttacctctactgcactaatttcaggcaggtaacattccactgattacactcgaggaattgctggacaccttgtctggagaagtcgccaagatgatgtcataatacgtattgttccagcaaaatgtggtcttttttttttttttttcgtgtttattttttgtatcttatgttcagtaactcccttttatggctttacaagctatatgactggattttgttggtcgc

SEQ ID NO: 58233 - protein, 313 aa, Glycine max
  peptide (1)..(313): Ceres Seq. ID no. 14315355
MGANSMLSESSHDLDDQISQLMQCKPLSEQQVRGLCEKAKEILMDESNVQPVKSPVTICGDIHGQFHDLAELFRIGGKCPDTNYLFMGDYVDRGYYSVETVSLLVALKVRYPQRITILRGNHESRQITQVYGFYDECLRKYGNANVWKTFTDLFDFFPLTALVESEIFCLHGGLSPSIETLDNIRNFDRVQEVPHEGPMCDLLWSDPDDRCGWGISPRGAGYTFGQDISEQFNHTNSLKLIARAHQLVMDGFNWAHEQKVVTIFSAPNYCYRCGNMASILEVDDCKGHTFIQFEPAPRRGEPDVTRRTPDYFL

SEQ ID NO: 58234 - protein, 308 aa, Glycine max
  peptide (1)..(308): Ceres Seq. ID no. 14315356
MLSESSHDLDDQISQLMQCKPLSEQQVRGLCEKAKEILMDESNVQPVKSPVTICGDIHGQFHDLAELFRIGGKCPDTNYLFMGDYVDRGYYSVETVSLLVALKVRYPQRITILRGNHESRQITQVYGFYDECLRKYGNANVWKTFTDLFDFFPLTALVESEIFCLHGGLSPSIETLDNIRNFDRVQEVPHEGPMCDLLWSDPDDRCGWGISPRGAGYTFGQDISEQFNHTNSLKLIARAHQLVMDGFNWAHEQKVVTIFSAPNYCYRCGNMASILEVDDCKGHTFIQFEPAPRRGEPDVTRRTPDYFL

SEQ ID NO: 58235 - protein, 292 aa, Glycine max
  peptide (1)..(292): Ceres Seq. ID no. 14315357
MQCKPLSEQQVRGLCEKAKEILMDESNVQPVKSPVTICGDIHGQFHDLAELFRIGGKCPDTNYLFMGDYVDRGYYSVETVSLLVALKVRYPQRITILRGNHESRQITQVYGFYDECLRKYGNANVWKTFTDLFDFFPLTALVESEIFCLHGGLSPSIETLDNIRNFDRVQEVPHEGPMCDLLWSDPDDRCGWGISPRGAGYTFGQDISEQFNHTNSLKLIARAHQLVMDGFNWAHEQKVVTIFSAPNYCYRCGNMASILEVDDCKGHTFIQFEPAPRRGEPDVTRRTPDYFL

SEQ ID NO: 58236 - DNA, 1228 bp, Glycine max
  misc_feature (1)..(1228): Ceres Seq. ID no. 13594412
attttaactcaaaacatagaattgttgaaggaacaaaacgtgtgtgtctgtcttacaaggtttagtagtgactatggagcagagcattggtggacaatctagcatacaatgcatatttctacgcaaggactgcttctcctcaaagctcgcgtctcttccaacttctccttccgagatgccctttggtcacaaccgttggtttcgcaggttgtcggtttttccacgtttgcaactatgtcaagggctgagaaagggtttctccaaaaacatggcttgcagtgtcagtgtggataattgtgatacggttcatccagcaacagatgcttatgctggagaggcagttgaagctttgaaagctgggaaagtcattgcagtaccaactgatacactctatggatttgcttgtgatgcttgctcaatggaagcagttaacagaatttatgagattaaaggccgtagacatacaagcccagtggctatttgtgtcggtgacgtatcagatatagcccgttttgctgtcactgaccatttacctcatggtctgcttgattccctcctacctgggcctgttacagttgttctaaaacgaggggattcaagtattcttgaacgatctttgaacccaggatttgatagtataggagttagagtgcctgattgcaatttcatcaggatcattgcccgtggttcaggaactgccctagcccttaccagtgcaaacctaagtggccagccaagtagtctttccatcaaagattttgagaacctctgggaacactgtgcttttgtttatgatggtggtttgattccatcaagtcgtgcaggttcaacaattgtggacctcaccacaccacacaaatacagaatacttagacctggaagtgcaaaggaagagacagttgccatcttggagaagcattctttcgttgaggcagagaccacgtaacataagttgtgattcatttgcagtgtcacgttctagctaggcctaatgtttcacttgcaaaaaaaaaaacgcgttataaatgtatggtcattatgcttcaactaagttattctattctatttccattaatagcatagcaatacattcatataaaacttctatctagagcacgtgctatggaattgttgagaaactagtaaaatccaattctatgaatcatttgatgtatggatagcattattgttataatgaaaaaccaatcattactgcagggaatatttg

SEQ ID NO: 58237 - protein, 290 aa, Glycine max
  peptide (1)..(290): Ceres Seq. ID no. 13594413
MEQSIGGQSSIQCIFLRKDCFSSKLASLPTSPSEMPFGHNRWFRRLSVFPRLQLCQGLRKGFSKNMACSVSVDNCDTVHPATDAYAGEAVEALKAGKVIAVPTDTLYGFACDACSMEAVNRIYEIKGRRHTSPVAICVGDVSDIARFAVTDHLPHGLLDSLLPGPVTVVLKRGDSSILERSLNPGFDSIGVRVPDCNFIRIIARGSGTALALTSANLSGQPSSLSIKDFENLWEHCAFVYDGGLIPSSRAGSTIVDLTTPHKYRILRPGSAKEETVAILEKHSFVEAETT

SEQ ID NO: 58238 - protein, 256 aa, Glycine max
  peptide (1)..(256): Ceres Seq. ID no. 13594414
MPFGHNRWFRRLSVFPRLQLCQGLRKGFSKNMACSVSVDNCDTVHPATDAYAGEAVEALKAGKVIAVPTDTLYGFACDACSMEAVNRIYEIKGRRHTSPVAICVGDVSDIARFAVTDHLPHGLLDSLLPGPVTVVLKRGDSSILERSLNPGFDSIGVRVPDCNFIRIIARGSGTALALTSANLSGQPSSLSIKDFENLWEHCAFVYDGGLIPSSRAGSTIVDLTTPHKYRILRPGSAKEETVAILEKHSFVEAETT

SEQ ID NO: 58239 - protein, 225 aa, Glycine max
  peptide (1)..(225): Ceres Seq. ID no. 13594415
MACSVSVDNCDTVHPATDAYAGEAVEALKAGKVIAVPTDTLYGFACDACSMEAVNRIYEIKGRRHTSPVAICVGDVSDIARFAVTDHLPHGLLDSLLPGPVTVVLKRGDSSILERSLNPGFDSIGVRVPDCNFIRIIARGSGTALALTSANLSGQPSSLSIKDFENLWEHCAFVYDGGLIPSSRAGSTIVDLTTPHKYRILRPGSAKEETVAILEKHSFVEAETT

SEQ ID NO: 58240 - DNA, 559 bp, Glycine max
  misc_feature (1)..(559): Ceres Seq. ID no. 12608605
attgcaggctcgtagttgtagtgcgaggggacgagttgtttgttcgttaacagttagttaggatggcgagcggtggaaaggtttcgttcaaagtaaccctcacctccgatccaaagcttcccttcaaagtgttcagcgttccagaggctgcacctttcactgccgttctgaaatttgcagcagaagaattcaaagtgcctccccagaccagcgccatcatcaccaatgatggtgttgggataaatcctcagcaaagtgcaggtaatgtcttccttaagcatggttcagagctacgtctgattcctcgtgatagggtcggtgcatatgagatgtttcgagatatctgattagtggctaattaccttcttcattatttatctcgaggagtgtagcttaataaacaccagtattacactattactgatatcatgtagtaattgatttatcggtgtccctatgagataaattttatgtgaataatgaatacatatttgggaaaatgatatatatgtagtcttccctcctttgaacttttaatttatttctgatttttgtcggt

SEQ ID NO: 58241 - protein, 94 aa, Glycine max
  peptide (1)..(94): Ceres Seq. ID no. 12608606
MASGGKVSFKVTLTSDPKLPFKVFSVPEAAPFTAVLKFAAEEFKVPPQTSAIITNDGVGINPQQSAGNVFLKHGSELRLIPRDRVGAYEMFRDI

SEQ ID NO: 58242 - DNA, 1918 bp, Glycine max
  misc_feature (1)..(1918): Ceres Seq. ID no. 14315317
aaaatcttcattgcttcctcactcaccggcgcctactcatatcacagatcatagataaataataccaatacttcatagtattcacgaaccattctatttccattcggcagcaacaaaatcaccatccttcttctgcaccgcaatgctcttcctcttccctccgtcattagtttgttagttagattacccttttcccttccatgcttacgtcaccaccgctcaccattcactctctttttacccctaaaccattgaatcgatctaaatctctcccaaatcgcaaaccccttttgctcaattgagtcaattctctccctaagttcctctgtcggcgtctgggtgggtaaaagttgttgttttgtcttctgggttttggagcaaagacaaaagatgggtgagggagaacgtttccagcttgggactgtgggtgcgttgactctttctgtggtctcatctgtgtccattgtgatttgcaataaggcgctgatgagttcactgcatttcattttcgctacaactttgaccagctggcatctgcttgtcacgttttgttcccttcatgtggcgctcaaaatgagattctttgagcacaaaccttttgagcagaaagctgtaatgggattcgggattttaaatgggatctcaattggacttttaaatttgagcctggggttcaattccgttggcttctatcaaatgactaagctggcaatcattccttgtactgtattgttggagaccatttttcttgggaagagattcagtaagagaattcaatttgccctcagtatcctccttttgggtgtcgggattgctactgtcacagatttgcagctcaatgctctgggctctttcttatcttttcttgcagtgattacaacttgtgttgctcagattatgacaaatactatccagaagaagtacaaggtttcttccacccagcttctgtatcaatcatgtccatatcaagcagcaaccctgttaatcgctggtccatatctggataaacttttgaccaaccaaaatgtatttggtttcaagtatacgacacaagtgacggttttcataattctttcctgccttatctccatctctgtcaatttcagtacgttccttgttattggaaagacatctccagtcacctatcaggttcttggacacctgaagacatgccttgtattggcatttggttatatacttctccgagacccatttagctggagaaacatactgggtattttgatagccatgattgggatgattctatattcttactattgcactctcgagaatcagcaaaaaactgttgaagctgcatcacaatcatcccaggcaagagaagatgaatctgatcctctgatgaatgtggaaaatggaagtgcagttgtgagttctaatgtcggacaaagacaaatgtcccctgtatggagcaagagcaaagactagtatgtttaatgggctttgttttagcattgtcaagaacagttttatagtccctatagagggttaacacccgtaatccatgaggaattagaaagtggaagtgctgccaaacacatgtcctagtcatttttaatagctttagtctaatatttttatgaatcgtttgccgaccaacagtattagggaagggaacaagcacatggtcatgtcgtaattctattggccaacaaatatgtcttatagtaacatacatctcctggtgatgttttcatatcatgatacatttatgattttatatagatattcaaactttttcttggcttgaatagcatataaacacctactggtaattctttttctcccttattatctctatttgtattcctatactaatagtagtaatttattcaagtccatttttttattttagaaactgaacttattcgaagcatgaggaccacattatattgttttc

SEQ ID NO: 58243 - protein, 351 aa, Glycine max
  peptide (1)..(351): Ceres Seq. ID no. 14315318
MGEGERFQLGTVGALTLSVVSSVSIVICNKALMSSLHFIFATTLTSWHLLVTFCSLHVALKMRFFEHKPFEQKAVMGFGILNGISIGLLNLSLGFNSVGFYQMTKLAIIPCTVLLETIFLGKRFSKRIQFALSILLLGVGIATVTDLQLNALGSFLSFLAVITTCVAQIMTNTIQKKYKVSSTQLLYQSCPYQAATLLIAGPYLDKLLTNQNVFGFKYTTQVTVFIILSCLISISVNFSTFLVIGKTSPVTYQVLGHLKTCLVLAFGYILLRDPFSWRNILGILIAMIGMILYSYYCTLENQQKTVEAASQSSQAREDESDPLMNVENGSAVVSSNVGQRQMSPVWSKSKD

SEQ ID NO: 58244 - protein, 319 aa, Glycine max
  peptide (1)..(319): Ceres Seq. ID no. 14315319
MSSLHFIFATTLTSWHLLVTFCSLHVALKMRFFEHKPFEQKAVMGFGILNGISIGLLNLSLGFNSVGFYQMTKLAIIPCTVLLETIFLGKRFSKRIQFALSILLLGVGIATVTDLQLNALGSFLSFLAVITTCVAQIMTNTIQKKYKVSSTQLLYQSCPYQAATLLIAGPYLDKLLTNQNVFGFKYTTQVTVFIILSCLISISVNFSTFLVIGKTSPVTYQVLGHLKTCLVLAFGYILLRDPFSWRNILGILIAMIGMILYSYYCTLENQQKTVEAASQSSQAREDESDPLMNVENGSAVVSSNVGQRQMSPVWSKSKD

SEQ ID NO: 58245 - protein, 290 aa, Glycine max
  peptide (1)..(290): Ceres Seq. ID no. 14315320
MRFFEHKPFEQKAVMGFGILNGISIGLLNLSLGFNSVGFYQMTKLAIIPCTVLLETIFLGKRFSKRIQFALSILLLGVGIATVTDLQLNALGSFLSFLAVITTCVAQIMTNTIQKKYKVSSTQLLYQSCPYQAATLLIAGPYLDKLLTNQNVFGFKYTTQVTVFIILSCLISISVNFSTFLVIGKTSPVTYQVLGHLKTCLVLAFGYILLRDPFSWRNILGILIAMIGMILYSYYCTLENQQKTVEAASQSSQAREDESDPLMNVENGSAVVSSNVGQRQMSPVWSKSKD

SEQ ID NO: 58246 - protein, 249 aa, Glycine max
  peptide (1)..(249): Ceres Seq. ID no. 14315321
MTKLAIIPCTVLLETIFLGKRFSKRIQFALSILLLGVGIATVTDLQLNALGSFLSFLAVITTCVAQIMTNTIQKKYKVSSTQLLYQSCPYQAATLLIAGPYLDKLLTNQNVFGFKYTTQVTVFIILSCLISISVNFSTFLVIGKTSPVTYQVLGHLKTCLVLAFGYILLRDPFSWRNILGILIAMIGMILYSYYCTLENQQKTVEAASQSSQAREDESDPLMNVENGSAVVSSNVGQRQMSPVWSKSKD

SEQ ID NO: 58247 - DNA, 1097 bp, Glycine max
  misc_feature (1)..(1097): Ceres Seq. ID no. 14305259
gattcctcttcattcttcaataactccaatgtattccttagctcaacacaagtatacaccaaacttccaccaccaagtttgcaagaaccatccaccccgtcacccgtctcgagtacattgttctaccacaaccactaccaccaccacctctaggtctaagtccaatgctaagtcattggtcattgagacccggctcgtgccggtgccgccaatgccaacggtcgttaccactgagatccaccgtccaatgaacaatgacccaagtttgcaatcaacatggtctcatagagcttgggtggcagctggatgctcaactttggtcatttccttgggagagtccataaagggtgctattgatttgaacatgtgggttgagcccattgtggcaggttgggttggatacatcttagctgatcttggatcaggggtttaccattgggccatcgacaattatggcgatggctcaaccccaatagttggggctcaaattgaagcctttcaaggccaccacaagtggccttggaccatcactaggcgtcaatttgctaacaatttacatgcattggcacgtgcagtgaccttggcagtgcttcctgtagtccttctttgccatgaccctattgttgaaggatttgttgtggtgtgctcaggttgcatcatgtttagccaacagtttcatgcatggtcacatggcactaagagccggcttccgccactcgtggtggcattacaagaggccggcgtgctcgtgtcacggtggcaacatgccgcacaccaccgggcaccatataacaataactattgtatagtgagtggagtgtggaatgagtttttggataagcataaggtctttgaagccatggaaatggtattgtattttaaaacaggagttaggccaaggtcatggagtgaacctgcccctgagtgggttgaggagattgagactccttctcaaatccaaatccaaacccaatgaatgatgtttattctcttctccatttatttttaaaccatttataacacacatgtgtcaatgtagcttttgggtaatgtaaattacattatatttaaattataaagcttgaaaggttaaatac

SEQ ID NO: 58248 - protein, 324 aa, Glycine max
  peptide (1)..(324): Ceres Seq. ID no. 14305260
IPLHSSITPMYSLAQHKYTPNFHHQVCKNHPPRHPSRVHCSTTTTTTTTSRSKSNAKSLVIETRLVPVPPMPTVVTTEIHRPMNNDPSLQSTWSHRAWVAAGCSTLVISLGESIKGAIDLNMWVEPIVAGWVGYILADLGSGVYHWAIDNYGDGSTPIVGAQIEAFQGHHKWPWTITRRQFANNLHALARAVTLAVLPVVLLCHDPIVEGFVVVCSGCIMFSQQFHAWSHGTKSRLPPLVVALQEAGVLVSRWQHAAHHRAPYNNNYCIVSGVWNEFLDKHKVFEAMEMVLYFKTGVRPRSWSEPAPEWVEEIETPSQIQIQTQ

SEQ ID NO: 58249 - protein, 315 aa, Glycine max
  peptide (1)..(315): Ceres Seq. ID no. 14305261
MYSLAQHKYTPNFHHQVCKNHPPRHPSRVHCSTTTTTTTTSRSKSNAKSLVIETRLVPVPPMPTVVTTEIHRPMNNDPSLQSTWSHRAWVAAGCSTLVISLGESIKGAIDLNMWVEPIVAGWVGYILADLGSGVYHWAIDNYGDGSTPIVGAQIEAFQGHHKWPWTITRRQFANNLHALARAVTLAVLPVVLLCHDPIVEGFVVVCSGCIMFSQQFHAWSHGTKSRLPPLVVALQEAGVLVSRWQHAAHHRAPYNNNYCIVSGVWNEFLDKHKVFEAMEMVLYFKTGVRPRSWSEPAPEWVEEIETPSQIQIQTQ

SEQ ID NO: 58250 - protein, 254 aa, Glycine max
  peptide (1)..(254): Ceres Seq. ID no. 14305262
MPTVVTTEIHRPMNNDPSLQSTWSHRAWVAAGCSTLVISLGESIKGAIDLNMWVEPIVAGWVGYILADLGSGVYHWAIDNYGDGSTPIVGAQIEAFQGHHKWPWTITRRQFANNLHALARAVTLAVLPVVLLCHDPIVEGFVVVCSGCIMFSQQFHAWSHGTKSRLPPLVVALQEAGVLVSRWQHAAHHRAPYNNNYCIVSGVWNEFLDKHKVFEAMEMVLYFKTGVRPRSWSEPAPEWVEEIETPSQIQIQTQ

SEQ ID NO: 58251 - DNA, 1860 bp, Glycine max
  misc_feature (1)..(1860): Ceres Seq. ID no. 14316424
tcttccattcatttgcatctcattctgaatcttgcgccgtttccctctcccactcgccagtgttgcggaattttttagaagtgtgaatgttcgttcatgcatgagcggctcttaaagtttccttgcggattcgattgcgatatattgagactgcgatggcctcagccgtcgtgaatttcttgaacgcgacgttggattgggtgacgtttgcgtcggatggtccttctgcgcgagctgtagttttcggagtccatatcggtggacatttgtttatcgaagtgtttttgctagttgtcatacttttcttgctttcacagaaaagttacaagcctcctaaaaggcctttaacaaataaggaaattgatgagttatgtgacgaatgggttccggaaccccttattccttctcttaataaagagttgcagtatgaaccaccagtgctggagagtgctgctgggccacataccataattaatggcaaagaagttgtcaattttgcttcagcaaactatcttgggtttataggtcatccaaagctacttgactcatgttcttctgctttagcgaaatacggtgttggttcttgtggtccccgtggattttatgggacaattgatgtccaccttgactgtgaagcaagaatagcaaaatttttaggaacccctgaatcaattctgtactcttatggactttccaccatgttcagtgcaattcccgctttctctaaaaaaggagatgtaattgtggcggatgagggagtccgctggggaatacagaatggcctttatctttctagaagcacagtggtgtattttaagcacaatgacatggattctttaagagaaactctagagaacattactgccaaatataagaaggccaagaatttgaggcgttatattgttattgaagctgtctaccagaattctggggaaatagcacccttggacgagatcattaaattgaaggaaaaatatcgctttcgtgttttgctagatgagagcaactcattgggtgtgcttggaagttctggaagaggtctcactgaatactgtggagttccagttgagaagatagacattataactgcttctatgggacatgcattggccacagaaggaggattctgcactggaagtacaagagttatagatcaccaacgattgagtagctctggttatgtcttttctgcttctttgcccccatatcttgcaagtgctgcaattacagctattgatgtcctggaggaaaatcccaatctgataaaaaagctgaagaaaaatattgcttttttaagaaaaggattgtcaaaaataccaggcatcacaattacaagtaatccagagtcacctattgtttatttgagattagagaaatcaagaggttccatgaaagatgacctgcatctgcttgaaaatatcgcggaacgggttttgaaagaagaatctgtatttgtggttgtttccaaaagatcaacattggacaaatgccgtttgcctgtgggaattagattgtttgtttctgctgggcattcagagtctgatctgctcaaggcatctgaatcattgaaaaaggttgtagcatcagtcctgggtggtcagaattgaacgctctacatctttctttttcatctaatgtaccaaaacataagttcgattccatgtgtttaggtgagcaattttgaaatccaggcgatagagaaagtcccgtagttcttaatttgtgtagtattttatgttccagtttagggtaacagtattttgtgcgtgttgctcattggttgtctaaagtagtagaataaggatttaatgtttcttgtcatgagttggggaatatacctatgaattacattccgatatc

SEQ ID NO: 58252 - protein, 483 aa, Glycine max
  peptide (1)..(483): Ceres Seq. ID no. 14316425
MASAVVNFLNATLDWVTFASDGPSARAVVFGVHIGGHLFIEVFLLVVILFLLSQKSYKPPKRPLTNKEIDELCDEWVPEPLIPSLNKELQYEPPVLESAAGPHTIINGKEVVNFASANYLGFIGHPKLLDSCSSALAKYGVGSCGPRGFYGTIDVHLDCEARIAKFLGTPESILYSYGLSTMFSAIPAFSKKGDVIVADEGVRWGIQNGLYLSRSTVVYFKHNDMDSLRETLENITAKYKKAKNLRRYIVIEAVYQNSGEIAPLDEIIKLKEKYRFRVLLDESNSLGVLGSSGRGLTEYCGVPVEKIDIITASMGHALATEGGFCTGSTRVIDHQRLSSSGYVFSASLPPYLASAAITAIDVLEENPNLIKKLKKNIAFLRKGLSKIPGITITSNPESPIVYLRLEKSRGSMKDDLHLLENIAERVLKEESVFVVVSKRSTLDKCRLPVGIRLFVSAGHSESDLLKASESLKKVVASVLGGQN

SEQ ID NO: 58253 - protein, 302 aa, Glycine max
  peptide (1)..(302): Ceres Seq. ID no. 14316426
MFSAIPAFSKKGDVIVADEGVRWGIQNGLYLSRSTVVYFKHNDMDSLRETLENITAKYKKAKNLRRYIVIEAVYQNSGEIAPLDEIIKLKEKYRFRVLLDESNSLGVLGSSGRGLTEYCGVPVEKIDIITASMGHALATEGGFCTGSTRVIDHQRLSSSGYVFSASLPPYLASAAITAIDVLEENPNLIKKLKKNIAFLRKGLSKIPGITITSNPESPIVYLRLEKSRGSMKDDLHLLENIAERVLKEESVFVVVSKRSTLDKCRLPVGIRLFVSAGHSESDLLKASESLKKVVASVLGGQN

SEQ ID NO: 58254 - protein, 259 aa, Glycine max
  peptide (1)..(259): Ceres Seq. ID no. 14316427
MDSLRETLENITAKYKKAKNLRRYIVIEAVYQNSGEIAPLDEIIKLKEKYRFRVLLDESNSLGVLGSSGRGLTEYCGVPVEKIDIITASMGHALATEGGFCTGSTRVIDHQRLSSSGYVFSASLPPYLASAAITAIDVLEENPNLIKKLKKNIAFLRKGLSKIPGITITSNPESPIVYLRLEKSRGSMKDDLHLLENIAERVLKEESVFVVVSKRSTLDKCRLPVGIRLFVSAGHSESDLLKASESLKKVVASVLGGQN

SEQ ID NO: 58255 - DNA, 1146 bp, Glycine max
  misc_feature (1)..(1146): Ceres Seq. ID no. 12608505
cgaaaaatactagaaaatctatctatgattatgagagcgtagttgaaagcaacgactgaaatcgagagggagacgaaaagtttagatcgagagagatgggaaaggagagtagcaaagatacggttccggtgacgcagtggctgaatcgaatggtctcagaaccttactacctcttccatttcttaaccttcttctcctatttcgtcgttcgcagctccgcaacccaaatcttagcgcctcatctcactcaccatctccttcgtcgcgaaatacaaacactgctagtgttcgcgatattggctttcatcaagggaataaaagaagaaacatgggaagcctttatagctgatgtgcttttcctggccaagatttgtctttttctcctagcctttacaatggatcgccgcttagccgtttggtatattcttgtatttttagtgatacatatgttaacacaacaacctccattccaaggactaggtacgtctagcaagctaacaccgttgcagttggaaagcctgctgacagagggaacaactacaagattgtggctggtggaattccgttcttcatattcacctgcttgcattcgctcaagtcagcagtttcctgagctctcaattacatattcaagcaaaaatttatcatttggaatagttgatcttggtctctttcccaatgctgctgaaagatttggaatatctctaagtggaagcatgggccagcttccaacatttatcttatttgagaatgcagctgaagttgcccgctttcctgagttggattttgaagctgcatattttcaccctaaaattacaaaggggcttctttctcgacattttgagcttgatcggcaccttctcgaatatgttagtggtaaataggatgttagtggagcaagttgtccgaaatttagtcatcactgagaatggcaattttggatttccggatatctgaggaggacattttcgtaaatgaactttgaaagttaacgtttgtttaacaccatcacacaagggtcaaagtaatgtcttcagacaacgggggtgtatgtgtaattagattaaatctcaataggtgttattataatttgttctttattttataatctatcatcggttctaagtgaaagtcaaaaaatttggc

SEQ ID NO: 58256 - protein, 262 aa, Glycine max
  peptide (1)..(262): Ceres Seq. ID no. 12608506
MGKESSKDTVPVTQWLNRMVSEPYYLFHFLTFFSYFVVRSSATQILAPHLTHHLLRREIQTLLVFAILAFIKGIKEETWEAFIADVLFLAKICLFLLAFTMDRRLAVWYILVFLVIHMLTQQPPFQGLGTSSKLTPLQLESLLTEGTTTRLWLVEFRSSYSPACIRSSQQFPELSITYSSKNLSFGIVDLGLFPNAAERFGISLSGSMGQLPTFILFENAAEVARFPELDFEAAYFHPKITKGLLSRHFELDRHLLEYVSGK

SEQ ID NO: 58257 - protein, 244 aa, Glycine max
  peptide (1)..(244): Ceres Seq. ID no. 12608507
MVSEPYYLFHFLTFFSYFVVRSSATQILAPHLTHHLLRREIQTLLVFAILAFIKGIKEETWEAFIADVLFLAKICLFLLAFTMDRRLAVWYILVFLVIHMLTQQPPFQGLGTSSKLTPLQLESLLTEGTTTRLWLVEFRSSYSPACIRSSQQFPELSITYSSKNLSFGIVDLGLFPNAAERFGISLSGSMGQLPTFILFENAAEVARFPELDFEAAYFHPKITKGLLSRHFELDRHLLEYVSGK

SEQ ID NO: 58258 - protein, 162 aa, Glycine max
  peptide (1)..(162): Ceres Seq. ID no. 12608508
MDRRLAVWYILVFLVIHMLTQQPPFQGLGTSSKLTPLQLESLLTEGTTTRLWLVEFRSSYSPACIRSSQQFPELSITYSSKNLSFGIVDLGLFPNAAERFGISLSGSMGQLPTFILFENAAEVARFPELDFEAAYFHPKITKGLLSRHFELDRHLLEYVSGK

SEQ ID NO: 58259 - DNA, 1554 bp, Glycine max
  misc_feature (1)..(1554): Ceres Seq. ID no. 15171156
gtatcttccatttgaaaacagcattgtgttgttacctacccccattcattcactcaccaacaccaaacaaacaagtccctgctggtggcggacactccgagggcctctcccctcttcctctccacagtataaaacccaaaactcacacaacccgacccatcacgcaagacaaaagcgcgctcttgtgttccgtttccgtttgtttctgttttctttctctttcagatctcgaaaaatgcagagcgcggctttcactttctctccctctctccctctccgcaacccttcccctaactattggaggagaccttctctctccctccgtctctcggccaaacacggcaacagcaacagcgatgacgtgaactccaatggcgtttcttcaactttcttcactcgccgatcttggactcttcctccttcctcttccttcaagttcaggcctctccctccccgcgccgccgaaagcgccgttcccgaaagtgcgcccgtcgaaaacccgctcttcaaaactctcgaactcggcgccttgtttggcctctggtacctcttcaacatctacttcaacatctacaacaaacaggtgttgaaggcgtttcattacccggtaactgtgactgttgttcagtttgctgttgggactgtgctcgtggcatttatgtggggtttgaatctctataagaggcctaaactcagtggtgctatgcttggagcgattttgccgctggctgcagtgcatactttggggaaccttttcactaatatgagtcttggaaaggtggctgtgtctttcactcacactatcaaagccatggagcctttcttttcagtggtcctttctgccatgttccttggagagtttcctacaccgtgggtggttgattctcttgtgcctattgttggtggagttgcactggcatctgttacagaggcctctttcaattgggctggattttggagtgcaatggcatccaatgtgacaaatcaatctcgtaatgttcttagcaaaaaggccatggttaataaagaggattctatggacaacattactctcttctctatcataacagtaatgtccttcttcttgttagcacctgtggctatcttcatggagggtgtcaaatttactcctgcttacttgcaatctgctggggtgaatgttagacaactttacatcagatctcttcttgctgcactctgtttccatgcgtatcaacaagtttcttatatgatattgcaaagggtatcacctgttacccactccgtgggcaactgtgtgaagcgggttgtggtcattgtgagctctgtcatcttcttccaaacacctgtctcacctgtgaatgcttttggaactgctatagctcttgctggcgttttcctctattcaagggtgaagcgtattaaggcaaagccaaaaacagcttaattttcaattgtaaaattttgttagttgcatcacggaagccaaatagttgcaatctgcaattctgaatttctttgtaggcgagatagggaatttgaagattatctttattgatccttacattttccttt

SEQ ID NO: 58260 - protein, 474 aa, Glycine max
  peptide (1)..(474): Ceres Seq. ID no. 15171157
YLPFENSIVLLPTPIHSLTNTKQTSPCWWRTLRGPLPSSSPQYKTQNSHNPTHHARQKRALVFRFRLFLFSFSFRSRKMQSAAFTFSPSLPLRNPSPNYWRRPSLSLRLSAKHGNSNSDDVNSNGVSSTFFTRRSWTLPPSSSFKFRPLPPRAAESAVPESAPVENPLFKTLELGALFGLWYLFNIYFNIYNKQVLKAFHYPVTVTVVQFAVGTVLVAFMWGLNLYKRPKLSGAMLGAILPLAAVHTLGNLFTNMSLGKVAVSFTHTIKAMEPFFSVVLSAMFLGEFPTPWVVDSLVPIVGGVALASVTEASFNWAGFWSAMASNVTNQSRNVLSKKAMVNKEDSMDNITLFSIITVMSFFLLAPVAIFMEGVKFTPAYLQSAGVNVRQLYIRSLLAALCFHAYQQVSYMILQRVSPVTHSVGNCVKRVVVIVSSVIFFQTPVSPVNAFGTAIALAGVFLYSRVKRIKAKPKTA

SEQ ID NO: 58261 - protein, 396 aa, Glycine max
  peptide (1)..(396): Ceres Seq. ID no. 15171158
MQSAAFTFSPSLPLRNPSPNYWRRPSLSLRLSAKHGNSNSDDVNSNGVSSTFFTRRSWTLPPSSSFKFRPLPPRAAESAVPESAPVENPLFKTLELGALFGLWYLFNIYFNIYNKQVLKAFHYPVTVTVVQFAVGTVLVAFMWGLNLYKRPKLSGAMLGAILPLAAVHTLGNLFTNMSLGKVAVSFTHTIKAMEPFFSVVLSAMFLGEFPTPWVVDSLVPIVGGVALASVTEASFNWAGFWSAMASNVTNQSRNVLSKKAMVNKEDSMDNITLFSIITVMSFFLLAPVAIFMEGVKFTPAYLQSAGVNVRQLYIRSLLAALCFHAYQQVSYMILQRVSPVTHSVGNCVKRVVVIVSSVIFFQTPVSPVNAFGTAIALAGVFLYSRVKRIKAKPKTA

SEQ ID NO: 58262 - protein, 255 aa, Glycine max
  peptide (1)..(255): Ceres Seq. ID no. 15171159
MWGLNLYKRPKLSGAMLGAILPLAAVHTLGNLFTNMSLGKVAVSFTHTIKAMEPFFSVVLSAMFLGEFPTPWVVDSLVPIVGGVALASVTEASFNWAGFWSAMASNVTNQSRNVLSKKAMVNKEDSMDNITLFSIITVMSFFLLAPVAIFMEGVKFTPAYLQSAGVNVRQLYIRSLLAALCFHAYQQVSYMILQRVSPVTHSVGNCVKRVVVIVSSVIFFQTPVSPVNAFGTAIALAGVFLYSRVKRIKAKPKTA

SEQ ID NO: 58263 - DNA, 1292 bp, Glycine max
  misc_feature (1)..(1292): Ceres Seq. ID no. 14316440
acatactcatcaggacagattcaagggagatggatgatgaaattgaaaggttcatcaaagtatggatttcagcaatcttatgtctatgttattgttattacatagcttcaagaataccaaagggcttcttgagacttctctccctccttccaattctctacctcttcatcacccttcccttgaaactctcttcacccaccttagttggatacacttccttcttcatttcttggcttggcactttcaagctcttccttttctccttcaaccaaggccctcttgccctatcacccccaaacattgttcaattcatctccattgcttcccttcccatcacccccaaacaaaacccatcaaccaatgaaaaaaacaccaccaacaaacccaaatggcttttgttcctaaaagttcttatttttgtaatgatcttaggtgtttataactacaaagaaaccttgcatcctgatttcttgttagtcatttattgctgccacgtgtaccttgccttagagcttatgttagtccttgttggagccactgttcaaaccctttttggttttgagatagaacctcaattcaacgaaccctacctttgtacatctcttcaagacttttggggtcgtagatggaacctcacggttactcatattctacggcccaccgtatacgaccctatacgccgtatgtctacgagttttgtcggccccttgtgtgccacgtcagctgccatgttggccacgttccttgtgtccgggcttgtgcacgagttattatattattaccttacacgtgtgcctcccacgtgggaggttacgtgtttttttgtgcttcacggtgtgtgtatggtagtggaggtggctgtgaagaaggtggctctccgtcgtgggtggcagctgcaccgtgctgtgtcggggccgctcgtggtggcgcttttggcggtcaccgcgaattggctgttttttcctcaactgttgaggaatggtttggataggaagtccattgaggagtatgctattttggtggattttgttaagtcaaagttaccatttaagaatgtttaacttgctagggcgaacattgttaaaggatatgattgtgagccaaaagtaatgttcactctaaggactaaggatacttaaacattacgtatgtttaacgtgttagggtgcaaaggggctcattttttacttataaaaaataatataactattaaataagacatgttaattttggaaaacaatgagtgtgatcacccaataataaacatctgaagatgtgcaattcaaaagtct

SEQ ID NO: 58264 - protein, 352 aa, Glycine max
  peptide (1)..(352): Ceres Seq. ID no. 14316441
ILIRTDSREMDDEIERFIKVWISAILCLCYCYYIASRIPKGFLRLLSLLPILYLFITLPLKLSSPTLVGYTSFFISWLGTFKLFLFSFNQGPLALSPPNIVQFISIASLPITPKQNPSTNEKNTTNKPKWLLFLKVLIFVMILGVYNYKETLHPDFLLVIYCCHVYLALELMLVLVGATVQTLFGFEIEPQFNEPYLCTSLQDFWGRRWNLTVTHILRPTVYDPIRRMSTSFVGPLCATSAAMLATFLVSGLVHELLYYYLTRVPPTWEVTCFFVLHGVCMVVEVAVKKVALRRGWQLHRAVSGPLVVALLAVTANWLFFPQLLRNGLDRKSIEEYAILVDFVKSKLPFKNV

SEQ ID NO: 58265 - protein, 343 aa, Glycine max
  peptide (1)..(343): Ceres Seq. ID no. 14316442
MDDEIERFIKVWISAILCLCYCYYIASRIPKGFLRLLSLLPILYLFITLPLKLSSPTLVGYTSFFISWLGTFKLFLFSFNQGPLALSPPNIVQFISIASLPITPKQNPSTNEKNTTNKPKWLLFLKVLIFVMILGVYNYKETLHPDFLLVIYCCHVYLALELMLVLVGATVQTLFGFEIEPQFNEPYLCTSLQDFWGRRWNLTVTHILRPTVYDPIRRMSTSFVGPLCATSAAMLATFLVSGLVHELLYYYLTRVPPTWEVTCFFVLHGVCMVVEVAVKKVALRRGWQLHRAVSGPLVVALLAVTANWLFFPQLLRNGLDRKSIEEYAILVDFVKSKLPFKNV

SEQ ID NO: 58266 - protein, 212 aa, Glycine max
  peptide (1)..(212): Ceres Seq. ID no. 14316443
MILGVYNYKETLHPDFLLVIYCCHVYLALELMLVLVGATVQTLFGFEIEPQFNEPYLCTSLQDFWGRRWNLTVTHILRPTVYDPIRRMSTSFVGPLCATSAAMLATFLVSGLVHELLYYYLTRVPPTWEVTCFFVLHGVCMVVEVAVKKVALRRGWQLHRAVSGPLVVALLAVTANWLFFPQLLRNGLDRKSIEEYAILVDFVKSKLPFKNV

SEQ ID NO: 58267 - DNA, 1619 bp, Glycine max
  misc_feature (1)..(1619): Ceres Seq. ID no. 14316522
aacaacaaaaaaaagtaaacagaaaaggggttaagcgaggaagactgtgtagaaactagaaaccctagagagagagagagatgagaagaactcttctgagaaatgctactctctacactcgcaaccttctccatcactcggcccctgcattcgacgcttcaactcgtccccaactcagactcttctgctccaatgaaacccccccaccggttccccaaatcgacgacgttgacaacaaagagctgaaagcgcagatcgagagctacttcaagggcgacgagcaggtgcttccgtcgatcatggagacgattctgaagcggaagctgtcgggaaagcacgaggacaccgacgacgagctcatggaggagctccgcatgcgccccctggacgacgttgacgaccgggacttcgagtctgacttcgagaacattcacgataccgacgaggagatcgacgatttgtacaacgccagggacgtggtgatgaagaggatggtgaaggacgagtacttcaacatggatgataaaaagtgggatgacattgttgaggacgggatcaagcacgggcttcttagggacaccaaggagtgcgaggagattctcgaggatatgctcagctgggacaaactcctacctgatgagataaaacagaaggtggaagtaaaatttaatgagctaggggacatgtgtgaaagaggtgaacttgaacctgaagaagcttatgaacagtttaagaagtttgaggatgagattgtggcagaatacctggacaaaatggaaaaggaggaggctccacagtttgatgatactactgtgccggataagaaaaaggacttggatgatccaccgggtgaaggtccaattctgcgctggcaaacccgggtagtctttgctcctggtggtgatgcttggcatccaaagaacaggaaagtaaaactgtctgttactgtgaaggagctagggctttcaaaataccaatttcgccgtctcagggaattggttggaaaacgttatcatccagggagagatgagcttacaataactagtgagaggtttgaacatcgagaagaaaacagaaaggactgcttaaggacccttctccatctcattgaggaggcagggaaagctaataaactagtagatgatgctcgatcctcatacgtaaaagagaggcttcgtgccaatccagctttcatggagaggctgcatgccaagtcaatgaggttgcgagaatctaatcaggttcctgcttgaggttttcagatctgatgtatgaattattgaaattcacctgccataattttttattgctccctggttttttgtatgagtcttatcttgggttccagctgcagaaaacaacctccctgcttagagggtaaggcctcatacatctgatccttcctagaccccacaactgcaggggagactcatgcaccggggtacctcttagtcatatctttcgtatttagtgcttgaataatggataattttttttacctcttgttagatattgtatgctagttgactcaaatgttacatttttgtggagtaacattgatcatagaaaaggccggatgatccccaactgaagcaatggatttcaacattttatattat

SEQ ID NO: 58268 - protein, 390 aa, Glycine max
  peptide (1)..(390): Ceres Seq. ID no. 14316523
MRRTLLRNATLYTRNLLHHSAPAFDASTRPQLRLFCSNETPPPVPQIDDVDNKELKAQIESYFKGDEQVLPSIMETILKRKLSGKHEDTDDELMEELRMRPLDDVDDRDFESDFENIHDTDEEIDDLYNARDVVMKRMVKDEYFNMDDKKWDDIVEDGIKHGLLRDTKECEEILEDMLSWDKLLPDEIKQKVEVKFNELGDMCERGELEPEEAYEQFKKFEDEIVAEYLDKMEKEEAPQFDDTTVPDKKKDLDDPPGEGPILRWQTRVVFAPGGDAWHPKNRKVKLSVTVKELGLSKYQFRRLRELVGKRYHPGRDELTITSERFEHREENRKDCLRTLLHLIEEAGKANKLVDDARSSYVKERLRANPAFMERLHAKSMRLRESNQVPA

SEQ ID NO: 58269 - protein, 317 aa, Glycine max
  peptide (1)..(317): Ceres Seq. ID no. 14316524
METILKRKLSGKHEDTDDELMEELRMRPLDDVDDRDFESDFENIHDTDEEIDDLYNARDVVMKRMVKDEYFNMDDKKWDDIVEDGIKHGLLRDTKECEEILEDMLSWDKLLPDEIKQKVEVKFNELGDMCERGELEPEEAYEQFKKFEDEIVAEYLDKMEKEEAPQFDDTTVPDKKKDLDDPPGEGPILRWQTRVVFAPGGDAWHPKNRKVKLSVTVKELGLSKYQFRRLRELVGKRYHPGRDELTITSERFEHREENRKDCLRTLLHLIEEAGKANKLVDDARSSYVKERLRANPAFMERLHAKSMRLRESNQVPA

SEQ ID NO: 58270 - protein, 297 aa, Glycine max
  peptide (1)..(297): Ceres Seq. ID no. 14316525
MEELRMRPLDDVDDRDFESDFENIHDTDEEIDDLYNARDVVMKRMVKDEYFNMDDKKWDDIVEDGIKHGLLRDTKECEEILEDMLSWDKLLPDEIKQKVEVKFNELGDMCERGELEPEEAYEQFKKFEDEIVAEYLDKMEKEEAPQFDDTTVPDKKKDLDDPPGEGPILRWQTRVVFAPGGDAWHPKNRKVKLSVTVKELGLSKYQFRRLRELVGKRYHPGRDELTITSERFEHREENRKDCLRTLLHLIEEAGKANKLVDDARSSYVKERLRANPAFMERLHAKSMRLRESNQVPA

SEQ ID NO: 58271 - DNA, 1131 bp, Glycine max
  misc_feature (1)..(1131): Ceres Seq. ID no. 15226789
gaagggatccgtttcacggttattctgatcctttttcactctccaaaaccctaaatccctctcaattgccatgaaccctccacccaccaccagcttccccctgaagggcgaatgcggcaactgcagctcgaaggagcggcgcctcctccaccggctctggatgcgcggcatgaaccgccacctgtgcacatcctgcgtcctccgcctccatccctcctccttctgcccctcctgcttcgacttcttcgaccagcctctctccgtcacctcctccgccttcgcccaccgcttcgtctcatgcaccaaatgctcctccctcactcacctctcctgcctcccttcccctcctccttcccccttcctctgtcccccttgctcccaacaaaccttctccttcttcccagattctaccgctccattagataaacgccgcgccatcatcctcctctgcgcctgcaagatcgcggcggcatccgtctccaaatccctcgccctcgccaggaccagagtcgaacgcaccgtccgcgaggccgccctggcgagaaagagggccagggatgctcttgaccattgctccatcgtcgacaagatcaagcgcctcggacttgaaggcaccttcgaggcttcaaacagcaagtacttgggaatgaatcataatcataacaatgttgtgagtaataaaaaagaagagctcaatggcttcgggggaggtcagggtaaggttaaaactgaggcgatgtccttgactccccctgtcaacaaaaatgggaacaaccacgccaaattgccgaatcgagtagcgtagttcatgttgcctctactaacattttgctctggaaaaaccattcggatttatcaaggtagaggaagagagtgagtgtgttctagagttttgcagtggaattctgagtaagaacacattttatttgttttgggatttttttttcctcaaagcatacggctgattcgtttcattatccactccattattcccttgtaaagcctccgtagtattgtgattatgcgactctatttcattttaagtgccccgcctgtaattacgtcatgcacattttttgttgttccctttgtcagtatcatcatatgttagtccaaaaaaaaaaaaaaaaa

SEQ ID NO: 58272 - protein, 244 aa, Glycine max
  peptide (1)..(244): Ceres Seq. ID no. 15226790
MNPPPTTSFPLKGECGNCSSKERRLLHRLWMRGMNRHLCTSCVLRLHPSSFCPSCFDFFDQPLSVTSSAFAHRFVSCTKCSSLTHLSCLPSPPPSPFLCPPCSQQTFSFFPDSTAPLDKRRAIILLCACKIAAASVSKSLALARTRVERTVREAALARKRARDALDHCSIVDKIKRLGLEGTFEASNSKYLGMNHNHNNVVSNKKEELNGFGGGQGKVKTEAMSLTPPVNKNGNNHAKLPNRVA

SEQ ID NO: 58273 - protein, 214 aa, Glycine max
  peptide (1)..(214): Ceres Seq. ID no. 15226791
MRGMNRHLCTSCVLRLHPSSFCPSCFDFFDQPLSVTSSAFAHRFVSCTKCSSLTHLSCLPSPPPSPFLCPPCSQQTFSFFPDSTAPLDKRRAIILLCACKIAAASVSKSLALARTRVERTVREAALARKRARDALDHCSIVDKIKRLGLEGTFEASNSKYLGMNHNHNNVVSNKKEELNGFGGGQGKVKTEAMSLTPPVNKNGNNHAKLPNRVA

SEQ ID NO: 58274 - protein, 211 aa, Glycine max
  peptide (1)..(211): Ceres Seq. ID no. 15226792
MNRHLCTSCVLRLHPSSFCPSCFDFFDQPLSVTSSAFAHRFVSCTKCSSLTHLSCLPSPPPSPFLCPPCSQQTFSFFPDSTAPLDKRRAIILLCACKIAAASVSKSLALARTRVERTVREAALARKRARDALDHCSIVDKIKRLGLEGTFEASNSKYLGMNHNHNNVVSNKKEELNGFGGGQGKVKTEAMSLTPPVNKNGNNHAKLPNRVA

SEQ ID NO: 58275 - DNA, 851 bp, Glycine max
  misc_feature (1)..(851): Ceres Seq. ID no. 15225453
acactttttgtgacactaagtcattccattgtgacttttctacctcaaagatccaaagaaacacattgagcacttaaattaatattctctcatttgatcaccaacattggtgggggaatatcatggcaccaagaagaattgagatgctgctgagcatgtcccttgtaatggttctttggggtgtcacattggctcaatctgatcaatcaagtagttgcaccaatgtgttcataagtcttgctccatgccttgactatgttacaggaaatgcctctatcccttcttcttcttgttgctctcaacttgcctttgtggtacggtcacagccactgtgcctatgtgaggttgttaatggtggtgcttcatctattgctgcaagtttcaacatcaatcagactagggctttggcactccctactgcttgcaatgttcagacacctcctattacctcctgcagtgcctcggcttcttcctcacaaggtgtttctgtttcctactttccaaattccccttcaggaattggatctagcactgtttcatcaacgatcggaggcagtagaagtgtcggtgcctcatatcatggaaattcaagttcaacaaaattgccatgttctttgcttgtcatcatgtttttccttgcaacgactttgactttcaccttcaagaccatgacctagacaacgtcgttgcacatttttttaaactttgttattatcttctactgcttcgagcatactcacttactggtatcatttgtcctttatccttattaaaaaacttaggattaaaatttcccctgtatatttcatgtacatttttatttctctgtttcttctattgatggctaagac

SEQ ID NO: 58276 - protein, 184 aa, Glycine max
  peptide (1)..(184): Ceres Seq. ID no. 15225454
MAPRRIEMLLSMSLVMVLWGVTLAQSDQSSSCTNVFISLAPCLDYVTGNASIPSSSCCSQLAFVVRSQPLCLCEVVNGGASSIAASFNINQTRALALPTACNVQTPPITSCSASASSSQGVSVSYFPNSPSGIGSSTVSSTIGGSRSVGASYHGNSSSTKLPCSLLVIMFFLATTLTFTFKTMT

SEQ ID NO: 58277 - protein, 177 aa, Glycine max
  peptide (1)..(177): Ceres Seq. ID no. 15225455
MLLSMSLVMVLWGVTLAQSDQSSSCTNVFISLAPCLDYVTGNASIPSSSCCSQLAFVVRSQPLCLCEVVNGGASSIAASFNINQTRALALPTACNVQTPPITSCSASASSSQGVSVSYFPNSPSGIGSSTVSSTIGGSRSVGASYHGNSSSTKLPCSLLVIMFFLATTLTFTFKTMT

SEQ ID NO: 58278 - protein, 173 aa, Glycine max
  peptide (1)..(173): Ceres Seq. ID no. 15225456
MSLVMVLWGVTLAQSDQSSSCTNVFISLAPCLDYVTGNASIPSSSCCSQLAFVVRSQPLCLCEVVNGGASSIAASFNINQTRALALPTACNVQTPPITSCSASASSSQGVSVSYFPNSPSGIGSSTVSSTIGGSRSVGASYHGNSSSTKLPCSLLVIMFFLATTLTFTFKTMT

SEQ ID NO: 58279 - DNA, 814 bp, Glycine max
  misc_feature (1)..(814): Ceres Seq. ID no. 13504026
ataccaaacttaaaattggagaagacgaaacaatttagaaaagaaaaatgaaaatagtagaaaagaaggcattaggttaagagtgaaggcagtgagcgaaagagagcatagtaatacttactgagtgcttacagttgctgcgtcgcaaggtaccggcggcgacggagaactatcttctcaattttcgatcactgcattggttctgttgtcaagggttttgttcttcctgacttgcatacttgatggcttcaaagttgcagaagttgcaggccacagcatctcaagcgtctcaatttgtatgcagtcgtggaactaactactacaagcaattgctggaacagaacaagcaacacattcaggagcctcctacagcagagaaatgcaacctgttggcaaagcaattgttttacactcgccttgctagtattccgagtcgtaatgagtccttttggaaggaacttgattatgccaagaatttgtggaagaacaggaaagagctaaaggttgaagatgcaggaattgctgctttgtttggcctcgaatgctttgcatggttttgcgctggtgagattgttggcagaggatttactttcaccggttactatgtctgataataaccacttggaaagtgtagattttatcagggctaaacactcctaaagccaactgctctggtcatttatacattgtgtggattatggcattctgcatggcaatttttgttatgataagcctcaataaccccttgtagttgaaagcgggatgaaccttgtgatgttctcttattatgttggaaagctagtgatggtactcc

SEQ ID NO: 58280 - protein, 122 aa, Glycine max
  peptide (1)..(122): Ceres Seq. ID no. 13504027
MASKLQKLQATASQASQFVCSRGTNYYKQLLEQNKQHIQEPPTAEKCNLLAKQLFYTRLASIPSRNESFWKELDYAKNLWKNRKELKVEDAGIAALFGLECFAWFCAGEIVGRGFTFTGYYV

SEQ ID NO: 58281 - DNA, 877 bp, Glycine max
  misc_feature (1)..(877): Ceres Seq. ID no. 15168318
atcactgctcattactcaatcttcttacactcctaataagtgtttttcatttcacaaacaccctaatctatctataacaacaatggcatcagatcgaggtgtttttttgaacaaaagctggggtgttggtggaagagaaatgaaggacagagattttgatgaagaagatgtgtggagtgtagcaaatgatgatagtggcaaagaaaccacaagggcatgcaaggaatcttgtggttcttcttcttcttcttctgcatggcgtttacctgctgctccaagaaagattccaagggctaataataatgctaatcccctacctgcagcttctgatgctccattggttaaaggatcctcatcagcacctatggacatccctgactggtcaaagatttatggtaagagttgcaagaaagggtcaacagcagatgatggtgcaagcaacaagggtggtgatgatgatgatgatgacgacgatgacatggttcctccacatgaatggattgctaggaagcttgcaaggagccagatttcatctttctctgtgtgtgaagggatggggaggacactcaaaggaagagatcttagtaaggtgaggaatgctattttgaccaaaactggcttcatagagtagtggttaatttaagagatttaattaggttggttgaataatgttaatgagttattgtaaatcttgtgagtttgattcctacttggatgtactaatgtaagctacttggatgtcttcatgtaagcttcaaattttggcatcattagtagccataccacaatcaaatcatccattattgttttactcgggtcccatgcaatcgtttttgttttgattattctcactataatatatagtagtttattagtg

SEQ ID NO: 58282 - protein, 209 aa, Glycine max
  peptide (1)..(209): Ceres Seq. ID no. 15168319
SLLITQSSYTPNKCFSFHKHPNLSITTMASDRGVFLNKSWGVGGREMKDRDFDEEDVWSVANDDSGKETTRACKESCGSSSSSSAWRLPAAPRKIPRANNNANPLPAASDAPLVKGSSSAPMDIPDWSKIYGKSCKKGSTADDGASNKGGDDDDDDDDDMVPPHEWIARKLARSQISSFSVCEGMGRTLKGRDLSKVRNAILTKTGFIE

SEQ ID NO: 58283 - protein, 182 aa, Glycine max
  peptide (1)..(182): Ceres Seq. ID no. 15168320
MASDRGVFLNKSWGVGGREMKDRDFDEEDVWSVANDDSGKETTRACKESCGSSSSSSAWRLPAAPRKIPRANNNANPLPAASDAPLVKGSSSAPMDIPDWSKIYGKSCKKGSTADDGASNKGGDDDDDDDDDMVPPHEWIARKLARSQISSFSVCEGMGRTLKGRDLSKVRNAILTKTGFIE

SEQ ID NO: 58284 - protein, 163 aa, Glycine max
  peptide (1)..(163): Ceres Seq. ID no. 15168321
MKDRDFDEEDVWSVANDDSGKETTRACKESCGSSSSSSAWRLPAAPRKIPRANNNANPLPAASDAPLVKGSSSAPMDIPDWSKIYGKSCKKGSTADDGASNKGGDDDDDDDDDMVPPHEWIARKLARSQISSFSVCEGMGRTLKGRDLSKVRNAILTKTGFIE

SEQ ID NO: 58285 - DNA, 1224 bp, Glycine max
  misc_feature (1)..(1224): Ceres Seq. ID no. 14316497
aaaagtgagaagctttcgcttgttttggtgttccagttccacttagagccatgacagacatctccaagtcccttctctttacctttaccatcatcatcagctttggcttgtgcattctttatgcatctgcagaactccagagatttgcacactcttccaaacatgatggtgctcttagcttcttggtgcttggtgactagggaagaagaggtgcttacaaccaatcactagttgctttccagatgggaaaggttggagagaagcttgatatcgactttgtagtttccactggagacaacttctatgacaatggactgactagtgaccatgacaacgcgtttcaagaatcattcactaaaatttacacagcaaaaagcttgcaaaatcagtggtacagcgtgttaggcaaccacgactataggggtgatgcagaggcccaattgagcccggtccttagagaaattgatagcagatggctttgcttaaggtcctttattgtagattcagagctggttgagattttctttgtagacaccactccttttgttgacgagtacttcactgaaccaccggaacacaagtatgattggcggggcattggcccacaaaaatcttatatttctaacttactcaaggacctagaattggcactgaggggatcaacagcaaaatggaggattgttgttggtcaccatgccattagaagtgttgggcatcatggtgatactcaagaactcataaatcggcctctccctatccttcaggcaaataacgttcacttttacatgaacgggcatgatcattgtcttgagcacattagtgacacggagagccccattcagttcctgactagcggggcagggtcaaaggcttggagaggagacattgaaggaatgaaccgaagaggcgtaaatttcttctatgatggacaaggcttcgtgtcagtgaaattgactcagacggatgccaccattgagttctatgatgtttttggcaacgttttgcacagattgacttcttcaaaacagctacattcttccatgtaaagtttagagctagatactagacattgagattaaatagaccaatccaaattggttgatgaaatttcaaactaatccttgatgtcatgcttgagtatgtacgagaaatgaaaatatgaatgaaggattcttcactgtgattcattcaccgcagtgatgaattgctgtttaaaaagaaaac

SEQ ID NO: 58286 - protein, 267 aa, Glycine max
  peptide (1)..(267): Ceres Seq. ID no. 14316498
MGKVGEKLDIDFVVSTGDNFYDNGLTSDHDNAFQESFTKIYTAKSLQNQWYSVLGNHDYRGDAEAQLSPVLREIDSRWLCLRSFIVDSELVEIFFVDTTPFVDEYFTEPPEHKYDWRGIGPQKSYISNLLKDLELALRGSTAKWRIVVGHHAIRSVGHHGDTQELINRPLPILQANNVHFYMNGHDHCLEHISDTESPIQFLTSGAGSKAWRGDIEGMNRRGVNFFYDGQGFVSVKLTQTDATIEFYDVFGNVLHRLTSSKQLHSSM

SEQ ID NO: 58287 - DNA, 942 bp, Glycine max
  misc_feature (1)..(942): Ceres Seq. ID no. 15177207
aacaaattaaaacaaaacagtctccatttgactacaaaacagtctccatttgacacagtcctagtggtgtactacttattatggccacaccagcatccatcactaatgtcactgtggagttccttcaattccccgcactggtgacacctcctggctctaccaaatcctatttccttggcggcgcaggggtgagagggttgaatattcaagaagaatttgtgaagttcacgggaataggtgtttatttggaagacaaggccgtgtcatcactcgctgccaaatggaagggcaagagtgcagctgaattgctcgattcccttgacttctacagagatatcatcaaaggcccctttgagaagttaattcgagggtcaaagttaagaacattggatggtcgtgaatacgtaaggaaggtatcagagaactgtgtggcacatatgcaatctgttgggacttacagtgatgaggaggaaaaagctattgaggaatttagaaatgctttcaaggatcaaaatttcccaccaggctccactgttttctacaaacaatcacccactggaacattggggcttagtttctcgaaagatgagacaataccagaacatgagcatgcagtgatagacaacaagccactttcggaggcagtgctggagactatgatcggagagattcctgtttcccctgctttgaaagagagtttggctacaaggtttcatcagttcttcaaagagttagaggccaatcccaacattgaaaactgagagttgcagcagttgccaactatctttagaagaccttggaaacaagaagaagaacagcaaaaatttgaagagacatctaaataatgtaacccccccccccccccccctccccgcagttatgtgtgcactttggtggatttgtaccccatttaataaacgagcaaaccagttattgctaatc

SEQ ID NO: 58288 - protein, 226 aa, Glycine max
  peptide (1)..(226): Ceres Seq. ID no. 15177208
MATPASITNVTVEFLQFPALVTPPGSTKSYFLGGAGVRGLNIQEEFVKFTGIGVYLEDKAVSSLAAKWKGKSAAELLDSLDFYRDIIKGPFEKLIRGSKLRTLDGREYVRKVSENCVAHMQSVGTYSDEEEKAIEEFRNAFKDQNFPPGSTVFYKQSPTGTLGLSFSKDETIPEHEHAVIDNKPLSEAVLETMIGEIPVSPALKESLATRFHQFFKELEANPNIEN

SEQ ID NO: 58289 - DNA, 912 bp, Glycine max
  misc_feature (1)..(912): Ceres Seq. ID no. 12608745
acccccactttttctagtaataatagtactacattatctagtgttcgagagagagagagttcatagttcaatgctcagttcttcttcggcttcgtttttgaggcagttaagtgcaaaaaaggagggttggaaagagagatactataatagtggtagtggtggctggggaatgagctttggagggtgtgaggcaagtgtgaaactaatggaagggtttaacatgcaggggaatgtggggaggaagagggtgatggtggtggttgatgacacctcacattccaagcatgcaatgttgtgggcactcactcatgttgccaacaagggtgattcccttgactcttcttcacgttgtgcctcctcacaggggtcctgaatcttcttgctccacttatcttgtcaattatcttgggtcactttgcaaagattgcaagccctggggtggaagtggaagcgctcttaaatccaaggaccaaaactggccactgtaatgagccaagtaaagaagctggaggtctctgtcctggtactgggccaaaagaagccatcttctcttttaagctgtctttgtggaagcagcggaagcagtagtacagaggagtttgtggagcattgcatcaataaagcagagtgcttgacaattggagtgaggaagagaagccagggcacgaatggataccttgtcagcactagatggcagaagaacttctggcttttggcttagattgaaagtttagttgctgctagttcagatcttagaggggataaatggggaaatggtaaaattaaccttagtatttgcaacatcatctataatctgagtaaaaataatcatctatatcaccctgtaactagttctaactatatcgtgtactaatgtcactatgagtaaaaataatcaaattgtccatgctc

SEQ ID NO: 58290 - protein, 123 aa, Glycine max
  peptide (1)..(123): Ceres Seq. ID no. 12608746
PPLFLVIIVLHYLVFERERVHSSMLSSSSASFLRQLSAKKEGWKERYYNSGSGGWGMSFGGCEASVKLMEGFNMQGNVGRKRVMVVVDDTSHSKHAMLWALTHVANKGDSLDSSSRCASSQGS

SEQ ID NO: 58291 - protein, 100 aa, Glycine max
  peptide (1)..(100): Ceres Seq. ID no. 12608747
MLSSSSASFLRQLSAKKEGWKERYYNSGSGGWGMSFGGCEASVKLMEGFNMQGNVGRKRVMVVVDDTSHSKHAMLWALTHVANKGDSLDSSSRCASSQGS

SEQ ID NO: 58292 - protein, 77 aa, Glycine max
  peptide (1)..(77): Ceres Seq. ID no. 12608748
MSQVKKLEVSVLVLGQKKPSSLLSCLCGSSGSSSTEEFVEHCINKAECLTIGVRKRSQGTNGYLVSTRWQKNFWLLA

SEQ ID NO: 58293 - DNA, 758 bp, Glycine max
  misc_feature (1)..(758): Ceres Seq. ID no. 13503305
agcagaagaaaacgaaactctcaaaccaagcgaaactatgggcatataactgagagaagaatatatcaatatcatctccaaatacgacgtcgttcaggttggggttttagcacaagatgtcgctgcgaataaaggcggtagtagataagtttgtccaagagttgcaggaagcgttggatgctgatattcaggataggatcatgaaggacagagaaatgcaaagttacattgaggagcgggaacgagaggttgctgagcgtgaagctgcttggaaggctgatctttctcgtcgtgaggcagaaattgctcgtcaagaagcaaggctgaagatggagagagacaatctagagaaagagaaaagtgtcttaatgggaactgcatcaaatcaagataaccaagatggagctcttgaaattacagtaagtggtgaaaagtaccgttgcctcagatttgccaaggcaaaaaaataaggctttgctggggtgacaaaaaggaaaagtatgattttgacttctctcccccagggctagtgctgtcgaggaatcacctgaaatgccaagctcagtttaagtacttctaggattaattattgaaatttaactgtttagttgtggtttataattcctgttagatttgagttaagtgtcatgacttcctcaattaaatttttatttcattcttttctgtgatggtgttgatgctgtttgctgaaattatgtttccgggtaaattatttatgacattagctaaatttagtt

SEQ ID NO: 58294 - protein, 117 aa, Glycine max
  peptide (1)..(117): Ceres Seq. ID no. 13503306
MSLRIKAVVDKFVQELQEALDADIQDRIMKDREMQSYIEEREREVAEREAAWKADLSRREAEIARQEARLKMERDNLEKEKSVLMGTASNQDNQDGALEITVSGEKYRCLRFAKAKK

SEQ ID NO: 58295 - protein, 89 aa, Glycine max
  peptide (1)..(89): Ceres Seq. ID no. 13503307
MKDREMQSYIEEREREVAEREAAWKADLSRREAEIARQEARLKMERDNLEKEKSVLMGTASNQDNQDGALEITVSGEKYRCLRFAKAKK

SEQ ID NO: 58296 - protein, 84 aa, Glycine max
  peptide (1)..(84): Ceres Seq. ID no. 13503308
MQSYIEEREREVAEREAAWKADLSRREAEIARQEARLKMERDNLEKEKSVLMGTASNQDNQDGALEITVSGEKYRCLRFAKAKK

SEQ ID NO: 58297 - DNA, 772 bp, Glycine max
  misc_feature (1)..(772): Ceres Seq. ID no. 12583723
ataataaaccccaaaacaaagttcttctctctctctctctctctctctctcgtgaatcatcacttcgttttccccactttcaacaccgctcatcttctcttctcttttctctgctaatcatggcaaccttgtctactatgaaagtttcccctcattgcacattacaaactgcaagcaaaaatccatccattgttgccaccatagtgaagtgtccttcttctttaaggtctgtgaagagcgtttccagatctttcggcttgaagtcggcctcttcatttagagtcactgccatggcttcttacaaggttaagctgattggcccagatggaacagagaacgagttcgaagccactgacgatacttacatcttagatgcagcagagagtgctggagttgaacttccttactcatgccgagctggagcatgctccacctgtgctgggaagattgtttctggttctgtggaccagtccgatggctcattcctcgatgacaaccaactgaaggaaggctttgttcttacctgtgtctcctatccaactgcagactgtgtaattgaaactcacaaggaaggagatctctactgagcaatgctggccttgaagttgggaactgggaatttaaggtagactttgcaactagtttacttgtgctgctttagaatcaaattttcttttttgattattagtgatttggtgtattgaatttttgtttgtgcagcaagcactgtgatcttaattaataagacgataagcaccttcggttggctttc

SEQ ID NO: 58298 - protein, 194 aa, Glycine max
  peptide (1)..(194): Ceres Seq. ID no. 12583724
NKPQNKVLLSLSLSLSRESSLRFPHFQHRSSSLLFSLLIMATLSTMKVSPHCTLQTASKNPSIVATIVKCPSSLRSVKSVSRSFGLKSASSFRVTAMASYKVKLIGPDGTENEFEATDDTYILDAAESAGVELPYSCRAGACSTCAGKIVSGSVDQSDGSFLDDNQLKEGFVLTCVSYPTADCVIETHKEGDLY

SEQ ID NO: 58299 - protein, 155 aa, Glycine max
  peptide (1)..(155): Ceres Seq. ID no. 12583725
MATLSTMKVSPHCTLQTASKNPSIVATIVKCPSSLRSVKSVSRSFGLKSASSFRVTAMASYKVKLIGPDGTENEFEATDDTYILDAAESAGVELPYSCRAGACSTCAGKIVSGSVDQSDGSFLDDNQLKEGFVLTCVSYPTADCVIETHKEGDLY

SEQ ID NO: 58300 - protein, 149 aa, Glycine max
  peptide (1)..(149): Ceres Seq. ID no. 12583726
MKVSPHCTLQTASKNPSIVATIVKCPSSLRSVKSVSRSFGLKSASSFRVTAMASYKVKLIGPDGTENEFEATDDTYILDAAESAGVELPYSCRAGACSTCAGKIVSGSVDQSDGSFLDDNQLKEGFVLTCVSYPTADCVIETHKEGDLY

SEQ ID NO: 58301 - DNA, 1103 bp, Glycine max
  misc_feature (1)..(1103): Ceres Seq. ID no. 14314867
aatctctgtgctgcttcgtctatccctcccaccgtcctcggctccccggggatcccgccgtcgccgccgccggcccgcgttggtgccgccctggctctttcaacttggaagggctgccaccaccgcctcctccctccgcgccagtccccgcaagcgctcctcggcacccctcctcctgccgtcggatcccctcaccgtagcatctgattggcagtggacagggcaagatgtctggcggcaatcctgcaggtgtggataacactttccgtaggaaatttgacaaggaggagtacttggagcgagctcgacagagagagcgggatgagaaggatgaagcccggagaggcaaggacaggggccctcctgtgcaaagacagcctttgaagcatagggattatgaagttgatcttgagtctcgtcttggtaaaacccaggtggtaaccccaatcgcacctttgagtcagcaggctggatactactgttcagtatgtgagtgtgttgttaaagattcagccaactatttggatcatataaatggcaagaagcatcagagagcattgggcatgtctatgcgtgttgaaagggcgtcactcgaacaggttcaaaaacggtttgaggcacttaagaagaggaaggacccagccagcttcagtgaacaagatttggatgagagaatatggaagcagcagcaagaggaggaggagaagaagcgtcaacgcagagaaaagaagaaagaaaagaagaaagagcaggctggccagaatgaacctgaggacattgaccctgatgttgctgctatgatgggcttcggcgggttcggcacctcttcaaagaagtgaaaattgctgcttcaggtggcgccattccgttggtctgtggctgctgaagacgtcgccgcggctccgtgcacctggatctcagcaaaggccagacacagctctgatgcagtgttgcgagtagtgtactggagccttgttgcaaccgctacctgataatgtcagcgaaacgatacttaatgctggaacaattcagcttctgtaatcggtgaccggtgatcatttgagaagcatttcatctttgagaaatgagatgactaattcgtc

SEQ ID NO: 58302 - protein, 203 aa, Glycine max
  peptide (1)..(203): Ceres Seq. ID no. 14314868
MSGGNPAGVDNTFRRKFDKEEYLERARQRERDEKDEARRGKDRGPPVQRQPLKHRDYEVDLESRLGKTQVVTPIAPLSQQAGYYCSVCECVVKDSANYLDHINGKKHQRALGMSMRVERASLEQVQKRFEALKKRKDPASFSEQDLDERIWKQQQEEEEKKRQRREKKKEKKKEQAGQNEPEDIDPDVAAMMGFGGFGTSSKK

SEQ ID NO: 58303 - DNA, 1016 bp, Glycine max
  misc_feature (1)..(1016): Ceres Seq. ID no. 15168868
aacacttgttgttgttagggttttcataattcctgaaacaggggaaggaaatggcctcacaacaacacatcgagaagatgcagctccgccagaacttccgcaatctctggcactctgatcttttgagtacaattcaagctgacaccccttattgttgcttttctctgtggtgtgcaccgtgtgtatcatatctactccgcaaacgagctctttacgatgatatgtcaagatacacatgttgtgctggttacatgccctgcagtggtcggtgtggagaaagtaaatgtcctgaactctgccttggtgcggaggttgtctgctgttttggaaattcagtggcctcaactcgatttctgttacaagatgaatttaatattcaaactacgcaatgtgataattgcattattgctttcatgtttgtccttcaacaacttgcctgcatattttctattattgctttaattgtgggaaatagtgaaattcgacaggcttctcaattgctatcttgtttggctgactttgtctactgcacggtgtgtgcttgcatgcagactcagcataagattgaaatggacaaacgcgatgggaaatttggaccccaatcagtaatgggtgttccccctgttcaacaaatgtcacgctttgatcaggcagtccccccttttgttgggtattgaccacaaccagcatatggacagggctatggttattcacatgcctaagacccttctcatcctcccaactagcctgcccatcatcatcatcatcatcatcatcatccaccagcatatagctacttttggtgatttttttcataagaatgctttaggttgggttgcatttccatcaagtcatacatgtgtggtaaaattagtcagattgattatcaagttgcgtttcccttatacaagacaaacatattataccttgtctagttttatgtatactttgatgtcatattgtcattagactcattactgttcagcccgtggctatatttactttttttcttatgc

SEQ ID NO: 58304 - protein, 208 aa, Glycine max
  peptide (1)..(208): Ceres Seq. ID no. 15168869
MASQQHIEKMQLRQNFRNLWHSDLLSTIQADTPYCCFSLWCAPCVSYLLRKRALYDDMSRYTCCAGYMPCSGRCGESKCPELCLGAEVVCCFGNSVASTRFLLQDEFNIQTTQCDNCIIAFMFVLQQLACIFSIIALIVGNSEIRQASQLLSCLADFVYCTVCACMQTQHKIEMDKRDGKFGPQSVMGVPPVQQMSRFDQAVPPFVGY

SEQ ID NO: 58305 - protein, 199 aa, Glycine max
  peptide (1)..(199): Ceres Seq. ID no. 15168870
MQLRQNFRNLWHSDLLSTIQADTPYCCFSLWCAPCVSYLLRKRALYDDMSRYTCCAGYMPCSGRCGESKCPELCLGAEVVCCFGNSVASTRFLLQDEFNIQTTQCDNCIIAFMFVLQQLACIFSIIALIVGNSEIRQASQLLSCLADFVYCTVCACMQTQHKIEMDKRDGKFGPQSVMGVPPVQQMSRFDQAVPPFVGY

SEQ ID NO: 58306 - protein, 151 aa, Glycine max
  peptide (1)..(151): Ceres Seq. ID no. 15168871
MSRYTCCAGYMPCSGRCGESKCPELCLGAEVVCCFGNSVASTRFLLQDEFNIQTTQCDNCIIAFMFVLQQLACIFSIIALIVGNSEIRQASQLLSCLADFVYCTVCACMQTQHKIEMDKRDGKFGPQSVMGVPPVQQMSRFDQAVPPFVGY

SEQ ID NO: 58307 - DNA, 1033 bp, Glycine max
  misc_feature (1)..(1033): Ceres Seq. ID no. 14311392
aaaaatcattcattcattgaatcccccaaaccgccatttcctttgggtttatggagtgagcgtggaagaggaaagagcaagcagcaacagctcgtggcggttccgattatttattaagatcaatgttgcatgcagtatctgcccctagcttttgtttaagctatcccgggaaccttcattatcctccttcttcatttcaaaaaacatgtttttctgttcgttgttcggtttcacagacaaaaaatggagctaaagtggaatatactccttggctcattgttggcttgggcaatcctggtaacaaataccatggcaccaggcacaatgttggatttgaaataattgatagcctttctcgagcagaagggattcagatgaacacaatacagtcaaaggccctcattggaataggttctattggtgaagtaccgattttgctggcaaagccccaaacatacatgaatttcagtggggaatcggttgggccacttgctgcatattatcaagtacccttgcgtcatattctactagtttttgatgagacaagccttccaaatggtgttttaaggcttcaacctaaaggcggacatggacatcacaatggattgaaaaatgtaatgggccatttggatggttgcagtgcttttcctcgacttgcagtcggaattggaaatcctcctggaactatggatttaagagcttatcttctacaaaaattcagtgtagaggaacgaaagcagattgacgcttcattggagcaagcagttgcagcagtaaggaccgtagtactcaatggttttgaccagcatgtcaatagattcaatttaggacaaaaatacaagtaccataaagtttaaaatgaaccgccaagatgaaattggtggttacattgttgtgtatgttagcagatagcagttatacttcacaaacttgtcatgactagtgcatttttttgtaaagcacaccagtggtcatattctagctctggcagatagttgtttcattgtgagaaatactagttgttgaattgttg

SEQ ID NO: 58308 - protein, 244 aa, Glycine max
  peptide (1)..(244): Ceres Seq. ID no. 14311393
MLHAVSAPSFCLSYPGNLHYPPSSFQKTCFSVRCSVSQTKNGAKVEYTPWLIVGLGNPGNKYHGTRHNVGFEIIDSLSRAEGIQMNTIQSKALIGIGSIGEVPILLAKPQTYMNFSGESVGPLAAYYQVPLRHILLVFDETSLPNGVLRLQPKGGHGHHNGLKNVMGHLDGCSAFPRLAVGIGNPPGTMDLRAYLLQKFSVEERKQIDASLEQAVAAVRTVVLNGFDQHVNRFNLGQKYKYHKV

SEQ ID NO: 58309 - protein, 160 aa, Glycine max
  peptide (1)..(160): Ceres Seq. ID no. 14311394
MNTIQSKALIGIGSIGEVPILLAKPQTYMNFSGESVGPLAAYYQVPLRHILLVFDETSLPNGVLRLQPKGGHGHHNGLKNVMGHLDGCSAFPRLAVGIGNPPGTMDLRAYLLQKFSVEERKQIDASLEQAVAAVRTVVLNGFDQHVNRFNLGQKYKYHKV

SEQ ID NO: 58310 - protein, 132 aa, Glycine max
  peptide (1)..(132): Ceres Seq. ID no. 14311395
MNFSGESVGPLAAYYQVPLRHILLVFDETSLPNGVLRLQPKGGHGHHNGLKNVMGHLDGCSAFPRLAVGIGNPPGTMDLRAYLLQKFSVEERKQIDASLEQAVAAVRTVVLNGFDQHVNRFNLGQKYKYHKV

SEQ ID NO: 58311 - DNA, 736 bp, Glycine max
  misc_feature (1)..(736): Ceres Seq. ID no. 13638466
atgtgtcttaggtgaattactcaagagggctcgacaatcccacaaagtagaaaaagaggttatgttatggcgggcaaaggtgttagttcggtggctaaggcggtagcagaatatcagtatccttggcgtgagaagttggggaaatataaggatgagcttgccaagggtgtgtggggatactggagctggggggcatggaagccgctgagtatcagtgctcggcatcgtgctagaattcgcaaggaagtcctccttgctggggaagattggccctacgatcctgaaaggaaggagatgaagaccaggaggaaaggacacaaatgtgataggatttctgccgaaaagcgcgcaaacacagcgaagttgatggagaagatgccccagatgttgctggattacaagaagagaaggtggcagaagaagatgaaggaggaagacaagggaaaactttgattttgctcctcctctaatttttgcaaggttcagcataaactgtgcctttgagaaatggagtatttaattatgccatgttacacctgtttgtgggcctaatggattattaactttggttatgcttttcaatccttaataacccctttcgagagtatggccttgtgagtatcaggggggaaagggctttactacaatggaaattactgttatgtggttttgtttttatgtatatgcttggatgagtgcttgtcggtactgacaattgcttatttgtgccaagggc

SEQ ID NO: 58312 - protein, 128 aa, Glycine max
  peptide (1)..(128): Ceres Seq. ID no. 13638467
MAGKGVSSVAKAVAEYQYPWREKLGKYKDELAKGVWGYWSWGAWKPLSISARHRARIRKEVLLAGEDWPYDPERKEMKTRRKGHKCDRISAEKRANTAKLMEKMPQMLLDYKKRRWQKKMKEEDKGKL

SEQ ID NO: 58313 - DNA, 601 bp, Glycine max
  misc_feature (1)..(601): Ceres Seq. ID no. 12608730
aacaaattaaactctccactttccacacaaacctaagaagaagcacttgtcaagatgccctcttctgctcatgctcatgctcatggcctcatcatcatctctctcattttggtgtctatttttttacccaatgtgaatctggcaaatggtggtgcaacttccatgcaaatgatgatgatgatgaatgagagcagaaggaaattgggaagcttccagatatgtgcactatgcaactgctgtggtggagccaaagggatctgcttgccctctccatgttgctatgccatcaattgcaacattcccaatagaccttttggcttttgttccttcacccctaaaacctgtaattgctttgaatgccatctttaatgttttctcttgtaaatgtccagttgagaatattggacttaataataatttttcacctttcaatcaacatactaatgaattcaggtgtttaatttggtggggttggaatagaggacagttaagccttagctacaaacctgctagtatatctgtaataggttttgctgtttgtttcataatggataatgtatcaatgcatgagccttggtatgtgtattgttctctctttttc

SEQ ID NO: 58314 - protein, 139 aa, Glycine max
  peptide (1)..(139): Ceres Seq. ID no. 12608731
MRAEGNWEASRYVHYATAVVEPKGSACPLHVAMPSIATFPIDLLAFVPSPLKPVIALNAIFNVFSCKCPVENIGLNNNFSPFNQHTNEFRCLIWWGWNRGQLSLSYKPASISVIGFAVCFIMDNVSMHEPWYVYCSLFF

SEQ ID NO: 58315 - protein, 107 aa, Glycine max
  peptide (1)..(107): Ceres Seq. ID no. 12608732
MPSIATFPIDLLAFVPSPLKPVIALNAIFNVFSCKCPVENIGLNNNFSPFNQHTNEFRCLIWWGWNRGQLSLSYKPASISVIGFAVCFIMDNVSMHEPWYVYCSLFF

SEQ ID NO: 58316 - protein, 104 aa, Glycine max
  peptide (1)..(104): Ceres Seq. ID no. 12608733
MPSSAHAHAHGLIIISLILVSIFLPNVNLANGGATSMQMMMMMNESRRKLGSFQICALCNCCGGAKGICLPSPCCYAINCNIPNRPFGFCSFTPKTCNCFECHL

SEQ ID NO: 58317 - DNA, 968 bp, Glycine max
  misc_feature (1)..(968): Ceres Seq. ID no. 15175597
atcctcgaaaatgatgaatgaagcggcttgtgaaccctaattagttgtcggtgtttgttggaagagcacatctctgttttcttcgtcatcttcccctcccctccccaaccagagatgcgccccgcaacacatatgtactaaagctttcaactttcagcatcctttcagatgttagcgaaaacccataacaaaggggatggatctaagtccctggctaagatactggcaaaatggaaagaatataatgcccagattgattccagcagtgatgcggataagccagttcgcaaagttcctgccaagggatcgaagaaggggtgcatgaaaggtaaagggggccctgagaactcgcggtgtaactacagaggtgttaggcaaaggacttggggaaagtgggttgctgaaatccgagagccaaacagaggcaataggctttggctaggtactttccccactgccattggagctgcccttgcatatgatgaagcggccagggcaatgtacggttcctgtgcccgtctcaactttcccaatgtttcagtttccagtttctctgaagaatcttccaaagattctccggttgcgaatcattgtggttcgtcaatggcagtgtctgcaaacgagtccatgatttcaccaagtaactcgggggtaggtgcagaagatgatgttgatatggagcccatttccttatccttaactgtaaagcatgagaatggggaaggtgaatcggggataagttcttcccctccttccccatgatgtacattgggacatggctaaattttttagcgcatgtacttgttaatggttagcttaggtttaatcatatttgatcctggagattagctgttgtaaaactaaaatgaactccgttgcaaaaatggtcatttcttttggccacctaatttgcatggatatcctgtctatttttaactcattaggtgtgagtcatacttacctttgcc

SEQ ID NO: 58318 - protein, 197 aa, Glycine max
  peptide (1)..(197): Ceres Seq. ID no. 15175598
MLAKTHNKGDGSKSLAKILAKWKEYNAQIDSSSDADKPVRKVPAKGSKKGCMKGKGGPENSRCNYRGVRQRTWGKWVAEIREPNRGNRLWLGTFPTAIGAALAYDEAARAMYGSCARLNFPNVSVSSFSEESSKDSPVANHCGSSMAVSANESMISPSNSGVGAEDDVDMEPISLSLTVKHENGEGESGISSSPPSP

SEQ ID NO: 58319 - protein, 146 aa, Glycine max
  peptide (1)..(146): Ceres Seq. ID no. 15175599
MKGKGGPENSRCNYRGVRQRTWGKWVAEIREPNRGNRLWLGTFPTAIGAALAYDEAARAMYGSCARLNFPNVSVSSFSEESSKDSPVANHCGSSMAVSANESMISPSNSGVGAEDDVDMEPISLSLTVKHENGEGESGISSSPPSP

SEQ ID NO: 58320 - DNA, 1258 bp, Glycine max
  misc_feature (1)..(1258): Ceres Seq. ID no. 14314869
aaacacagttaaagacgcacaagaaaacatctcgctcaacaccaccaacacttcggatctacgtttccactctccgaacatcaaaaaaggaaagaaaaaccgatttacagcgacaacaacgaacgaacgatttctcgaagcgctctcaaaatggcgcgtgcaccctttacttcattccccttcgtcctcattacccttctctcaattctccacctttcgcactgcaagaccctcaagcgtgacgttaaggctttgaacgagatcaaggcttcgcttgggtggagagtggtgtatgcgtgggtcgatgatgatccatgtggagatggggatcttcctccttggtctggtgtcacgtgttccactgtcggtgattatcgtgttgttaccgagcttgaggtgtatgcggtgtcgattgttggaccttttcccactgctgttaccagcttgttggatcttacacggcttgatcttcacaataacaagctgacagggcctattcctcctcaaattggacggttgaagcgccttaaaatattaaatttgaggtggaacaaactacaggatgcaattcctccaaaaattggcgagcttaaaagtttaacacatctgtacctaagcttcaacaatttcaagggagaaattccgaaggagctagcaaatcttcaagaccttcgctatctttatctccatgaaaaccgtttaactggaagaataccaccagaattgggcacactgcaaaatcttcggcacttggatgctggtaacaatcatttagtaggtaccataagggaactcattcgtattgaaggttgctttcctgcactacgcaatctgtatctaaacaataattattttactggaggaatgcctgcacagcttgctaacttaaccagtcttgagatcttgtacctatcctacaacaaaatgtcaggagttataccatcttccgttgctcgtattcctaaattgacatacttgtacttggatcacaatcagttttcagggagaattcctgaacccttttacaagcatccatttttgaaagaaatgtacattgagggaaatgcattccggcccggtgtcaatcccattggcttccataaagtgcttgaagtttctgatggagacttccttgtttaatgaaagctctaaatatttataattttttctcttcaggaagtgcacttgtataattattgaaacaattgttcctctaattatctcaatgaaatagccaaataggtaatccaattttgtc

SEQ ID NO: 58321 - protein, 329 aa, Glycine max
  peptide (1)..(329): Ceres Seq. ID no. 14314870
MARAPFTSFPFVLITLLSILHLSHCKTLKRDVKALNEIKASLGWRVVYAWVDDDPCGDGDLPPWSGVTCSTVGDYRVVTELEVYAVSIVGPFPTAVTSLLDLTRLDLHNNKLTGPIPPQIGRLKRLKILNLRWNKLQDAIPPKIGELKSLTHLYLSFNNFKGEIPKELANLQDLRYLYLHENRLTGRIPPELGTLQNLRHLDAGNNHLVGTIRELIRIEGCFPALRNLYLNNNYFTGGMPAQLANLTSLEILYLSYNKMSGVIPSSVARIPKLTYLYLDHNQFSGRIPEPFYKHPFLKEMYIEGNAFRPGVNPIGFHKVLEVSDGDFLV

SEQ ID NO: 58322 - DNA, 1260 bp, Glycine max
  misc_feature (1)..(1260): Ceres Seq. ID no. 15171501
aaaccttcatgctgagtttcttatttgttgcgtggcaacgcaatgatgatgatgatgatggggttggtgtcttccagagttgtgttcttgtttgttgtttcgattttcgtgatttgggctcaggtggtggatttagcagaaggtggtgctgttcgaaattacattagttgggaagatttgcaggtgaatgaacaaaggttggccgtgaagtcgtcccataaccaggttcgagttataactgttaaccagaatggtgggggacattccaaaactgttcaaggtgctgtgaatatggttcctgataataacagacaaagggtcaaaattttcatttttccaggaatttacagagaaaaagtgcgtgtgcctgtgaccaagccttatgtatcatttatagggaaaagaaatcgaacagcaagtcctataattacttggaacagtaaatcatctgacaaaggcccaaatggcacagcattgggcacctatgcttcagcaacagtgggagtggactcagattatttctgtgcaactgggatcacttttgagaactcagtgattgcatcggctggtggaaaagggatgcaaggagtggcactgagggtaagcagtccaaaagcaatgttctatcgagtgaggattaagggaacacaggacactctcttggacagcacaggaaatcattacttcttaaagtgtcgcatcataggaaaagttgattttatctgtggcagcgcaaaatcactctatgagaagtgtcgtcttcagtcaatagctgagaactatggagcaatagcagcacatcatagggattcaccaacagacgacacaggtttttcttttgtaagttgcagtattagaggatctggcagtgtgtaccttggcagagcatgggggaactactcaagaattatatactccaaatgtaatatggatggcattattaatcctcaagggtggtcagactggaatcattcacataggaagaagactgcagtgtttgctgagtatcaatgcaagggaagaggagcagatagaagacatagggtgccttggtcaaaatcattcagctatccggaagcaagtcctttcctttacaagagcttcatagatggagaccagtggctcagactgtagcattatgatgcaccgattacatgacaattattcattattaatttatatgcttgtttattactatgttacatatcccccaaacgatcattttgatgcttactctttatcttgcaagggatgtttttt

SEQ ID NO: 58323 - protein, 363 aa, Glycine max
  peptide (1)..(363): Ceres Seq. ID no. 15171502
MMMMMMGLVSSRVVFLFVVSIFVIWAQVVDLAEGGAVRNYISWEDLQVNEQRLAVKSSHNQVRVITVNQNGGGHSKTVQGAVNMVPDNNRQRVKIFIFPGIYREKVRVPVTKPYVSFIGKRNRTASPIITWNSKSSDKGPNGTALGTYASATVGVDSDYFCATGITFENSVIASAGGKGMQGVALRVSSPKAMFYRVRIKGTQDTLLDSTGNHYFLKCRIIGKVDFICGSAKSLYEKCRLQSIAENYGAIAAHHRDSPTDDTGFSFVSCSIRGSGSVYLGRAWGNYSRIIYSKCNMDGIINPQGWSDWNHSHRKKTAVFAEYQCKGRGADRRHRVPWSKSFSYPEASPFLYKSFIDGDQWLRL

SEQ ID NO: 58324 - protein, 362 aa, Glycine max
  peptide (1)..(362): Ceres Seq. ID no. 15171503
MMMMMGLVSSRVVFLFVVSIFVIWAQVVDLAEGGAVRNYISWEDLQVNEQRLAVKSSHNQVRVITVNQNGGGHSKTVQGAVNMVPDNNRQRVKIFIFPGIYREKVRVPVTKPYVSFIGKRNRTASPIITWNSKSSDKGPNGTALGTYASATVGVDSDYFCATGITFENSVIASAGGKGMQGVALRVSSPKAMFYRVRIKGTQDTLLDSTGNHYFLKCRIIGKVDFICGSAKSLYEKCRLQSIAENYGAIAAHHRDSPTDDTGFSFVSCSIRGSGSVYLGRAWGNYSRIIYSKCNMDGIINPQGWSDWNHSHRKKTAVFAEYQCKGRGADRRHRVPWSKSFSYPEASPFLYKSFIDGDQWLRL

SEQ ID NO: 58325 - protein, 361 aa, Glycine max
  peptide (1)..(361): Ceres Seq. ID no. 15171504
MMMMGLVSSRVVFLFVVSIFVIWAQVVDLAEGGAVRNYISWEDLQVNEQRLAVKSSHNQVRVITVNQNGGGHSKTVQGAVNMVPDNNRQRVKIFIFPGIYREKVRVPVTKPYVSFIGKRNRTASPIITWNSKSSDKGPNGTALGTYASATVGVDSDYFCATGITFENSVIASAGGKGMQGVALRVSSPKAMFYRVRIKGTQDTLLDSTGNHYFLKCRIIGKVDFICGSAKSLYEKCRLQSIAENYGAIAAHHRDSPTDDTGFSFVSCSIRGSGSVYLGRAWGNYSRIIYSKCNMDGIINPQGWSDWNHSHRKKTAVFAEYQCKGRGADRRHRVPWSKSFSYPEASPFLYKSFIDGDQWLRL

SEQ ID NO: 58326 - DNA, 1258 bp, Glycine max
  misc_feature (1)..(1258): Ceres Seq. ID no. 15170698
aaaaagacgatgatgtcgtcgcagaatgagaataggtcgttggaggaagctggaccctccggctcctccgatggaggggtaggagtgaattggctctgcatgagccctaagcgagatcacaaccccgaaaactatgacgaccttcaattcgagttcaatcctaatctcttcgcctctctcgagcactatttgcctcctcatatgctcaacctctcacgcgatgttaagcttcactacatcaggaacattcttcttcgctatttgcctgagaatgaccgcaactggattcaaaagctgagggaatacaggctaaagatcatattgaattatccatcgttgcataaggagatatttactatggatgctgagaactttttcgtaccatcatttctcagagcaattaaagaaaacacagaagcgaattttagaagtataatggctgaaccttgtaaaggagtttatacatttgaaatgcttcaaccgcaattttgtaaaaaactgatgtctgaggtggatcattttgaaagatgggtccatggtaccaaactcaaaatcatgcgtcctaatgcaatgaataaaaataaacatggtgttatccttgatgattttgcctttgaagccatgcttgacagatttatgtgtgatttcatacgtcctatatctcaagttttctaccctgaacttggtggatcctcattggactctcaccatggttttgttgttgaatatggaattaataaggatgtggaacttggcttacatgaggatgaggcagaagtcaccttaaatgtttgcttgggaaaagaattttctggtggagaactgttcttccagggtgttcgatgtgatgcacatgtaacatcaaatgcgcaaccagaggaggccttcaattattcccatgttccaggacacgcaattcttcatcctggtcgtaaccggcatggtgctagacctacaacatctgggaatcggatgaatttaattctctggtgtagaagttcggtgtttagagagttgaaaagatatcagagagatttttatagctggtgtggagaatgcaaacagaagaaggcggagagagtgtgtttgtcagttatggccaccaaacaggaattactgaagagcgaaatataattggcctcgtgaactttcacatgcaaattatgtttgtatagtttattcccaccattgaacttcttttctgtttctagattatggattatttttaacaaaatgaaatatattgaagttgcaagtc

SEQ ID NO: 58327 - protein, 377 aa, Glycine max
  peptide (1)..(377): Ceres Seq. ID no. 15170699
KKTMMSSQNENRSLEEAGPSGSSDGGVGVNWLCMSPKRDHNPENYDDLQFEFNPNLFASLEHYLPPHMLNLSRDVKLHYIRNILLRYLPENDRNWIQKLREYRLKIILNYPSLHKEIFTMDAENFFVPSFLRAIKENTEANFRSIMAEPCKGVYTFEMLQPQFCKKLMSEVDHFERWVHGTKLKIMRPNAMNKNKHGVILDDFAFEAMLDRFMCDFIRPISQVFYPELGGSSLDSHHGFVVEYGINKDVELGLHEDEAEVTLNVCLGKEFSGGELFFQGVRCDAHVTSNAQPEEAFNYSHVPGHAILHPGRNRHGARPTTSGNRMNLILWCRSSVFRELKRYQRDFYSWCGECKQKKAERVCLSVMATKQELLKSEI

SEQ ID NO: 58328 - protein, 374 aa, Glycine max
  peptide (1)..(374): Ceres Seq. ID no. 15170700
MMSSQNENRSLEEAGPSGSSDGGVGVNWLCMSPKRDHNPENYDDLQFEFNPNLFASLEHYLPPHMLNLSRDVKLHYIRNILLRYLPENDRNWIQKLREYRLKIILNYPSLHKEIFTMDAENFFVPSFLRAIKENTEANFRSIMAEPCKGVYTFEMLQPQFCKKLMSEVDHFERWVHGTKLKIMRPNAMNKNKHGVILDDFAFEAMLDRFMCDFIRPISQVFYPELGGSSLDSHHGFVVEYGINKDVELGLHEDEAEVTLNVCLGKEFSGGELFFQGVRCDAHVTSNAQPEEAFNYSHVPGHAILHPGRNRHGARPTTSGNRMNLILWCRSSVFRELKRYQRDFYSWCGECKQKKAERVCLSVMATKQELLKSEI

SEQ ID NO: 58329 - protein, 373 aa, Glycine max
  peptide (1)..(373): Ceres Seq. ID no. 15170701
MSSQNENRSLEEAGPSGSSDGGVGVNWLCMSPKRDHNPENYDDLQFEFNPNLFASLEHYLPPHMLNLSRDVKLHYIRNILLRYLPENDRNWIQKLREYRLKIILNYPSLHKEIFTMDAENFFVPSFLRAIKENTEANFRSIMAEPCKGVYTFEMLQPQFCKKLMSEVDHFERWVHGTKLKIMRPNAMNKNKHGVILDDFAFEAMLDRFMCDFIRPISQVFYPELGGSSLDSHHGFVVEYGINKDVELGLHEDEAEVTLNVCLGKEFSGGELFFQGVRCDAHVTSNAQPEEAFNYSHVPGHAILHPGRNRHGARPTTSGNRMNLILWCRSSVFRELKRYQRDFYSWCGECKQKKAERVCLSVMATKQELLKSEI

SEQ ID NO: 58330 - DNA, 1226 bp, Glycine max
  misc_feature (1)..(1226): Ceres Seq. ID no. 15178228
agtaaagaaaaaaaaagaagagaaaaccctattcactctgaaagtggcgaagatgagtttgggaaccgcggaggaggaatcgggttccgaaatccacatcccggcggaaatcgactggcacatgctggacaagtcaaaattcttcttcctgggtgcggccttattctccggcgtctcatgcgcactctatcccatggtggtgttgaagacgcggcaacaagtttcctcctcacgtttctcctgcctcaacatctcctgcgccattctccgccacgagggattccgcggcttctacaagggcttccccacctccctcatgggcaccatccccgcgcgtgccctctacatggcctccctcgagttcaccaagaccaacgttggcaccgctttcgtccaattcggcttctccgaaacctccgccgttgcggctgccaacgccgccgcgggcgtcacctccgccatggcggcgcagctcgtgtggacccccatcgacgtcgtgagtcagcggctcatggttcaggggagtggtgggagcaaaaccgtgctcgccaatctcaattctgaaaattacagaaacgggtttgatgcttttaggaaaattctgtgtgccgatggagcgagagggttttatagagggtttgggatttctatattgacttatgcgccttcaaatgctgtttggtggacttcttattctatggttcatagactcatttggggtgcttttggttcttacttggggaataataatttggggggagggtttaggcctgattcgaaggcaatggtggcggttcaagggttgagtgcggttatggcaagtggggtatctgcaattgtgacaatgccgcttgataccattaaaacgaggttgcaggtgttggatcttgaagagaatgggagaagaaggcctttgacttttgttcagacggtgaggaatttggtgaaggaaggtggtttggttgcttgttacagaggattgggtcccagatgggcttccatgtccatgtctgccacaactatgattactacatatgaatttttgaaacgaatgtctaccaagagtcaagaggatttcacttcatcataggccaggcagtgaaacattgttaggaattaggagcaacaatcaacttgtttctttgcttggatttttctctgtcagttgtactagtctagtctacctcatcggacactaaatacaatatgatgatgagagattgtac

SEQ ID NO: 58331 - protein, 362 aa, Glycine max
  peptide (1)..(362): Ceres Seq. ID no. 15178229
VKKKKEEKTLFTLKVAKMSLGTAEEESGSEIHIPAEIDWHMLDKSKFFFLGAALFSGVSCALYPMVVLKTRQQVSSSRFSCLNISCAILRHEGFRGFYKGFPTSLMGTIPARALYMASLEFTKTNVGTAFVQFGFSETSAVAAANAAAGVTSAMAAQLVWTPIDVVSQRLMVQGSGGSKTVLANLNSENYRNGFDAFRKILCADGARGFYRGFGISILTYAPSNAVWWTSYSMVHRLIWGAFGSYLGNNNLGGGFRPDSKAMVAVQGLSAVMASGVSAIVTMPLDTIKTRLQVLDLEENGRRRPLTFVQTVRNLVKEGGLVACYRGLGPRWASMSMSATTMITTYEFLKRMSTKSQEDFTSS

SEQ ID NO: 58332 - protein, 345 aa, Glycine max
  peptide (1)..(345): Ceres Seq. ID no. 15178230
MSLGTAEEESGSEIHIPAEIDWHMLDKSKFFFLGAALFSGVSCALYPMVVLKTRQQVSSSRFSCLNISCAILRHEGFRGFYKGFPTSLMGTIPARALYMASLEFTKTNVGTAFVQFGFSETSAVAAANAAAGVTSAMAAQLVWTPIDVVSQRLMVQGSGGSKTVLANLNSENYRNGFDAFRKILCADGARGFYRGFGISILTYAPSNAVWWTSYSMVHRLIWGAFGSYLGNNNLGGGFRPDSKAMVAVQGLSAVMASGVSAIVTMPLDTIKTRLQVLDLEENGRRRPLTFVQTVRNLVKEGGLVACYRGLGPRWASMSMSATTMITTYEFLKRMSTKSQEDFTSS

SEQ ID NO: 58333 - protein, 322 aa, Glycine max
  peptide (1)..(322): Ceres Seq. ID no. 15178231
MLDKSKFFFLGAALFSGVSCALYPMVVLKTRQQVSSSRFSCLNISCAILRHEGFRGFYKGFPTSLMGTIPARALYMASLEFTKTNVGTAFVQFGFSETSAVAAANAAAGVTSAMAAQLVWTPIDVVSQRLMVQGSGGSKTVLANLNSENYRNGFDAFRKILCADGARGFYRGFGISILTYAPSNAVWWTSYSMVHRLIWGAFGSYLGNNNLGGGFRPDSKAMVAVQGLSAVMASGVSAIVTMPLDTIKTRLQVLDLEENGRRRPLTFVQTVRNLVKEGGLVACYRGLGPRWASMSMSATTMITTYEFLKRMSTKSQEDFTSS

SEQ ID NO: 58334 - DNA, 2100 bp, Glycine max
  misc_feature (1)..(2100): Ceres Seq. ID no. 15176685
ttttttctggtgattggaaacattttttttttttgaggaagataataatgggagcggtttgttcggctggtatggtggagaaaaatggtgaacttggagggaagagtttggggttttctgggaagcttaagaaggaaaatagctttgtgaatcggagagaagctttttcagattcaaggtctaatagtggtcatgatagaaagaaaaagaagcatgatactgggttttcccgtgaacttggtctatcgattccttcacctgggggaaaacaggtgaaccagaggggttcttttctgggaaaagcaggtgagagagcagtggaagttctggacacaattggaagtggcatgccaaagttaaacactaatactgggtttgtctctggcacaacttttagagggaataagatatcaatactggcattcgaagtagctaatacaataaccaaaggagcaattttgtttcaatcacttgctgaagaaaacattcagttccttaaaaatgaggttttacaatcggagggggttcagctattggtatcgaatgatgtggagaagttaataactcttgctgaggctgacaaaagggaagaactcaatgtcttctcaagggaagtaattaggtttggaaatatgtgtaaagatccacagtggcacaacctagacagatatttctcaagattagactttgatgtcctggatgacaaacgatatcaggaagatgcagaaaagacgatgcaggagtttaccagcctagttcggaatactgctgaattataccatgagttaaatgcttatgaacgttttgaacaagattatctgcaaaagattaaggaaatggagtccttaaatcttcctctaaaaggggagagtatcacaatgtttcaaagtgagctaaagcaccaaagaaagcttgtgaggagcttgaaaaagaagtctctttggtccagaactttggaagagatagttgaaaagcttgtagatattgttacctatatacatcaagcaatttatgagttcgctggaaatcatggtacagctgcaaccaagcacagtgagggttctgaaagactaggagaagctggtcttgcactgcactatgctaacatcatcaatcagataaatatggttgcatctcgcccaactgctcttcctccaaacaccagagacacattgtatcatggtttgcccaacaatattaaggctgctcttccatcccagttgcaaaccattggtgacatgaaagagctctccatcactcggatcaaagctgaaatggataagattcttcagtggcttgcaccacttgctacaaatacagtcaaagcacatcaaggtttcggatgggttggtgaatgggcaaacgcaagtaatgactttggtgataacacctccaaagaaagtaacctgattcgcctggagacactttattacgctgataagaggaagatagatgtttacatcattgaattgttggcatggcttcaccatttgattagctctgtaaaatctagacagaataccttgagaccaatgcctacaacacggtctcctccaaaaggactcgaacttcagtctaagatgcgacagtttttaattctatctgtggatagtagcaacaagccgttgggaactcaaatttctcatgaggataggagactattggaggaggttattgcaaggagaaagagtccaggacttagcaaaagtgaggatcttggtttggccaagaaaagacacgtcaaacatttgcaagtgaccaaaagtgctgggagttcacctgccaaggaattcttcggtacaagacaagtctttaaccaccaaaactataacgttttggatattatggatgggttgggttactgaaatcttcatctacactcaattgtggttctcacttgtcacctctcagctctgtttttctgctagaattcttactagcccagtctttcttaaggataatattcaacattcatttctatacatagctctagttatgtatatatctatataaacgactaacgccagattcttttaactttataaattaattttgtacaggggatgaaggaaatagttgaattccatttctataaaaaag

SEQ ID NO: 58335 - protein, 620 aa, Glycine max
  peptide (1)..(620): Ceres Seq. ID no. 15176686
FSGDWKHFFFLRKIIMGAVCSAGMVEKNGELGGKSLGFSGKLKKENSFVNRREAFSDSRSNSGHDRKKKKHDTGFSRELGLSIPSPGGKQVNQRGSFLGKAGERAVEVLDTIGSGMPKLNTNTGFVSGTTFRGNKISILAFEVANTITKGAILFQSLAEENIQFLKNEVLQSEGVQLLVSNDVEKLITLAEADKREELNVFSREVIRFGNMCKDPQWHNLDRYFSRLDFDVLDDKRYQEDAEKTMQEFTSLVRNTAELYHELNAYERFEQDYLQKIKEMESLNLPLKGESITMFQSELKHQRKLVRSLKKKSLWSRTLEEIVEKLVDIVTYIHQAIYEFAGNHGTAATKHSEGSERLGEAGLALHYANIINQINMVASRPTALPPNTRDTLYHGLPNNIKAALPSQLQTIGDMKELSITRIKAEMDKILQWLAPLATNTVKAHQGFGWVGEWANASNDFGDNTSKESNLIRLETLYYADKRKIDVYIIELLAWLHHLISSVKSRQNTLRPMPTTRSPPKGLELQSKMRQFLILSVDSSNKPLGTQISHEDRRLLEEVIARRKSPGLSKSEDLGLAKKRHVKHLQVTKSAGSSPAKEFFGTRQVFNHQNYNVLDIMDGLGY

SEQ ID NO: 58336 - protein, 605 aa, Glycine max
  peptide (1)..(605): Ceres Seq. ID no. 15176687
MGAVCSAGMVEKNGELGGKSLGFSGKLKKENSFVNRREAFSDSRSNSGHDRKKKKHDTGFSRELGLSIPSPGGKQVNQRGSFLGKAGERAVEVLDTIGSGMPKLNTNTGFVSGTTFRGNKISILAFEVANTITKGAILFQSLAEENIQFLKNEVLQSEGVQLLVSNDVEKLITLAEADKREELNVFSREVIRFGNMCKDPQWHNLDRYFSRLDFDVLDDKRYQEDAEKTMQEFTSLVRNTAELYHELNAYERFEQDYLQKIKEMESLNLPLKGESITMFQSELKHQRKLVRSLKKKSLWSRTLEEIVEKLVDIVTYIHQAIYEFAGNHGTAATKHSEGSERLGEAGLALHYANIINQINMVASRPTALPPNTRDTLYHGLPNNIKAALPSQLQTIGDMKELSITRIKAEMDKILQWLAPLATNTVKAHQGFGWVGEWANASNDFGDNTSKESNLIRLETLYYADKRKIDVYIIELLAWLHHLISSVKSRQNTLRPMPTTRSPPKGLELQSKMRQFLILSVDSSNKPLGTQISHEDRRLLEEVIARRKSPGLSKSEDLGLAKKRHVKHLQVTKSAGSSPAKEFFGTRQVFNHQNYNVLDIMDGLGY

SEQ ID NO: 58337 - protein, 597 aa, Glycine max
  peptide (1)..(597): Ceres Seq. ID no. 15176688
MVEKNGELGGKSLGFSGKLKKENSFVNRREAFSDSRSNSGHDRKKKKHDTGFSRELGLSIPSPGGKQVNQRGSFLGKAGERAVEVLDTIGSGMPKLNTNTGFVSGTTFRGNKISILAFEVANTITKGAILFQSLAEENIQFLKNEVLQSEGVQLLVSNDVEKLITLAEADKREELNVFSREVIRFGNMCKDPQWHNLDRYFSRLDFDVLDDKRYQEDAEKTMQEFTSLVRNTAELYHELNAYERFEQDYLQKIKEMESLNLPLKGESITMFQSELKHQRKLVRSLKKKSLWSRTLEEIVEKLVDIVTYIHQAIYEFAGNHGTAATKHSEGSERLGEAGLALHYANIINQINMVASRPTALPPNTRDTLYHGLPNNIKAALPSQLQTIGDMKELSITRIKAEMDKILQWLAPLATNTVKAHQGFGWVGEWANASNDFGDNTSKESNLIRLETLYYADKRKIDVYIIELLAWLHHLISSVKSRQNTLRPMPTTRSPPKGLELQSKMRQFLILSVDSSNKPLGTQISHEDRRLLEEVIARRKSPGLSKSEDLGLAKKRHVKHLQVTKSAGSSPAKEFFGTRQVFNHQNYNVLDIMDGLGY

SEQ ID NO: 58338 - DNA, 1118 bp, Glycine max
  misc_feature (1)..(1118): Ceres Seq. ID no. 14315080
actggaaattatgcttccaatatggaaaattttagacagcattctgcaactgtcacttctgctcctggtggtttgttatctactgcacctactgtgcaaataccatctgcctctcattcaacttcatcgatatcaggcttcccccttgactctcttgaaacagccaagagtggcaatcaagtcattaatcttgttaagccttctactttttttgcatcaacgtcttcatcttcactgttagttccacctatttattcatctgtgccgcctagtgcagttgttcatcattccctgaatgtgccacgccaatacggcactccagtacttcaacccttccctccccctaatcctcctctttctcttacccctatttcaagctccactccaaatagacctgtaatcagcagggataatgtccgtgatgcacttttatcattggttcaggaggatcatttcattgacatgatgttccaggcattactgaaggtgagtcattcatgagtaatcaaactctgaaggttggatggaaactgcatataaagttagttctgtatattgtagttacacaccatcacatctaacaagaggtgtaacctagtagtccgtctttagctttagccacaactttgcacgatacatctgaaatggcctattgcacaatatactaacaaatcatatggtgcattaatacactataatcttcaccactgaatttatgtgtgtctacgtgaacaagttacaagagaaaacaatggtaaaaatatagaatgatcttaatcgctaagttgatataacgattgctccacgtttacacacaaaaactaatggtgaaggtgctgtgtattcttacactgtaactctgttgtgtattgtagaaatagtcgtctgtatctgcaaaatgataaaagtgtttcgatgtcagtgtcgccttattaccctttgttgtcttgtctgtactttgtggttttaaatactgtcatggttctgtcgattgagtctttgcattaagttggacaagtcctctctatcgaccaatgaagatgcatgtataatcccatgcttagtatgcattttgatataaataaataaaaatttacctttcaatttagtccttaaag

SEQ ID NO: 58339 - protein, 166 aa, Glycine max
  peptide (1)..(166): Ceres Seq. ID no. 14315081
TGNYASNMENFRQHSATVTSAPGGLLSTAPTVQIPSASHSTSSISGFPLDSLETAKSGNQVINLVKPSTFFASTSSSSLLVPPIYSSVPPSAVVHHSLNVPRQYGTPVLQPFPPPNPPLSLTPISSSTPNRPVISRDNVRDALLSLVQEDHFIDMMFQALLKVSHS

SEQ ID NO: 58340 - protein, 159 aa, Glycine max
  peptide (1)..(159): Ceres Seq. ID no. 14315082
MENFRQHSATVTSAPGGLLSTAPTVQIPSASHSTSSISGFPLDSLETAKSGNQVINLVKPSTFFASTSSSSLLVPPIYSSVPPSAVVHHSLNVPRQYGTPVLQPFPPPNPPLSLTPISSSTPNRPVISRDNVRDALLSLVQEDHFIDMMFQALLKVSHS

SEQ ID NO: 58341 - DNA, 1506 bp, Glycine max
  misc_feature (1)..(1506): Ceres Seq. ID no. 14311609
acatgctcataatttagaccaagtctatatcatgagcttaatttggaccactttacttgttgatgcttgtgttgattctatttggacagtaaccaatgtggcttttacccttttgcattcaagatgcagttaaataggtagaataacggatgacaagtgaataatttctaaaattgattgcctttttttgctacagatttgaacctgatatgcttgcattttctggatgtgattatggtggaggggagaaggagcagaaggaactgggtgcaataagaaggaggtggaagacattacatagaagcaatcctgatagggcaaggaggcaggggagatgcccattaacccccgaagaagttggtctcatgctaagagcattgggatatggttctgacattcatatttacgttgcatcaggggaggtatatggaggggaaagaacattggcacctctcaaagcattatttcctaatttccattcaaaagagaccattgctaccaaggaagaattagaaccgttttcttcattttcttctcgcatggctgcactcgacttcattgtttgtgatgaaagtgatgtttttgtaaccaataataatggaaatatggcaaaaatattggctggacgaaggagatactttggccataaaccaaccattcgtccaaatgctaaaaaactttatcgattgttcttgaatagaagtaattcgacttgggaagcttttgcttctagtgtccgaactttccagaaaggcttcatgggagagccaaaggaggttagaccaggtagaggcgggtttcatgagaatccatcatcatgcatatgtgaagattctgcagcagccaaagtggacaaaaattcacaatctagaaaatatgggaaggataatacaacgaagaaaaatgtagcaaatgatgaactggatgttgacaatgtgtctgagtggccagacatggatgatgatgatgatgatcagaatgatctagcagagaagggtacattcaatgaaacaattttggattatgatgctctgaacttcgaggatcccgagttggaggaaattatatcagattagtgaaggtgctttattcagtgctgtacctgttgacttattatggttctttgccagctccatttgacagctgcttataaagctcaaaaacaggaacagaaaaggcacgactttctcgatactggccgaactatagtaaaaagacatctcaaaaatttaatcatacgttcatcttttctgcatttctaaggacataatggtctcagtttgatgctgaatttttggagtgtttagacttgtacgaatctgtaaagaggttatcagaagcgagcaatggaagtagagttagaggacatccatccgaatatagctgcacacaaaattgagtttgctaggaagtaggaaaatctgtatatcttttgcagttgatagactgtacacctttgttcctgtctttcattgacattgatgcagtcaacttctcttttagaac

SEQ ID NO: 58342 - protein, 288 aa, Glycine max
  peptide (1)..(288): Ceres Seq. ID no. 14311610
MLAFSGCDYGGGEKEQKELGAIRRRWKTLHRSNPDRARRQGRCPLTPEEVGLMLRALGYGSDIHIYVASGEVYGGERTLAPLKALFPNFHSKETIATKEELEPFSSFSSRMAALDFIVCDESDVFVTNNNGNMAKILAGRRRYFGHKPTIRPNAKKLYRLFLNRSNSTWEAFASSVRTFQKGFMGEPKEVRPGRGGFHENPSSCICEDSAAAKVDKNSQSRKYGKDNTTKKNVANDELDVDNVSEWPDMDDDDDDQNDLAEKGTFNETILDYDALNFEDPELEEIISD

SEQ ID NO: 58343 - protein, 236 aa, Glycine max
  peptide (1)..(236): Ceres Seq. ID no. 14311611
MLRALGYGSDIHIYVASGEVYGGERTLAPLKALFPNFHSKETIATKEELEPFSSFSSRMAALDFIVCDESDVFVTNNNGNMAKILAGRRRYFGHKPTIRPNAKKLYRLFLNRSNSTWEAFASSVRTFQKGFMGEPKEVRPGRGGFHENPSSCICEDSAAAKVDKNSQSRKYGKDNTTKKNVANDELDVDNVSEWPDMDDDDDDQNDLAEKGTFNETILDYDALNFEDPELEEIISD

SEQ ID NO: 58344 - protein, 178 aa, Glycine max
  peptide (1)..(178): Ceres Seq. ID no. 14311612
MAALDFIVCDESDVFVTNNNGNMAKILAGRRRYFGHKPTIRPNAKKLYRLFLNRSNSTWEAFASSVRTFQKGFMGEPKEVRPGRGGFHENPSSCICEDSAAAKVDKNSQSRKYGKDNTTKKNVANDELDVDNVSEWPDMDDDDDDQNDLAEKGTFNETILDYDALNFEDPELEEIISD

SEQ ID NO: 58345 - DNA, 1403 bp, Glycine max
  misc_feature (1)..(1403): Ceres Seq. ID no. 15225368
ccccccctcgagtcagctacgtaggccccccccccattcatagaacagcacttaatcaagaaggacgttacctcggttaatttcattttctagattgcttatcagtctccaagttgagactttctgagtcagtacacttggatcactacctctggcattggcagagtattccttcaaaggggtaattcatcgtccaaaaattgttggggacaccttgtctttcgagggattgtttgctctacacaaggaattaaacgttatagaatttagtctgcagagaaatttgcaattctgatcagccacattttacctcacttacatccagcatcccaacgatcctgcaacattggtaattacctcatgagattgaggcgtgatatctttgtgtgctgtttcactagcacatcttcagacacaatgcaaaaggaaaagcacagtaagttgaagtggcgaatctttccctacaaggaacttagaaaagccacaaataattttgatcgatttcatttcattggaaagagaggtggaaagacaggccttatcactcaatatcacggttagactatgctgtagccttttatgtgactaagagcctttcatattaagtgttttgagcattgttatttaattaaaattagaatttttccttagtaattcacacaatcaagattgaaattcaaatttggcattaaatacctaagtaaatctataattttgattaacataatcactaaaaggactacatatacctcatgtttttgcattgaacagtttcttctgattatctacattgttataggaaaacttgaggatggacgtgagattacaattcagcgctttaacggagaccagcgctacttattacaacagtttatcaatgaaactattatcctaaattacttgcctcacaaaaatattgtgtcaatttacgggtgtgcttctcatcatgaggaatctctgctagtgacagaatacctatccaatggcaatcttgctgctcatcttcatagtgaaaaggacgaaaagattacactaccttggcttaaacgattggatatagcatttgatattgcaaatgcattgaaccatcttcacaattatggcatcatccaccgcaatgtgaagtccagtaatattttcctagatgcgaacttttgtgcaaaagttggtaaccttcttttgtcgcagaaacttccagatggagttccggtgcatgcgacccatgttactggtgatagggcagggtcaagtggttatatggacccagagtatttgacaaaaggccaacttagcgtaaaaaatgatgtttatagctttggggtggttttgtgtgagcttctatcatcgacgctggcaaaagactggtttctgaatgaagaggataatattgctaccgttttttg

SEQ ID NO: 58346 - protein, 66 aa, Glycine max
  peptide (1)..(66): Ceres Seq. ID no. 15225369
MRLRRDIFVCCFTSTSSDTMQKEKHSKLKWRIFPYKELRKATNNFDRFHFIGKRGGKTGLITQYHG

SEQ ID NO: 58347 - protein, 47 aa, Glycine max
  peptide (1)..(47): Ceres Seq. ID no. 15225370
MQKEKHSKLKWRIFPYKELRKATNNFDRFHFIGKRGGKTGLITQYHG

SEQ ID NO: 58348 - protein, 48 aa, Glycine max
  peptide (1)..(48): Ceres Seq. ID no. 15225371
MDPEYLTKGQLSVKNDVYSFGVVLCELLSSTLAKDWFLNEEDNIATVF

SEQ ID NO: 58349 - DNA, 1329 bp, Glycine max
  misc_feature (1)..(1329): Ceres Seq. ID no. 12582113
cagctacgtaggccccccccccgaaaaactattcatttcttcatcagcaacttcacggaggagagaaaggcatggctggcaatataatagcttcatcagtgcccaagagcgtccaagaaatgtccatggatggtgatgaaccaccatcaagatatgtagttaatggaaatagctttggatctaaagattcttctgtacagtttccaatacccatcattgatgtgcgtctcctctcatcagaagatgagctagagaagcttagatctgctctaagttcagctggatgcttccaggcaattggtcatggaatgtcaagttcatatcttgacaatatacgagaaactgcaaaacaattttttgcactcccagaagaggaaaagcagaagtatgctcgagctgttaatgaatctgaagggtatggaaatgacagagtagtttcagacaaacaggtccttgactggtcctatcgcctaacacttcgagtttttccagaaacaaaacgaaggctttctctttggccaaaaattcctactgattttagtgagaaattagaggagttttctacgaaagtgaaatcaatgatggaatatctcttgagatgcatggcgaggtcactgaatttggaagagggtagcttcgtggaccagtttggggaacaaccgttgatgctatcgaggttcaacttctatccactttgttctagacctgatttggttcttggcgtcaaacctcatacagatagatcaggaatcacagtcctgttgcaagacaaagaagtggaaggtcttcaagttttgatagatgacaattggatcaatgtccccacaatgcctgatgctcttgttgtcaaccttggcgatcaaatgcagatcatgagtaatggaatattcaagagcataatgcacagggttgtgaccaatacagaaaagctgaggatgtctgtagcaatgtttaatgagccagaggccgagaacgagattggacctgtagaaggtctaatagatgagtcacggccaaggttatacagaaacgttaaaaattatggtgatatcaactacaagtgttatcaagagggaaagattgcactagagactgtcaaaattgcagataactctaatcagaggtgagactgtttcatatttgaattcccaaaagacaagattcatctagaccagccggttggaaagtacattaaagtttttgtaatttaagtcaaaccaatgaactaacagaaaaaaaatatgtatggttctcttactgtgaaaccgtaactagtcatacatttcaatctcgcaaaaaaaaaaaaaaaaagaattcctgcagcccggg

SEQ ID NO: 58350 - protein, 351 aa, Glycine max
  peptide (1)..(351): Ceres Seq. ID no. 12582114
MAGNIIASSVPKSVQEMSMDGDEPPSRYVVNGNSFGSKDSSVQFPIPIIDVRLLSSEDELEKLRSALSSAGCFQAIGHGMSSSYLDNIRETAKQFFALPEEEKQKYARAVNESEGYGNDRVVSDKQVLDWSYRLTLRVFPETKRRLSLWPKIPTDFSEKLEEFSTKVKSMMEYLLRCMARSLNLEEGSFVDQFGEQPLMLSRFNFYPLCSRPDLVLGVKPHTDRSGITVLLQDKEVEGLQVLIDDNWINVPTMPDALVVNLGDQMQIMSNGIFKSIMHRVVTNTEKLRMSVAMFNEPEAENEIGPVEGLIDESRPRLYRNVKNYGDINYKCYQEGKIALETVKIADNSNQR

SEQ ID NO: 58351 - protein, 335 aa, Glycine max
  peptide (1)..(335): Ceres Seq. ID no. 12582115
MSMDGDEPPSRYVVNGNSFGSKDSSVQFPIPIIDVRLLSSEDELEKLRSALSSAGCFQAIGHGMSSSYLDNIRETAKQFFALPEEEKQKYARAVNESEGYGNDRVVSDKQVLDWSYRLTLRVFPETKRRLSLWPKIPTDFSEKLEEFSTKVKSMMEYLLRCMARSLNLEEGSFVDQFGEQPLMLSRFNFYPLCSRPDLVLGVKPHTDRSGITVLLQDKEVEGLQVLIDDNWINVPTMPDALVVNLGDQMQIMSNGIFKSIMHRVVTNTEKLRMSVAMFNEPEAENEIGPVEGLIDESRPRLYRNVKNYGDINYKCYQEGKIALETVKIADNSNQR

SEQ ID NO: 58352 - protein, 333 aa, Glycine max
  peptide (1)..(333): Ceres Seq. ID no. 12582116
MDGDEPPSRYVVNGNSFGSKDSSVQFPIPIIDVRLLSSEDELEKLRSALSSAGCFQAIGHGMSSSYLDNIRETAKQFFALPEEEKQKYARAVNESEGYGNDRVVSDKQVLDWSYRLTLRVFPETKRRLSLWPKIPTDFSEKLEEFSTKVKSMMEYLLRCMARSLNLEEGSFVDQFGEQPLMLSRFNFYPLCSRPDLVLGVKPHTDRSGITVLLQDKEVEGLQVLIDDNWINVPTMPDALVVNLGDQMQIMSNGIFKSIMHRVVTNTEKLRMSVAMFNEPEAENEIGPVEGLIDESRPRLYRNVKNYGDINYKCYQEGKIALETVKIADNSNQR

SEQ ID NO: 58353 - DNA, 1398 bp, Glycine max
  misc_feature (1)..(1398): Ceres Seq. ID no. 13639476
aaacgcatagcgcgaatttacaaaactagccaggaacaggccctgtctttccgatattcaccatctctttctctctaatccaaaaaaaaatctgttgtgaacaaacacacattattgtttgttttcatcccacggaaaaatcgatcaggcaaaacaaacaaaggtgaaactgaataggtgcgtgtttgtgttgatgggctaagaggacagagaaaaagaaagaaagagtataaaatcaaatctggcaaatctcgtggggttgagggctcggtcttcgtcgaagcaagcttcccctgatttgcaggacgacgaggaggagtgcaggccttggcgtcgaaggttaataatgtctttctcctggtcctccacccttaggatcaccatcctcctcctcctcctcgccgcggtcatcgtcgcgtgcttcactctccccatcgaaaagatgatgaaggacttcttattatgggtcgatcacgatcttggcccctggggcccacttgttctggctgttgcttacattcctttgactgtcttggctgttccagcttcagtgcttactcttggtggaggttatctttttgggcttccggtgggatttgttgttgactctataggtgcaactgttggtgccggagctgcatttcttcttggtagaacaattgggagatcatttgtcgtttctaggttgaaggattatccacaattcagatcagtggcaattgcaattcgaagatctggttttaagattgtattactgcttcggcttgttccactcctaccgtttaacatgctaaattatctcttgtcggtgactcctgtttcaataggggaatacatgctggcttcctggttaggaatgatgccaataacactggcacttgtatatgttggaacaactcttaaagatctttctgatgttacacatggttggggcgagttctcaaagactcgttgggcgtttatcattcttggtcttgtgatatcggttgttctgatgatatgtgttactagagttgccaaggctgctttagataaagccttggccgaaaatgaagatattgatgggattacttcctcgccagatttacctattgttgctgaaccatcagcagatcttaaccaacctctcataattaagatagattcttctgaagacagtcatgaaaagtgaattctattttgtgtaaattctttcttcactctaccttttataaaggctatggttttaattttaagctttagcggtagctggttgcttctatttattcgcgatttgtacagtttcaacattagaaatatagtttgtgacaggagtgtttaatcctaattcctacaaccaacatgacattatggactttgtgttttatttcttttgacagcagaaaagttcatgctatg

SEQ ID NO: 58354 - protein, 274 aa, Glycine max
  peptide (1)..(274): Ceres Seq. ID no. 13639477
MSFSWSSTLRITILLLLLAAVIVACFTLPIEKMMKDFLLWVDHDLGPWGPLVLAVAYIPLTVLAVPASVLTLGGGYLFGLPVGFVVDSIGATVGAGAAFLLGRTIGRSFVVSRLKDYPQFRSVAIAIRRSGFKIVLLLRLVPLLPFNMLNYLLSVTPVSIGEYMLASWLGMMPITLALVYVGTTLKDLSDVTHGWGEFSKTRWAFIILGLVISVVLMICVTRVAKAALDKALAENEDIDGITSSPDLPIVAEPSADLNQPLIIKIDSSEDSHEK

SEQ ID NO: 58355 - protein, 242 aa, Glycine max
  peptide (1)..(242): Ceres Seq. ID no. 13639478
MMKDFLLWVDHDLGPWGPLVLAVAYIPLTVLAVPASVLTLGGGYLFGLPVGFVVDSIGATVGAGAAFLLGRTIGRSFVVSRLKDYPQFRSVAIAIRRSGFKIVLLLRLVPLLPFNMLNYLLSVTPVSIGEYMLASWLGMMPITLALVYVGTTLKDLSDVTHGWGEFSKTRWAFIILGLVISVVLMICVTRVAKAALDKALAENEDIDGITSSPDLPIVAEPSADLNQPLIIKIDSSEDSHEK

SEQ ID NO: 58356 - protein, 241 aa, Glycine max
  peptide (1)..(241): Ceres Seq. ID no. 13639479
MKDFLLWVDHDLGPWGPLVLAVAYIPLTVLAVPASVLTLGGGYLFGLPVGFVVDSIGATVGAGAAFLLGRTIGRSFVVSRLKDYPQFRSVAIAIRRSGFKIVLLLRLVPLLPFNMLNYLLSVTPVSIGEYMLASWLGMMPITLALVYVGTTLKDLSDVTHGWGEFSKTRWAFIILGLVISVVLMICVTRVAKAALDKALAENEDIDGITSSPDLPIVAEPSADLNQPLIIKIDSSEDSHEK

SEQ ID NO: 58357 - DNA, 1217 bp, Glycine max
  misc_feature (1)..(1217): Ceres Seq. ID no. 15227285
cccgggccccccctcgagtcagctgcaggcccccccccccccaacagcactgagtaacggcaaagtccttgctggttgcttccattcgcgatggcgttgcaggagaggctagacaagttcaagaaacagcaagagaagtgccaaacgacactttcgaccattgcagctaccaaggccgccgcggcaacccaaaagtccgccacacatgcctcggcaaatggaagaaacgctgcccctgcggttaagttttccaacgacaccgagaggcttcagcatattaatagcattcgcaaggcccctgtgggtgctcagatgaagcgtgttattgatcttcttctagagacacgacaagcttttacaccggagcagataaatgaggcatgctatgtcgacatgaaggctaacaaagatgtctttgagaatctgaggaaaaacccaaaagtgaactatgatgggcaacgattatcttacaagtcaaagtatggtattaaggacaaaacagagcttcttcaactggtacgaaagtatcccgagggccttgctgttattgatctcaaggatgcttaccccactgtgatggaagatttgcaggctatgaaagctgcagggcagatttggcttctgtccaacttcgattcacaggaagacattgcctaccctaacgaccccaaagtacacattaaggtggatgatgacctaaaacatcttttccgcagtattgaattgcctcgtgatatgattgatatagagaaggatcttcaaaagaatggaatgaagcccgctaccaacactgcacagaggaggagtgcagctcaaattcaaggcatttcttccaagccaaagcctaagaagaagaagagtgaaatcagcaagagaacgaagcttaccaatgctcatcttccagagctctttcagaatttaaacagttcctgattaactctcatcaagtggttgtgtagttcaaatagatactttatcagccagtctaaactagattagcattgtgaaatattcaggaggttcttgctgctgtgccctacttttatttgtttttttattttatttttttttatttctgtacatcgaggctgcagctaatggactattgtactcgtcctaatttgtgaatccttgtatattatcatcatgttgcatttaaatttttagtcttgcaagtttataaaaaaaaaaaaaaaaaagaattcctgcwgcccttt

SEQ ID NO: 58358 - protein, 280 aa, Glycine max
  peptide (1)..(280): Ceres Seq. ID no. 15227286
MALQERLDKFKKQQEKCQTTLSTIAATKAAAATQKSATHASANGRNAAPAVKFSNDTERLQHINSIRKAPVGAQMKRVIDLLLETRQAFTPEQINEACYVDMKANKDVFENLRKNPKVNYDGQRLSYKSKYGIKDKTELLQLVRKYPEGLAVIDLKDAYPTVMEDLQAMKAAGQIWLLSNFDSQEDIAYPNDPKVHIKVDDDLKHLFRSIELPRDMIDIEKDLQKNGMKPATNTAQRRSAAQIQGISSKPKPKKKKSEISKRTKLTNAHLPELFQNLNSS

SEQ ID NO: 58359 - protein, 206 aa, Glycine max
  peptide (1)..(206): Ceres Seq. ID no. 15227287
MKRVIDLLLETRQAFTPEQINEACYVDMKANKDVFENLRKNPKVNYDGQRLSYKSKYGIKDKTELLQLVRKYPEGLAVIDLKDAYPTVMEDLQAMKAAGQIWLLSNFDSQEDIAYPNDPKVHIKVDDDLKHLFRSIELPRDMIDIEKDLQKNGMKPATNTAQRRSAAQIQGISSKPKPKKKKSEISKRTKLTNAHLPELFQNLNSS

SEQ ID NO: 58360 - protein, 179 aa, Glycine max
  peptide (1)..(179): Ceres Seq. ID no. 15227288
MKANKDVFENLRKNPKVNYDGQRLSYKSKYGIKDKTELLQLVRKYPEGLAVIDLKDAYPTVMEDLQAMKAAGQIWLLSNFDSQEDIAYPNDPKVHIKVDDDLKHLFRSIELPRDMIDIEKDLQKNGMKPATNTAQRRSAAQIQGISSKPKPKKKKSEISKRTKLTNAHLPELFQNLNSS

SEQ ID NO: 58361 - DNA, 1195 bp, Glycine max
  misc_feature (1)..(1195): Ceres Seq. ID no. 13581579
cagctacgtaggccccccccccggaagttccacttaagacatcactcacttccccctctctgctttttgcagtcctcctttacctgcaaaaacagcaaatggctctgcttaacctcatacttgtctggttatttttcttgagtctgtgtctttattcgtgtcctacttcggcccagttaagtagacaccactatgcaaaaacttgccccaatgtagaaaacattgtcagagaagcagtcaaaaagaagtttcatcaaacatttgttacggtccctgccaccattcgtctcttcttccatgattgcttcgtgcagggctgtgatgcctcggttttggttgcatccacaaaaaacaacaaagcagagaaggatcaccctgataatctttcactagctggagatgggtttgatacagtgattaaagcaaaagaagcagtggatgcagttccattgtgcaggaacaaagtttcatgtgctgatattttagctatggcaacccgtgatgttattgcactggctggtgggcctttctacgaggttgaattgggaagatttgatgggctaagatctaaatcttcagatgtaaataggaggctgcctcaggcagagttcaacttgaaccagctgaattcactgtttgcggccaacggcctcacccaaactgaaatgatagctctgtcaggtgctcacactgttggattctcccattgcaacaaattcacgaacagagtatacaatttcaagagcaaaagtcgagtggaccctacactgaacgagaaatacgcaacacagctaaggtcaatgtgcccaaggaatgtggatccaaggattgcaatcgatatggacccaaccactccacggtcattcgacaatgtttatttcaagaatcttcagcaagggaagggcctcttctcttcagaccaagttctcttcacggactcaagatccaaggccacagtaaatgcctttgctagtagcagcaatatctttcatgccaacttcgctgctgccatgaccaaattgggccgagttggagtcaagaatgcacagaatggaaacattcgcaccgattgttctgtcatttaatttacgataaaaacaactcatgttaaggagggacattattatctagtcaggggaattcgttatgtatattatttaccctgtgtttaaaataataagtactgaaagtattt

SEQ ID NO: 58362 - protein, 328 aa, Glycine max
  peptide (1)..(328): Ceres Seq. ID no. 13581580
MALLNLILVWLFFLSLCLYSCPTSAQLSRHHYAKTCPNVENIVREAVKKKFHQTFVTVPATIRLFFHDCFVQGCDASVLVASTKNNKAEKDHPDNLSLAGDGFDTVIKAKEAVDAVPLCRNKVSCADILAMATRDVIALAGGPFYEVELGRFDGLRSKSSDVNRRLPQAEFNLNQLNSLFAANGLTQTEMIALSGAHTVGFSHCNKFTNRVYNFKSKSRVDPTLNEKYATQLRSMCPRNVDPRIAIDMDPTTPRSFDNVYFKNLQQGKGLFSSDQVLFTDSRSKATVNAFASSSNIFHANFAAAMTKLGRVGVKNAQNGNIRTDCSVI

SEQ ID NO: 58363 - protein, 198 aa, Glycine max
  peptide (1)..(198): Ceres Seq. ID no. 13581581
MATRDVIALAGGPFYEVELGRFDGLRSKSSDVNRRLPQAEFNLNQLNSLFAANGLTQTEMIALSGAHTVGFSHCNKFTNRVYNFKSKSRVDPTLNEKYATQLRSMCPRNVDPRIAIDMDPTTPRSFDNVYFKNLQQGKGLFSSDQVLFTDSRSKATVNAFASSSNIFHANFAAAMTKLGRVGVKNAQNGNIRTDCSVI

SEQ ID NO: 58364 - DNA, 1432 bp, Glycine max
  misc_feature (1)..(1432): Ceres Seq. ID no. 14312851
attactgatatttctctgttaatattctgctccaattacccttctaaatctttgcgctcacttgtcagtatctttcctttgttctgcactgcttttcttgtgcatagtagtaagtgataatgctttgaattcgatgatctttctttcttcaggacgatggccgctacttttaaacaccatcctacgggacttcacggttggggcgctccgagatcttctagaaatctcccaagcttcttctcaatgcgtttcccctgcagcactcgccaccatcacattcgtgcttccgtttctcaccactcatcaaccgaggctgagagtgctttgatattgattcgtcatggggagtctttgtggaatgagaagaacttgttcacgggatgttgcgatgtacctttgaccaatagaggtgtagaggaagctattgaagctggtcagaggattagctatatacccattgatatgatctttacgtccgcactcattcgtgcacagatgaccgctatgcttgcaatgactcagcactcccagaagaaggttcctattatcatccatgatgagagtgaacaggcaacaacttggactcaagtttacagtgaaaaaaccaccaagcaatctattccagttattacagcatggcagttgaatgaaagaatgtatggggagttacagggtcttaataagcaggagactgcagaaagatacggaaaggagaaggtgcatgaatggcgtcggagttttgacattcctcctcccaagggtgagagcctggaaatgtgttttcagagagctgttccgtattttaaagattttattgaaccccaactaaaatcaggaaagcacgtgatggttgctgctcatggaaactcattgaggtctattataatgtatctggacggattaacttctcaagaggtcactagtttagagatatcaactgggataccattgctttacatatacaaagaggggaagtttaacagtagaggaagtcctgtggggcctacagaagctggtgtttatgcatacactcagagtttagctgtttacagacaacagttggatgacatgtctagttgttattgatcctgcatttcaaagatcaaaatggtataaatatcgatattcatttttggtgggtgactctctgaatgttcatatgctaaacatcaatttgaaaattactggaaggaattgaccaatccatgacacttttaaatctgcaacctgcatagcgagacgtagaagccctgaaaaatttctgtactgtagcaaccaaagtagcaccaaaacaattttggttaaagagagtgaaaaacgggattagtaaatgacaatgtaagtttagaacttgtttgtgcctgaatggaagtgaacttataggtatagcttccatgtttagaacttacagggaattgaatttacggtaaat

SEQ ID NO: 58365 - protein, 309 aa, Glycine max
  peptide (1)..(309): Ceres Seq. ID no. 14312852
MAATFKHHPTGLHGWGAPRSSRNLPSFFSMRFPCSTRHHHIRASVSHHSSTEAESALILIRHGESLWNEKNLFTGCCDVPLTNRGVEEAIEAGQRISYIPIDMIFTSALIRAQMTAMLAMTQHSQKKVPIIIHDESEQATTWTQVYSEKTTKQSIPVITAWQLNERMYGELQGLNKQETAERYGKEKVHEWRRSFDIPPPKGESLEMCFQRAVPYFKDFIEPQLKSGKHVMVAAHGNSLRSIIMYLDGLTSQEVTSLEISTGIPLLYIYKEGKFNSRGSPVGPTEAGVYAYTQSLAVYRQQLDDMSSCY

SEQ ID NO: 58366 - protein, 280 aa, Glycine max
  peptide (1)..(280): Ceres Seq. ID no. 14312853
MRFPCSTRHHHIRASVSHHSSTEAESALILIRHGESLWNEKNLFTGCCDVPLTNRGVEEAIEAGQRISYIPIDMIFTSALIRAQMTAMLAMTQHSQKKVPIIIHDESEQATTWTQVYSEKTTKQSIPVITAWQLNERMYGELQGLNKQETAERYGKEKVHEWRRSFDIPPPKGESLEMCFQRAVPYFKDFIEPQLKSGKHVMVAAHGNSLRSIIMYLDGLTSQEVTSLEISTGIPLLYIYKEGKFNSRGSPVGPTEAGVYAYTQSLAVYRQQLDDMSSCY

SEQ ID NO: 58367 - protein, 207 aa, Glycine max
  peptide (1)..(207): Ceres Seq. ID no. 14312854
MIFTSALIRAQMTAMLAMTQHSQKKVPIIIHDESEQATTWTQVYSEKTTKQSIPVITAWQLNERMYGELQGLNKQETAERYGKEKVHEWRRSFDIPPPKGESLEMCFQRAVPYFKDFIEPQLKSGKHVMVAAHGNSLRSIIMYLDGLTSQEVTSLEISTGIPLLYIYKEGKFNSRGSPVGPTEAGVYAYTQSLAVYRQQLDDMSSCY

SEQ ID NO: 58368 - DNA, 1099 bp, Glycine max
  misc_feature (1)..(1099): Ceres Seq. ID no. 15176777
acaaagaaggctgtccaatgttagaagacaatctcagcaggttacggatatggtggtggaaatgcaatctaaaattggcagtaatcgagtgacgcgcatggagttacaagtagaacttgagaaagaaaggtttgccaagaaaagagtggaagagaatctggaggttgctaggagaaagtttacatgccttaaagaacagaatgagggctttttagtaactgaaaagcttcaacaggaacttgaagagtacagggaaattatcaagtgcagtatctgccaagacagggcaaaagaggtggtaattacaaaatgctaccacttgttctgctactcatgtatccagaaagttgctgggagtaggcatcgcaagtgtccacaatgtggtacaagctttggggctaacgatgttaagtctgtttatttgtaactagaaacttggttctctcccggatgtcgagaagaggctggtgttcttttgaaaaagatttggtgtatggatacctacataggaggttcaattgtatgcttagtgccaactgtcgagataaggaacattggcagcgatcaatgagttgcttgtctacatttggaccaaaaatgattattttttgctggtacttaatcttagtaccacctgctcgcatttttgaatctggaatgatgtttagttagcatttttaatagatagaacgaattcggagtcataggaaacgtgatatttgttctttgcagatttatcataatgcatcttccaatgcgatttggagaggggtcatgaaggttggtctttgaccctgcaattaataattcaaattcgaaagcctgaattggccatcatggcaaattttcttggaagttgactccaaaggtggcaaccacgatgcctcacatctgtatttctgtttctcctgctgaaatgacacaagtacaaattttggtttcaggggatttgtatatatgctagagtttataaggggtcgttcaattttgtttataacagcctgtaatttgtgtaatcgtagatgatatgactagatatcattgtaattgatgttgtgaaaagttaagaaagctcaagtttatcatttttttctatttc

SEQ ID NO: 58369 - protein, 141 aa, Glycine max
  peptide (1)..(141): Ceres Seq. ID no. 15176778
QRRLSNVRRQSQQVTDMVVEMQSKIGSNRVTRMELQVELEKERFAKKRVEENLEVARRKFTCLKEQNEGFLVTEKLQQELEEYREIIKCSICQDRAKEVVITKCYHLFCYSCIQKVAGSRHRKCPQCGTSFGANDVKSVYL

SEQ ID NO: 58370 - protein, 125 aa, Glycine max
  peptide (1)..(125): Ceres Seq. ID no. 15176779
MVVEMQSKIGSNRVTRMELQVELEKERFAKKRVEENLEVARRKFTCLKEQNEGFLVTEKLQQELEEYREIIKCSICQDRAKEVVITKCYHLFCYSCIQKVAGSRHRKCPQCGTSFGANDVKSVYL

SEQ ID NO: 58371 - protein, 121 aa, Glycine max
  peptide (1)..(121): Ceres Seq. ID no. 15176780
MQSKIGSNRVTRMELQVELEKERFAKKRVEENLEVARRKFTCLKEQNEGFLVTEKLQQELEEYREIIKCSICQDRAKEVVITKCYHLFCYSCIQKVAGSRHRKCPQCGTSFGANDVKSVYL

SEQ ID NO: 58372 - DNA, 1267 bp, Glycine max
  misc_feature (1)..(1267): Ceres Seq. ID no. 15169045
gatttaaacaaactcctcccacttgcttcaacttcatcttatcaaagcctttcctgtttgcttttttcacaattcacttccttcatagagagtaatagagaaagaaaaaagagagagaaaaacagcacaaggatggagctttctcaacttggttttctggatgagctacttgctccaagaaaagacactagttggagtagtgctttgtccactgggttgaatgagttactactccctagtggttggagctttgactcttttgatgagaaccaaggtttatccactttgaatccctcatttgctgcattttcaactccactagaccacagatttgaatgcccttatggaagtgaagcagcatacccttttgttgatggcttcacattgcctgagcttgattcttcatacaccaggaatgatgagtcagcaccccttttgccacaagaggataacccatcattggaggatgaagagtttggctttctaggaagtgaaagccagagcttggaacaagcaaaaattggctgcaaaattgaggaactgacagagattccagtctttaacatgggcttgggtggggagaaaaggcccaaatcaaagaaactagaagggcagccatcaaagaatctcatggcagaaagaaggagaagaaagcgtttgaatgacaggctttccatgctaaggtcaatagtccctaagattagcaagatggacaggacctccattcttggagacaccattgattacatgaaagagcttctagaaaggataggcaagttgcaagaagaagaaatggaggagggaacaaatcggataaacctcttgggcatttctaaggagctaaagccaaatgaagtaatggtaagaaattcccccaagtttgatgttgagagaagagaccaggacacaaggattagcatctgctgtgccacaaagccaggattactactgtccacagtgaacaccttagaagcattaggccttgagattcaccagtgtgttataagcagcttcaatgatttttcaatgcaagcatcttgcacagaggtagcagagcagagaaattgtatgagccaggaagagataaagcaagcactattcagaaatgcaggttatggtggtagatgtctctaggagaaagatggaaagcagaaataacaatttgctgatgttgaaaaacaagcaaagttttcctcttgtgtaattcaaggaattaggagtgttacaaagtttaatgagatttcccaataagatgatggctttgatt

SEQ ID NO: 58373 - protein, 377 aa, Glycine max
  peptide (1)..(377): Ceres Seq. ID no. 15169046
DLNKLLPLASTSSYQSLSCLLFSQFTSFIESNRERKKREKNSTRMELSQLGFLDELLAPRKDTSWSSALSTGLNELLLPSGWSFDSFDENQGLSTLNPSFAAFSTPLDHRFECPYGSEAAYPFVDGFTLPELDSSYTRNDESAPLLPQEDNPSLEDEEFGFLGSESQSLEQAKIGCKIEELTEIPVFNMGLGGEKRPKSKKLEGQPSKNLMAERRRRKRLNDRLSMLRSIVPKISKMDRTSILGDTIDYMKELLERIGKLQEEEMEEGTNRINLLGISKELKPNEVMVRNSPKFDVERRDQDTRISICCATKPGLLLSTVNTLEALGLEIHQCVISSFNDFSMQASCTEVAEQRNCMSQEEIKQALFRNAGYGGRCL

SEQ ID NO: 58374 - protein, 333 aa, Glycine max
  peptide (1)..(333): Ceres Seq. ID no. 15169047
MELSQLGFLDELLAPRKDTSWSSALSTGLNELLLPSGWSFDSFDENQGLSTLNPSFAAFSTPLDHRFECPYGSEAAYPFVDGFTLPELDSSYTRNDESAPLLPQEDNPSLEDEEFGFLGSESQSLEQAKIGCKIEELTEIPVFNMGLGGEKRPKSKKLEGQPSKNLMAERRRRKRLNDRLSMLRSIVPKISKMDRTSILGDTIDYMKELLERIGKLQEEEMEEGTNRINLLGISKELKPNEVMVRNSPKFDVERRDQDTRISICCATKPGLLLSTVNTLEALGLEIHQCVISSFNDFSMQASCTEVAEQRNCMSQEEIKQALFRNAGYGGRCL

SEQ ID NO: 58375 - protein, 189 aa, Glycine max
  peptide (1)..(189): Ceres Seq. ID no. 15169048
MGLGGEKRPKSKKLEGQPSKNLMAERRRRKRLNDRLSMLRSIVPKISKMDRTSILGDTIDYMKELLERIGKLQEEEMEEGTNRINLLGISKELKPNEVMVRNSPKFDVERRDQDTRISICCATKPGLLLSTVNTLEALGLEIHQCVISSFNDFSMQASCTEVAEQRNCMSQEEIKQALFRNAGYGGRCL

SEQ ID NO: 58376 - DNA, 1457 bp, Glycine max
  misc_feature (1)..(1457): Ceres Seq. ID no. 14310483
gagagatcattgtccattatcacagaaatgggtgaagtaagagttctctcttacacaaaaaattcttgtctatatttattcttaatcaatctgtctctttccttttttcgacaacttttgctttgaaaactaactacaccacgggactaggatcgtgttttttaaacttttatgatcttttgtatataatgtctgttttatgatgtatatggtggcatcattatcaagtaatgcatgccacacacacacacacacacatatatatatactctagttctacacatggtggagatttttcaatcacatctttgctatatctaattaatgttctatatatttgcggagaacaaggaagaagaaaagaaagaagagaccacagaggaaaagaaggaaaaagagcctccagagatagtgctcaaggttgatatgcactgtgaagcttgtgcaaggaaagttgcaaaagcattgaaaggatttgaaggagtggaggaggtgactgcagatagcaaggcaagcaaagtggtagtgaaaggaaaggcagcagaccccataaaggtgtgtgagagactacaaaagaaaagtggcaagaaagtagagctcatttcacctttgcctaaacctccagaggagaaaaaagaagaagaaatcaaagaagaaccgcagccagaggagaaaaaggaggagctccctcctgtggtaacagtagtcctcaaagttcgaatgcattgtgaagcatgtgctcaagttatacaaaagcgaatccgcaagattcaaggagtagagtcagtggagacaagcttgggaaatgatcaagtcatagtaaaaggtgtgattgacccagcaaagctagttgattatgtgtacaagaggaccaaaaagcaagcttctatagtgaaagaggaggaaaaggaaaagaaggaagaagaggagaagaaagaggaggagaaaaaggaagagaaagaagaagagaaaaaaggagaagatggtgaagaggttgatactaaaactgacatcaagcgaagtgaatactggccattaagatcccacgttgactacgttgactacccttatgcttctcagattttcagtgatgagaacccaaatgcatgcactgtaatgtagatcagtcttttgtactaactcagtattttatagtagctgatcgatcaactgaagcaacttgtgctgtgtcgttggagcgtggaataagatgcatggttgtgaatgttttcaaggctttgtatatgatttcgcatccctcggagttggcattctatggagatagatgccttatttcttgtgttttatgagctttctacatatttccttggcaaagggtggctagaatcagttgtgttagtgtgtactgaattttggcctacaacttcaattatgtacctaaatgatgacatcaattagtaattttaagtcgtcatgtcatgataaaacttgctgcg

SEQ ID NO: 58377 - protein, 265 aa, Glycine max
  peptide (1)..(265): Ceres Seq. ID no. 14310484
MFYIFAENKEEEKKEETTEEKKEKEPPEIVLKVDMHCEACARKVAKALKGFEGVEEVTADSKASKVVVKGKAADPIKVCERLQKKSGKKVELISPLPKPPEEKKEEEIKEEPQPEEKKEELPPVVTVVLKVRMHCEACAQVIQKRIRKIQGVESVETSLGNDQVIVKGVIDPAKLVDYVYKRTKKQASIVKEEEKEKKEEEEKKEEEKKEEKEEEKKGEDGEEVDTKTDIKRSEYWPLRSHVDYVDYPYASQIFSDENPNACTVM

SEQ ID NO: 58378 - protein, 231 aa, Glycine max
  peptide (1)..(231): Ceres Seq. ID no. 14310485
MHCEACARKVAKALKGFEGVEEVTADSKASKVVVKGKAADPIKVCERLQKKSGKKVELISPLPKPPEEKKEEEIKEEPQPEEKKEELPPVVTVVLKVRMHCEACAQVIQKRIRKIQGVESVETSLGNDQVIVKGVIDPAKLVDYVYKRTKKQASIVKEEEKEKKEEEEKKEEEKKEEKEEEKKGEDGEEVDTKTDIKRSEYWPLRSHVDYVDYPYASQIFSDENPNACTVM

SEQ ID NO: 58379 - protein, 133 aa, Glycine max
  peptide (1)..(133): Ceres Seq. ID no. 14310486
MHCEACAQVIQKRIRKIQGVESVETSLGNDQVIVKGVIDPAKLVDYVYKRTKKQASIVKEEEKEKKEEEEKKEEEKKEEKEEEKKGEDGEEVDTKTDIKRSEYWPLRSHVDYVDYPYASQIFSDENPNACTVM

SEQ ID NO: 58380 - DNA, 1508 bp, Glycine max
  misc_feature (1)..(1508): Ceres Seq. ID no. 15169013
gtaacaaaatatcccaaactctcactcgtcgacggccaccggatcgacctcaattcgccgtcgtccaatcgctctcagttccaccgcctccgccgccggcatccaattcagtttggccttgcatctctctcaggtattaagattctactaaaaaaaaggttgatcagcgtaaagatggagctcactattacacagcctgatgattggcatcttcacctccgtgatggttcccttcttgaagctgtcctccctcacagtgcgaagcattttggaagggccatagtaatgccaaatttgaaaccacccatcactaccacgtctgctgctgtcgcttatcgagagtccattttgaaagcaatacctaaagatagcaacttcactcctctcatgtcactttacctcacagacgtgactacccctgatgagattaaacttgcaaaaaaaagtggacttgtttatggtgtgaagttgtatcctgctggtgctacaacaaactcccaagatggtgttacagatctttttggaaattgtttttctgttcttgaggaaatggctgagcaaaatttaccattattggttcacggagaggttacagattcaaacgttgatatttttgaccgagaaaaagtctttattgaaacaattttaatgcctttaattcaaagacttccacagctgaaggttgtgatggagcatatcactactgcagatgctgttaaatttgtagagtcttgcaaagaaggttatgtagcagcaactgttacaccacagcatcttcttctgaatcgtaatgctttgttccaaggtggcttacagcctcacaattactgtcttccagtgctcaaaagagagatccatagacaggctattgtttcggctgtcactagtggaagtaaacgatttttccttggaactgatagtgctccacatgataggcgtaaaaaggaatgttcctgtggatgtgctggcatatacaactcaccggttgctctatcactatatgccaaagtttttgaagaggctggtgcacttgataagctagaggcttttacaagctttaacggacctgacttctatggcctccccagaaacaagtcaaagattaaactgaggaaagctccttggaaagtacctgattatttgtcatttccatttggagacatcgttcccatgtttgctggtgaaacccttgaatgggaggcattgccttgttgatttgctgtgtctatttgaaagtttggtatccttcagcttaaattattgattgctgagatgagaatttatgcagcgttcaagaactagagtcaagcaattttgttctaattttatcagtcagttctgcatttattttgcagattgttctcatttctatttcctaggtcaggtgaatttaagtatgaaccagaacacccactgtgactaataaattatgggaatttatatagtattcagagctatggtaattttgtagttctaatcagatcaatcaactaggcagagtttttcag

SEQ ID NO: 58381 - protein, 404 aa, Glycine max
  peptide (1)..(404): Ceres Seq. ID no. 15169014
VTKYPKLSLVDGHRIDLNSPSSNRSQFHRLRRRHPIQFGLASLSGIKILLKKRLISVKMELTITQPDDWHLHLRDGSLLEAVLPHSAKHFGRAIVMPNLKPPITTTSAAVAYRESILKAIPKDSNFTPLMSLYLTDVTTPDEIKLAKKSGLVYGVKLYPAGATTNSQDGVTDLFGNCFSVLEEMAEQNLPLLVHGEVTDSNVDIFDREKVFIETILMPLIQRLPQLKVVMEHITTADAVKFVESCKEGYVAATVTPQHLLLNRNALFQGGLQPHNYCLPVLKREIHRQAIVSAVTSGSKRFFLGTDSAPHDRRKKECSCGCAGIYNSPVALSLYAKVFEEAGALDKLEAFTSFNGPDFYGLPRNKSKIKLRKAPWKVPDYLSFPFGDIVPMFAGETLEWEALPC

SEQ ID NO: 58382 - protein, 346 aa, Glycine max
  peptide (1)..(346): Ceres Seq. ID no. 15169015
MELTITQPDDWHLHLRDGSLLEAVLPHSAKHFGRAIVMPNLKPPITTTSAAVAYRESILKAIPKDSNFTPLMSLYLTDVTTPDEIKLAKKSGLVYGVKLYPAGATTNSQDGVTDLFGNCFSVLEEMAEQNLPLLVHGEVTDSNVDIFDREKVFIETILMPLIQRLPQLKVVMEHITTADAVKFVESCKEGYVAATVTPQHLLLNRNALFQGGLQPHNYCLPVLKREIHRQAIVSAVTSGSKRFFLGTDSAPHDRRKKECSCGCAGIYNSPVALSLYAKVFEEAGALDKLEAFTSFNGPDFYGLPRNKSKIKLRKAPWKVPDYLSFPFGDIVPMFAGETLEWEALPC

SEQ ID NO: 58383 - protein, 309 aa, Glycine max
  peptide (1)..(309): Ceres Seq. ID no. 15169016
MPNLKPPITTTSAAVAYRESILKAIPKDSNFTPLMSLYLTDVTTPDEIKLAKKSGLVYGVKLYPAGATTNSQDGVTDLFGNCFSVLEEMAEQNLPLLVHGEVTDSNVDIFDREKVFIETILMPLIQRLPQLKVVMEHITTADAVKFVESCKEGYVAATVTPQHLLLNRNALFQGGLQPHNYCLPVLKREIHRQAIVSAVTSGSKRFFLGTDSAPHDRRKKECSCGCAGIYNSPVALSLYAKVFEEAGALDKLEAFTSFNGPDFYGLPRNKSKIKLRKAPWKVPDYLSFPFGDIVPMFAGETLEWEALPC

SEQ ID NO: 58384 - DNA, 1232 bp, Glycine max
  misc_feature (1)..(1232): Ceres Seq. ID no. 14316340
ttatttttttttaccaccatgtccgagtttcgaaaacaaccggcttctagaccgaagcaaaagcttcgccaacagcactcctcgaaagagtcaaaggcgatgagaaaacttcgcatcatttgcgacgatcctgaggctactgattcatccgaagatgagtctgagagggttcagaagccgagaagagtaaaaagaagcgtgttggagatgtctcttccccctctccctcaaacattcaccaccactactcctgatactagctcctgtgaggtgaatagcagcaaaaatgcaacattgaaggtttgcactgaaggtcaaccccagagcaagaagagggttttgactcacactccatcaacgagaaggagcacttgtgggaaatatagaggtgttaggcagagaaaatggggtaaatgggctgcagaaattcgtgacccgtttcagtgtactcgtatatggcttggcactttcaacactgcagaagaggcttccaaagcctatgaaaccagaaggcttgagtttgaagccatggcaaagactcaaactctaaaaactggttctgaacctttgtctacaacttctgataagagtaactgctgtaactcctctgctgctgccgccgccgatgtgtctgtgtctgaaaagttttctactacttctgatgactcggaagagagtatgttgtcacacaattcaccatcctctgtgcttgagttggatacctcggcttccaaatccgttgagaagggtaatggttcaactgaggaagctactggggctaataatttggtggctgaacttgcagggcttgagataccagatttgagtctgttgaacctgccaccaccaccatctgttgctgcggatgctgctgggattgagccaaattttgggcttgattttgattggctgtcgtttaatgattatggacagggttttgaggatttcggtggcttggagaacattcatattggtgggtttgatgacactgagcctagtgagcttcctgacttcgattttggtgattttggtgctgatgagtttgctggttggattgaggaacccctcaatataccttgtgcctaagttttgttatttgttatggcctcaagttctgttagttttgttttttgttttatttattatttgtgagatctcaggaatttgcaataccaatttctgagcgagtgaatgttactttatgcgttttatattttcatttgtttttgagg

SEQ ID NO: 58385 - protein, 361 aa, Glycine max
  peptide (1)..(361): Ceres Seq. ID no. 14316341
LFFFTTMSEFRKQPASRPKQKLRQQHSSKESKAMRKLRIICDDPEATDSSEDESERVQKPRRVKRSVLEMSLPPLPQTFTTTTPDTSSCEVNSSKNATLKVCTEGQPQSKKRVLTHTPSTRRSTCGKYRGVRQRKWGKWAAEIRDPFQCTRIWLGTFNTAEEASKAYETRRLEFEAMAKTQTLKTGSEPLSTTSDKSNCCNSSAAAAADVSVSEKFSTTSDDSEESMLSHNSPSSVLELDTSASKSVEKGNGSTEEATGANNLVAELAGLEIPDLSLLNLPPPPSVAADAAGIEPNFGLDFDWLSFNDYGQGFEDFGGLENIHIGGFDDTEPSELPDFDFGDFGADEFAGWIEEPLNIPCA

SEQ ID NO: 58386 - protein, 355 aa, Glycine max
  peptide (1)..(355): Ceres Seq. ID no. 14316342
MSEFRKQPASRPKQKLRQQHSSKESKAMRKLRIICDDPEATDSSEDESERVQKPRRVKRSVLEMSLPPLPQTFTTTTPDTSSCEVNSSKNATLKVCTEGQPQSKKRVLTHTPSTRRSTCGKYRGVRQRKWGKWAAEIRDPFQCTRIWLGTFNTAEEASKAYETRRLEFEAMAKTQTLKTGSEPLSTTSDKSNCCNSSAAAAADVSVSEKFSTTSDDSEESMLSHNSPSSVLELDTSASKSVEKGNGSTEEATGANNLVAELAGLEIPDLSLLNLPPPPSVAADAAGIEPNFGLDFDWLSFNDYGQGFEDFGGLENIHIGGFDDTEPSELPDFDFGDFGADEFAGWIEEPLNIPCA

SEQ ID NO: 58387 - protein, 328 aa, Glycine max
  peptide (1)..(328): Ceres Seq. ID no. 14316343
MRKLRIICDDPEATDSSEDESERVQKPRRVKRSVLEMSLPPLPQTFTTTTPDTSSCEVNSSKNATLKVCTEGQPQSKKRVLTHTPSTRRSTCGKYRGVRQRKWGKWAAEIRDPFQCTRIWLGTFNTAEEASKAYETRRLEFEAMAKTQTLKTGSEPLSTTSDKSNCCNSSAAAAADVSVSEKFSTTSDDSEESMLSHNSPSSVLELDTSASKSVEKGNGSTEEATGANNLVAELAGLEIPDLSLLNLPPPPSVAADAAGIEPNFGLDFDWLSFNDYGQGFEDFGGLENIHIGGFDDTEPSELPDFDFGDFGADEFAGWIEEPLNIPCA

SEQ ID NO: 58388 - DNA, 1571 bp, Glycine max
  misc_feature (1)..(1571): Ceres Seq. ID no. 14312057
aacgcagaggcgaagcagcaacaacagaagaatgctccgttcaactccatttccggcaccgtacaattcggcgccagttctctctcgcgcacgcacgtgcccctctccagcactcgcacgtgcccttcattctcattcctctttggtttggcggctcgtcttcccacaattccaccaacacaacgtaaatatttccggcggagtgtttgtcgcggccgccgcgaagaagcaacaacggcgcggcggcgctgagctcgccgtaatggacggcggtttcgacgacggtgatttttatgatgcttacgatgatgatgaagaagaagaagaatttgatgatgatgatgatgaagaagaagggatgcttccgttggatgacatgaacaaatggttcgagaagaagccgaggggttttggagaagggaaagtgtacgacacttcggttgaggataagctgctcgaggaaatgcgccagagtagaatagcgcaggctgaaaacttgacgaagcttaagagcaatcctgtgaagcatgcttcaaacgaaagtgttcaaaagaagaaagattcagaacttgttccaattggaggtcgagtgtgcttggtgaacctaccaaagaaaaagaacatccataaagatctgaaatcagccttgcaagggattcctggcataactaatatagtcccagctgttactggaaacaagaagacgagggacccaatctgcaagggttttgcatacgttgatttcgagtgtgaagaagatgcaattaggtttgttgagttatacactggacaagctattacttttggtaaaattcagaagcagataaaatgtgagcttctaaatgtacagtcttcatcttcttctctgaaattaagcaaaaaccttaatgctgctccgcaacttgtggcccgctttgaagaagtttcaaatgaggattctaacttggatggttctgcccttagttcctgggatgaggccaactcttcagatgatttggatgacctggactatcagatgaatggagaagaacaggaagatgatgaggacaatcaagagtctgtctccactttgggggtggatcatgatgatagtgtggaaatgaggatcgatcctgaaatttgttctcttccctcagagcaggttgacagaaaccatgcagctgagcagaagtcatctgccaaggttaaacaggagaatgcccgtaagaaaaaaccaacttccaaagatagagacaaaaaagttttaggtgttcctggatcctcaagaaggttaaagatcagggaaaaggctgttttaagtgacgttttctccaagtacggattaaaagctactcttgcttcaaaagataattagtaaattgctaatgaggtgagatcgccaaagtctaaatcatctcccagcacgtagggtctaaaaactaaaaggtcatattagatgcaatgggactttctagttggccatggatgctagtttttgattcagtgtacaatcaaattgtagcataagagtcttgtagaaaaattgatgatagtagattattatttttatgaatatcaaaacattctttatt

SEQ ID NO: 58389 - protein, 450 aa, Glycine max
  peptide (1)..(450): Ceres Seq. ID no. 14312058
TQRRSSNNRRMLRSTPFPAPYNSAPVLSRARTCPSPALARALHSHSSLVWRLVFPQFHQHNVNISGGVFVAAAAKKQQRRGGAELAVMDGGFDDGDFYDAYDDDEEEEEFDDDDDEEEGMLPLDDMNKWFEKKPRGFGEGKVYDTSVEDKLLEEMRQSRIAQAENLTKLKSNPVKHASNESVQKKKDSELVPIGGRVCLVNLPKKKNIHKDLKSALQGIPGITNIVPAVTGNKKTRDPICKGFAYVDFECEEDAIRFVELYTGQAITFGKIQKQIKCELLNVQSSSSSLKLSKNLNAAPQLVARFEEVSNEDSNLDGSALSSWDEANSSDDLDDLDYQMNGEEQEDDEDNQESVSTLGVDHDDSVEMRIDPEICSLPSEQVDRNHAAEQKSSAKVKQENARKKKPTSKDRDKKVLGVPGSSRRLKIREKAVLSDVFSKYGLKATLASKDN

SEQ ID NO: 58390 - protein, 440 aa, Glycine max
  peptide (1)..(440): Ceres Seq. ID no. 14312059
MLRSTPFPAPYNSAPVLSRARTCPSPALARALHSHSSLVWRLVFPQFHQHNVNISGGVFVAAAAKKQQRRGGAELAVMDGGFDDGDFYDAYDDDEEEEEFDDDDDEEEGMLPLDDMNKWFEKKPRGFGEGKVYDTSVEDKLLEEMRQSRIAQAENLTKLKSNPVKHASNESVQKKKDSELVPIGGRVCLVNLPKKKNIHKDLKSALQGIPGITNIVPAVTGNKKTRDPICKGFAYVDFECEEDAIRFVELYTGQAITFGKIQKQIKCELLNVQSSSSSLKLSKNLNAAPQLVARFEEVSNEDSNLDGSALSSWDEANSSDDLDDLDYQMNGEEQEDDEDNQESVSTLGVDHDDSVEMRIDPEICSLPSEQVDRNHAAEQKSSAKVKQENARKKKPTSKDRDKKVLGVPGSSRRLKIREKAVLSDVFSKYGLKATLASKDN

SEQ ID NO: 58391 - protein, 363 aa, Glycine max
  peptide (1)..(363): Ceres Seq. ID no. 14312060
MDGGFDDGDFYDAYDDDEEEEEFDDDDDEEEGMLPLDDMNKWFEKKPRGFGEGKVYDTSVEDKLLEEMRQSRIAQAENLTKLKSNPVKHASNESVQKKKDSELVPIGGRVCLVNLPKKKNIHKDLKSALQGIPGITNIVPAVTGNKKTRDPICKGFAYVDFECEEDAIRFVELYTGQAITFGKIQKQIKCELLNVQSSSSSLKLSKNLNAAPQLVARFEEVSNEDSNLDGSALSSWDEANSSDDLDDLDYQMNGEEQEDDEDNQESVSTLGVDHDDSVEMRIDPEICSLPSEQVDRNHAAEQKSSAKVKQENARKKKPTSKDRDKKVLGVPGSSRRLKIREKAVLSDVFSKYGLKATLASKDN

SEQ ID NO: 58392 - DNA, 1419 bp, Glycine max
  misc_feature (1)..(1419): Ceres Seq. ID no. 14307571
atttattggacccgtcgtgaaccgtgtttggatatacggctctatcaaattcataaaactaaaatcctaacttgataatgacataaaccttgtggtgtcatacatgttgcctagaaacatgatcgttgaagaacaagccaagaaaaggaaaatgtttatatattttgtttgcttgtcaaaaacagaattatttttttttcttcttaaaatattaaagtaaaattaattcaatttaaaaataaaaaagtgctgatcttgtaaaaaaaaactcaccttcgttgtctcccttctttctcttctccattaaaagcttctaacagttttactagaagtagtttatgatttggcatatccaaacccaattccatcgtgatataagctttgttcaaatcacatgcaaaagagaggaagatattataaaatttgatattcatctggcagtttgaaggcattctgtgtttcatatgttttagcaatagtaaattacaaaaattaggtctgcctatgcttactgaattgtaaattttgtaggagcattgtttggtgacacattaattatacagtgcagagtgtacacaatgagtttgtttagttcttcaaagatattatgtttataccattctcaagccctaagtgttctggctttattgctaaatacaaactaagatttgagaacaagtgaagtttatttaaataatcatcacagctctctgcttctggagacagtggaatgcctgaagtggtagctgatcctcaaggtgaagtttccaagatattccaaaatctaggagtatgtgttgttcagcagtgtgccaaaatacgccaacaagtttcaactgcggtcacctatgataaatcaatcaaggcaatcaaagtgaaggtaccagattcaaaggaagaattctttctgcatcctgcaacagtgagacggaatgatcgctctgctcaaagtgtggatgaatggacgggggagcagaaattgcagtacggtgatgttcctgaagatattgaacctgaagaaattcgaccaatgggaaattatgcagtttcaataacttggcctgatgggtttagtcagattgctccttatgatcaattgcagatgattgaacggctagttgatgtttttgaaccaagtgtacaagcatgatgaaaaaaaaacgtcagatgggttgtactgatgtaggtgttggtatatggcaaaaatcatatatacatgtatgatagcctcaattcatagtccttcaacaagtaggggatattagaagtttgatagagcattctgcaaaggtataggttggccttgagattcactgcaatcctcaacttttttccttggtttttgttgtcccattgggtacaaagcttttatttctcaactgtgaacagaagtgtattatatatgtgtcattttcattc

SEQ ID NO: 58393 - protein, 139 aa, Glycine max
  peptide (1)..(139): Ceres Seq. ID no. 14307572
MPEVVADPQGEVSKIFQNLGVCVVQQCAKIRQQVSTAVTYDKSIKAIKVKVPDSKEEFFLHPATVRRNDRSAQSVDEWTGEQKLQYGDVPEDIEPEEIRPMGNYAVSITWPDGFSQIAPYDQLQMIERLVDVFEPSVQA

SEQ ID NO: 58394 - DNA, 1243 bp, Glycine max
  misc_feature (1)..(1243): Ceres Seq. ID no. 14307530
atccaacctcttaacaattcgcatggtttcgtacccacacaactgaactcacacaaacttctccaccacaccgacaacctcgccggaaaattcctcgccgtttccggttaccggcgatggcctcggcgacgtcgtttttgggcctcggtcttcgcccctccgtcccaatttgcgccaacagaaacaacggcattcgattctctcagtttcaagtctcctttggctttcgtgagaactccacttccctcaagactttgaattcaacaccgttgaagaaaagagaagctttctcaaatgggtcttcgagaacgcgaagaaacccgttgttctctgttcgctgcacagtttcatcaagtggaaagattacacaacaggaattcacggaaatggcatggcaagcaattatctcggcaccagaagtggctaaggagaacaagcatcagattgtggagactgagcacttgatgaaagcattgttggagcaaaagaatggacttgctcgccggatcttttctaaggttggggtagataatactcggcttctagaggccactgataagcacattcagcggcaacccaaggttgtaggggaatctgctggttcaatgctagggcgtgatttggaggcattgattcagagagccagggacttcaagaaagaatatggggactcatttgtgtcggttgagcactttgttcttggttttgcccaagataaacgatttgggaagatattgtttagagattttcaaatatctcagcaagctctaaaatctgccatagaatccataaggggacgccagtcagttattgaccaagatcctgaaggaaagtatgaagccttggaaaagtatgggaaagatttgacggcaatggctaaagcaggaaaacttgacccagtcataggaagagatgatgaaatacgcaggtgcattcagattctctccaggaggacaaagaacaatcctgttctaattggggagcctggtgttggaaagactgcaatctctgaagggctgctactgttatctgtttcctgaatttcatgtgtgacctgtttcatacatacaagaatggcacctgtgatggtgtgaaacaaaatataaaaattatttgaacacgacagttcaattttttgttaatatttttaagaaacaaatgatagttgtttcaaatattacattctgtatgaaagtataatatgtcaaaatagaaattccataaaagtaggaagtaagtttag

SEQ ID NO: 58395 - protein, 307 aa, Glycine max
  peptide (1)..(307): Ceres Seq. ID no. 14307531
MASATSFLGLGLRPSVPICANRNNGIRFSQFQVSFGFRENSTSLKTLNSTPLKKREAFSNGSSRTRRNPLFSVRCTVSSSGKITQQEFTEMAWQAIISAPEVAKENKHQIVETEHLMKALLEQKNGLARRIFSKVGVDNTRLLEATDKHIQRQPKVVGESAGSMLGRDLEALIQRARDFKKEYGDSFVSVEHFVLGFAQDKRFGKILFRDFQISQQALKSAIESIRGRQSVIDQDPEGKYEALEKYGKDLTAMAKAGKLDPVIGRDDEIRRCIQILSRRTKNNPVLIGEPGVGKTAISEGLLLLSVS

SEQ ID NO: 58396 - protein, 217 aa, Glycine max
  peptide (1)..(217): Ceres Seq. ID no. 14307532
MAWQAIISAPEVAKENKHQIVETEHLMKALLEQKNGLARRIFSKVGVDNTRLLEATDKHIQRQPKVVGESAGSMLGRDLEALIQRARDFKKEYGDSFVSVEHFVLGFAQDKRFGKILFRDFQISQQALKSAIESIRGRQSVIDQDPEGKYEALEKYGKDLTAMAKAGKLDPVIGRDDEIRRCIQILSRRTKNNPVLIGEPGVGKTAISEGLLLLSVS

SEQ ID NO: 58397 - protein, 191 aa, Glycine max
  peptide (1)..(191): Ceres Seq. ID no. 14307533
MKALLEQKNGLARRIFSKVGVDNTRLLEATDKHIQRQPKVVGESAGSMLGRDLEALIQRARDFKKEYGDSFVSVEHFVLGFAQDKRFGKILFRDFQISQQALKSAIESIRGRQSVIDQDPEGKYEALEKYGKDLTAMAKAGKLDPVIGRDDEIRRCIQILSRRTKNNPVLIGEPGVGKTAISEGLLLLSVS

SEQ ID NO: 58398 - DNA, 1257 bp, Glycine max
  misc_feature (1)..(1257): Ceres Seq. ID no. 15170635
agctaaagcgcacacatcactcctcactcactcggcggcacacacaaaaccctttctcagtcactcactcggcaaagagaagcgtcgacggtctgcacggtgggtgcttcatcgacggcagcgacctgtggcggaggacagggttcccttcgctcttggagttcgcatcgggcagagaagcttctctgcattgcgctgggacgcaaaaccctggcagcaatcagcaccacggcgcagccgcacacctctgagacgccaccgcaatcaggatgagtgaacttctttttgatgacattttcaaggtcgagaaggtagaccctgatggtaaaaagtatgacaaggtttctcggattgtggcacggagtgagaagtgtgacatgaacatgcttctagatgtaaataccgagatttatccaatgggggaaaaagaaagattcttgatggctttgtctccttcacttgttttgaatactaaggatggttcagtgtcaattcaagacaagtttgaatacatcatgcacgggaggttatataacattacgaaacctcagcttgaaaagaaagaaaagaaagagaaacgttcagaatctcagcctgaagagaatgaggaatgttcaaaacctcagcttgaagtggaggtatatgcatcgtttggtgggcttcagttgatgctgaaaggacatgcttcccactgtgttaagtttgcagtcgatcagaagttgtttttacttataaggaaggttgaaagttgatgttggtgatgggcctgaaaagaaaaacatgctagcattaagttttaagtaatctgtataaaataaattgatttttcagaagaatgatttttgtgttttgaaagtttctctgaagttagttttttggtacattagataatttttaggcattctcttatatttattaaactgaaatatttttgccatatatatataaggaatcaacttacattaagaataactcttttagagtttcttttcattctcttcattcatttttaaaaatctaatgattgtaatgtcattaattttatctgttagattacaagaaaatgaagataaggatgaagtgtagctctaaaagagttagttagtgtaagttgatccccctttctctattttttaattggtaggaatctaaaatggtatcaaaagggttataatagtcgtatatcattttcaattaattaagttagacccttctctatatgtgttattaggaatctgtaatttatattttcattat

SEQ ID NO: 58399 - protein, 160 aa, Glycine max
  peptide (1)..(160): Ceres Seq. ID no. 15170636
MSELLFDDIFKVEKVDPDGKKYDKVSRIVARSEKCDMNMLLDVNTEIYPMGEKERFLMALSPSLVLNTKDGSVSIQDKFEYIMHGRLYNITKPQLEKKEKKEKRSESQPEENEECSKPQLEVEVYASFGGLQLMLKGHASHCVKFAVDQKLFLLIRKVES

SEQ ID NO: 58400 - protein, 124 aa, Glycine max
  peptide (1)..(124): Ceres Seq. ID no. 15170637
MNMLLDVNTEIYPMGEKERFLMALSPSLVLNTKDGSVSIQDKFEYIMHGRLYNITKPQLEKKEKKEKRSESQPEENEECSKPQLEVEVYASFGGLQLMLKGHASHCVKFAVDQKLFLLIRKVES

SEQ ID NO: 58401 - protein, 122 aa, Glycine max
  peptide (1)..(122): Ceres Seq. ID no. 15170638
MLLDVNTEIYPMGEKERFLMALSPSLVLNTKDGSVSIQDKFEYIMHGRLYNITKPQLEKKEKKEKRSESQPEENEECSKPQLEVEVYASFGGLQLMLKGHASHCVKFAVDQKLFLLIRKVES

SEQ ID NO: 58402 - DNA, 1640 bp, Glycine max
  misc_feature (1)..(1640): Ceres Seq. ID no. 15226295
acaaattgggtaccggkycccccctcgagtcagctacgtaggccccccccccgcagcagccaaaaaacccgaaaccaaaaacaacaaagttctattctattgaagagctccagcacgatggcttccctctctacattgctcccgaacccgaaccttatttccaagcacaacagcaccctttcttccactcacccatgtgcttattcctggaaaaacaaaaccccaaccagtaagggtcggttctccgtttcttgttcttcttcgtctcaagcatacgacgtcgtcgtagttggcgctggcgtcattggcttaaccatcgctcgccacttcctcgtttcttccgacctttctgtcgccgtagtcgataaggctgtcccttgttccggtgccactggcgcagggcagggacatctgtggatggtaaacaaaacccctgggagtgctacgtgggatcttgcgtcaaggagtcatcaactttggaagacgctggtacagagcatagaagagcaaggtttggatcctatggtggagttgggttggaaacagtctggaagcctattaattggtaggactgatgctgagtcagacgtgctaaaagggagggtgaaactactatgtgaggctgggttgaaagcagagtacctgtgtagcagtgatttgattaaagaggaacctgatctactggtggacaaagacagtgcagctgcatttctaccagatgactgccaaatagatgcttatcgcactgttgcatatattgaaaagactaacaggagttttgcatcaaaaggaagatatacagaattttatgatgacccagtgaaatgtttcatcaggtcagatagcaatggagaggtcaaagctgttcagacttccaagaacacaatatacagcaagaaagcagttatagttgcagctggttgttggactggttctttgatgcaggacttgtttagaaattggggaatggatttacatgttccagtaatgcccagaaagggtcacctacttgtggttcaaaatttcaatttccttcaaatgaatcatggcttgatggaggcagattatctcaaccatccaacaatttctggttcagaatcccctgatcatcaaaagaacttatctgtttcaatggtagcaagtatagatgcagcaggaaatcttcttcttgggagtagccgtgaatttgttggtttcaacaccaatttggacgagtctgttgtcagttacatatggaagcgagttggagaattctttcccaaattgaaaacacttccactttcagatctaagtgcaagtagaaaagtcagaataggattacgaccttacatgcctaatgggaagccagtgattgggcctgtgcctggcttgtcaaatgtgtaccttgcagctggacatgaagggagtggacttttaatggctttggggactgctgaaatgatcgttgagatggtgttgggatatccagcaaaagttgatagcacacctttcgctgtgcagaaagttcttgtttaaaatttgcacaactttggagaattctaagtaattagctctagttttatgtgaacaaggtattgaaattcatgcttaaataatttgctcataagctcttcttatattgtaataaaaagaaaacggtc

SEQ ID NO: 58403 - protein, 504 aa, Glycine max
  peptide (1)..(504): Ceres Seq. ID no. 15226296
  misc_feature (6)..(6): Xaa is any aa, unknown or other
TNWVPXPPSSQLRRPPPRSSQKTRNQKQQSSILLKSSSTMASLSTLLPNPNLISKHNSTLSSTHPCAYSWKNKTPTSKGRFSVSCSSSSQAYDVVVVGAGVIGLTIARHFLVSSDLSVAVVDKAVPCSGATGAGQGHLWMVNKTPGSATWDLASRSHQLWKTLVQSIEEQGLDPMVELGWKQSGSLLIGRTDAESDVLKGRVKLLCEAGLKAEYLCSSDLIKEEPDLLVDKDSAAAFLPDDCQIDAYRTVAYIEKTNRSFASKGRYTEFYDDPVKCFIRSDSNGEVKAVQTSKNTIYSKKAVIVAAGCWTGSLMQDLFRNWGMDLHVPVMPRKGHLLVVQNFNFLQMNHGLMEADYLNHPTISGSESPDHQKNLSVSMVASIDAAGNLLLGSSREFVGFNTNLDESVVSYIWKRVGEFFPKLKTLPLSDLSASRKVRIGLRPYMPNGKPVIGPVPGLSNVYLAAGHEGSGLLMALGTAEMIVEMVLGYPAKVDSTPFAVQKVLV

SEQ ID NO: 58404 - protein, 465 aa, Glycine max
  peptide (1)..(465): Ceres Seq. ID no. 15226297
MASLSTLLPNPNLISKHNSTLSSTHPCAYSWKNKTPTSKGRFSVSCSSSSQAYDVVVVGAGVIGLTIARHFLVSSDLSVAVVDKAVPCSGATGAGQGHLWMVNKTPGSATWDLASRSHQLWKTLVQSIEEQGLDPMVELGWKQSGSLLIGRTDAESDVLKGRVKLLCEAGLKAEYLCSSDLIKEEPDLLVDKDSAAAFLPDDCQIDAYRTVAYIEKTNRSFASKGRYTEFYDDPVKCFIRSDSNGEVKAVQTSKNTIYSKKAVIVAAGCWTGSLMQDLFRNWGMDLHVPVMPRKGHLLVVQNFNFLQMNHGLMEADYLNHPTISGSESPDHQKNLSVSMVASIDAAGNLLLGSSREFVGFNTNLDESVVSYIWKRVGEFFPKLKTLPLSDLSASRKVRIGLRPYMPNGKPVIGPVPGLSNVYLAAGHEGSGLLMALGTAEMIVEMVLGYPAKVDSTPFAVQKVLV

SEQ ID NO: 58405 - protein, 365 aa, Glycine max
  peptide (1)..(365): Ceres Seq. ID no. 15226298
MVNKTPGSATWDLASRSHQLWKTLVQSIEEQGLDPMVELGWKQSGSLLIGRTDAESDVLKGRVKLLCEAGLKAEYLCSSDLIKEEPDLLVDKDSAAAFLPDDCQIDAYRTVAYIEKTNRSFASKGRYTEFYDDPVKCFIRSDSNGEVKAVQTSKNTIYSKKAVIVAAGCWTGSLMQDLFRNWGMDLHVPVMPRKGHLLVVQNFNFLQMNHGLMEADYLNHPTISGSESPDHQKNLSVSMVASIDAAGNLLLGSSREFVGFNTNLDESVVSYIWKRVGEFFPKLKTLPLSDLSASRKVRIGLRPYMPNGKPVIGPVPGLSNVYLAAGHEGSGLLMALGTAEMIVEMVLGYPAKVDSTPFAVQKVLV

SEQ ID NO: 58406 - DNA, 1450 bp, Glycine max
  misc_feature (1)..(1450): Ceres Seq. ID no. 13638029
ttgtaatacagatacctcctattaaaattttttcaggccatcttatatggagaaaaaaaaaattcagacatgaactagtgaaatttgcaggtttcattgaaataaaccatcaagggaaaactattgggtaatttgcaggtttcattaatctcaagggaagttagtgaaatttactagtcttaatgattgctcgaatgagtatggataccctatttgtgttgtgacaacagaccttcaaacactaaatgtattgtttgttgttcattattcgtaatagtttgcatggagttgacaaaaacactgatctcaaataggtattgcagattataactctagcagaagtcgtaagccaattgctgtggttggtgaagctgagatgagaccaacaagtactgcagattataactctagtagaagtcgtaagccaattgctgtggttggtgaagctgggttgagaccacctgatttccagcaagaccctaatcagaaagcagatgcaaatctacaatccaaaccacctcaagaaagagctgaagacaaggctagtagtagttcaggcacaaggccaaaagaagttgtggaatctgttcctgttcaaaatcaagcagctgcccaaaagttacttcagaagttaaatcacccaagtcagaatgatcgacatcataggggttggaaacataggggcaagggraaacaagaagatccagttgtattcactctggaagaatatgaaaacagaaaggcccagacaaagccttctattaaagactgggatctagatatcagtcgtgatgagcatcttgctagacagcttcaaaatcaactagaccttgaagattctcgggtaggaaggggtacttatgaagacaaggcacaagatattaggatgagtatgttcgcatatgaaagggattctgacagcagccatcaaatggggcaaggaggaaggggaaggggaaggggaagaggaaagggtagaggaagggggagaggaagacatggttaactatcatgattttggtttcaagtgtttcttgtgaagatgaaaatcttggcttcagaatatgttaagagttccttgggcaaaatccaacgacaagacaatcgatagcatagggttcagttttcaaggtgatcaacctttgtgctttctttgttaaatgtatcataaattgggtatttatattcttttctttccatatagattgatcagtgaacttatcaccacatttcttattttgaatatactgaagcagagttcgagtgcttataagctatagtttgactagcctccctgatattctcaactccaaccttaccgaatctygtcatccaataawatacttgccttgttttggggtaaaaaaaaaaaaaaaaaaaaaaaaaaaaaaaaaaaaaaggaaaaaaaaaaaaaaaaagaattcctgctgtttaaacacaataaagtggg

SEQ ID NO: 58407 - protein, 209 aa, Glycine max
  peptide (1)..(209): Ceres Seq. ID no. 15220397
  misc_feature (105)..(105): Xaa is any aa, unknown or other
MRPTSTADYNSSRSRKPIAVVGEAGLRPPDFQQDPNQKADANLQSKPPQERAEDKASSSSGTRPKEVVESVPVQNQAAAQKLLQKLNHPSQNDRHHRGWKHRGKXKQEDPVVFTLEEYENRKAQTKPSIKDWDLDISRDEHLARQLQNQLDLEDSRVGRGTYEDKAQDIRMSMFAYERDSDSSHQMGQGGRGRGRGRGKGRGRGRGRHG

SEQ ID NO: 58408 - DNA, 823 bp, Glycine max
  misc_feature (1)..(823): Ceres Seq. ID no. 13595723
atgctgtagcaaaccaaggtgtgaacactgaggttcataaatcagaaagttcagatcaacgggtaacaagtctgggcagagtgcctcctgcgaaaatgaccatgtcaaatgaaacccgacatgctctgccaattgccctgaagaaactttttcagactcacaaagtttgcagcttcaaattgatatgcgaaggattgcgcgaaatggcagtttccaaagctatgctttcaaagggagattctaaaatggctgtggatgcagctcacagtcttgatggtccccataatgagttgatggctgtcataagtgaagttgcatgcgaaatcaatggttcttatgtgctgaagtcatcacccgatgatccattcagggatgttgtaattgatatgctttgtggaagtggacccaatgccaagctgaagaaggctgagatacttgaagctgccagaagaaaactcggtagggaggtcgctagcaatgaatataccaaggtcatgagcgagttatgtgtgtcaaaaggttctgtttgggtcttgaaaagcggtgatggaagtaagtaagcaatgatccgaggtccccgaggattgaactgcccacctgctcatgaatggaagtcatactctgctttctcatgagactaccagagtttagtttattggtcatagtcattattctcaaatattcaaatcttttccaactttttagctttagataaggaataaatttaaagagaatattttttattgttcgaatcaaaagaaaaaggtagagaagttagatgaaagaaaacaggaatggacaaagattgccctgttagctatta

SEQ ID NO: 58409 - protein, 185 aa, Glycine max
  peptide (1)..(185): Ceres Seq. ID no. 13595724
AVANQGVNTEVHKSESSDQRVTSLGRVPPAKMTMSNETRHALPIALKKLFQTHKVCSFKLICEGLREMAVSKAMLSKGDSKMAVDAAHSLDGPHNELMAVISEVACEINGSYVLKSSPDDPFRDVVIDMLCGSGPNAKLKKAEILEAARRKLGREVASNEYTKVMSELCVSKGSVWVLKSGDGSK

SEQ ID NO: 58410 - protein, 154 aa, Glycine max
  peptide (1)..(154): Ceres Seq. ID no. 13595725
MTMSNETRHALPIALKKLFQTHKVCSFKLICEGLREMAVSKAMLSKGDSKMAVDAAHSLDGPHNELMAVISEVACEINGSYVLKSSPDDPFRDVVIDMLCGSGPNAKLKKAEILEAARRKLGREVASNEYTKVMSELCVSKGSVWVLKSGDGSK

SEQ ID NO: 58411 - protein, 152 aa, Glycine max
  peptide (1)..(152): Ceres Seq. ID no. 13595726
MSNETRHALPIALKKLFQTHKVCSFKLICEGLREMAVSKAMLSKGDSKMAVDAAHSLDGPHNELMAVISEVACEINGSYVLKSSPDDPFRDVVIDMLCGSGPNAKLKKAEILEAARRKLGREVASNEYTKVMSELCVSKGSVWVLKSGDGSK

SEQ ID NO: 58412 - DNA, 1137 bp, Glycine max
  misc_feature (1)..(1137): Ceres Seq. ID no. 15171460
gactcttcttccttcctaggatgctgctcatggcctctaccctccctttcccaacactttccattcttcctcacaaggcacactgcaaatcaacaccaaaacttcatccacttcctcacatctcttcaagattgaatgttgtttcaaaagatcctcccatattattagatcaatcttgcaatgttctaaaaaatgcctctctttccctcacatcaatcacactcccctttttattggaacaaaaggatgtggcacttgctgttgaaggggaatttgggatattggaaggaagaacatttgctctcatacaccccattgtgatggcttctttgttcttgtacaccttgtgggcaggatatttggggtggcagtggaggagagtgaggactattcagaatgagattaatgagttaaagaaacaagtgaagcctaccccagtcaccccagaagaagtgccaccaccatcagaaattgagctcaaaattcagcaacttactgaggagaggaaagagctgctaaaagggtcttacaaggataggcattataatgcaggatccatacttctaggatttggggtgcttgaggctgttggtggaggattgaacacttggattaggacagggaagctattcccaggcccacatttgtttggaggagcagctattgcagtgttgtgggcactttcagcagcattggtaccatcaatgcagagagggagtgaaacagcaagaagtcttcacattgctttgaatacattaaacgtgctgctatttgtgtcacagcttcccactggatttgacattttattgaaagtgtttgagttcacaaactggccttgaatgatgtttcccttagatgtactccaatttgcaacaccaaaatcaccccaatttcatagtttaagatcacactttttctttttcttgaataaggtgtagaagtgtgtttaattaaaagtgaaggagacgaatataaatgtcattgtaattaattgggtagttgtagagtagtgaaatcagattccaaaagtaacttcgggatttatggcaatgtaaatcgtttttattttcctcggtgacatgacagtggacccatcagccaatgttgtctatcttaatctgatactctctttacaag

SEQ ID NO: 58413 - protein, 278 aa, Glycine max
  peptide (1)..(278): Ceres Seq. ID no. 15171461
LFFLPRMLLMASTLPFPTLSILPHKAHCKSTPKLHPLPHISSRLNVVSKDPPILLDQSCNVLKNASLSLTSITLPFLLEQKDVALAVEGEFGILEGRTFALIHPIVMASLFLYTLWAGYLGWQWRRVRTIQNEINELKKQVKPTPVTPEEVPPPSEIELKIQQLTEERKELLKGSYKDRHYNAGSILLGFGVLEAVGGGLNTWIRTGKLFPGPHLFGGAAIAVLWALSAALVPSMQRGSETARSLHIALNTLNVLLFVSQLPTGFDILLKVFEFTNWP

SEQ ID NO: 58414 - protein, 272 aa, Glycine max
  peptide (1)..(272): Ceres Seq. ID no. 15171462
MLLMASTLPFPTLSILPHKAHCKSTPKLHPLPHISSRLNVVSKDPPILLDQSCNVLKNASLSLTSITLPFLLEQKDVALAVEGEFGILEGRTFALIHPIVMASLFLYTLWAGYLGWQWRRVRTIQNEINELKKQVKPTPVTPEEVPPPSEIELKIQQLTEERKELLKGSYKDRHYNAGSILLGFGVLEAVGGGLNTWIRTGKLFPGPHLFGGAAIAVLWALSAALVPSMQRGSETARSLHIALNTLNVLLFVSQLPTGFDILLKVFEFTNWP

SEQ ID NO: 58415 - protein, 269 aa, Glycine max
  peptide (1)..(269): Ceres Seq. ID no. 15171463
MASTLPFPTLSILPHKAHCKSTPKLHPLPHISSRLNVVSKDPPILLDQSCNVLKNASLSLTSITLPFLLEQKDVALAVEGEFGILEGRTFALIHPIVMASLFLYTLWAGYLGWQWRRVRTIQNEINELKKQVKPTPVTPEEVPPPSEIELKIQQLTEERKELLKGSYKDRHYNAGSILLGFGVLEAVGGGLNTWIRTGKLFPGPHLFGGAAIAVLWALSAALVPSMQRGSETARSLHIALNTLNVLLFVSQLPTGFDILLKVFEFTNWP

SEQ ID NO: 58416 - DNA, 1317 bp, Glycine max
  misc_feature (1)..(1317): Ceres Seq. ID no. 15176197
gggaaaaaagtatatgccaaactcattttatattctcttccaccttactccatcctcgatcatgtgaaaaaagtttattttaccaaaaattgtggttatggttctgactgaaaccagtttatgattggcgtatatgcaaaatttgaatggtctaataatgccgattaaatttccgagctaattcctgagattgtgttgttatgcattgttgcagatgaaggtgaaaaagcagaagaggcataggaagattttgacgttttacactgcttgcttcggttttcggaagcctttcaaggttctatgtgatggcacattcgtgcatcaccttcttgtgaatcgaataacccctgctgacacggccattggcaatgttctcagtgctacggtcaagctctacacaacaagatgtgttctagctgagttgaatcgactcggtagctcgtattctgaggctctggaggcagctcataaacttatagttgcaagatgtgagcatgaaaaatgtaagagtgcagatgcttgcatcatggaggttgttggaggaaaaaactctgagcatttctttgttgctagtcaggacactgacctgcggaaaaagttgcaagaggtacctggtgtgcctctcatatttggtcttagaaatgctcttttccttgaatctccatctgcatttcagcggcaatatgtcaaaacttctgaagaaggacgattgcatatgactcagaaggagtaccagatatttaaggatagggtaattaatagattgactggtgaggaagctaaccattccatttctcaaataatggaaaatgacgattcagaagatcagaccataaatgtgcaggcagtaaagaagggtattactgcaaggaatcatatggaaatcaaggataaacctcagttcaagagaaaaagagctaagggcccgaacccactttcatgcaagaagaagaaaagtgaaaaacaaaatattggtcctttgaaggaaacagatggagacaactcagtgaagagaagtaggaaaagaaagaggtcacagagacggaaaatgccaacagaaacaggcagttaggtggatcttttttatatatacagttacaaataggaatttttagagagcttcttgactttactgcttctgttgagtggagagaaaagcaagttttacttttgatccatgctgacatgggaggggaaagtgtatctagattagttgcatgttgaattttatactgtttctattttgctggcgatcgtatttttacttaactatggatacccaaatagccgttggtcacaaaattgcttctgatattt

SEQ ID NO: 58417 - protein, 285 aa, Glycine max
  peptide (1)..(285): Ceres Seq. ID no. 15176198
MKVKKQKRHRKILTFYTACFGFRKPFKVLCDGTFVHHLLVNRITPADTAIGNVLSATVKLYTTRCVLAELNRLGSSYSEALEAAHKLIVARCEHEKCKSADACIMEVVGGKNSEHFFVASQDTDLRKKLQEVPGVPLIFGLRNALFLESPSAFQRQYVKTSEEGRLHMTQKEYQIFKDRVINRLTGEEANHSISQIMENDDSEDQTINVQAVKKGITARNHMEIKDKPQFKRKRAKGPNPLSCKKKKSEKQNIGPLKETDGDNSVKRSRKRKRSQRRKMPTETGS

SEQ ID NO: 58418 - protein, 181 aa, Glycine max
  peptide (1)..(181): Ceres Seq. ID no. 15176199
MEVVGGKNSEHFFVASQDTDLRKKLQEVPGVPLIFGLRNALFLESPSAFQRQYVKTSEEGRLHMTQKEYQIFKDRVINRLTGEEANHSISQIMENDDSEDQTINVQAVKKGITARNHMEIKDKPQFKRKRAKGPNPLSCKKKKSEKQNIGPLKETDGDNSVKRSRKRKRSQRRKMPTETGS

SEQ ID NO: 58419 - DNA, 1293 bp, Glycine max
  misc_feature (1)..(1293): Ceres Seq. ID no. 13594172
ttcatcctttcttcactcctaccaatatcaaatatggtatcaaccgaagcagatgcctcaacacaaaaggttctgttttgtgcctctgcaagtccaatgaatctgaatctcaagctccccaaccaggagatattcgtaaacaagaactgctagcccaaattgccatgcttcaaactcagaaagtttgtctcacagattattttgatgagagatctgaatacttaacccagtttggtgaagaagccaaggccgagtttgacaagattggaaaagatgccctccaaggattagatgaagctagtgccattgtatgcttcaacttttgagttaacaatgtagtgtatttttggtttttgcatttggaaagtctcaaaccatggtttggtaaaagtctgtctcttgtgccatacacactagccaatcaatcatcaagcacggcatggaggaaaatcgatatgtgaaaggtattttagtaatgaccgcttattgtgttcatttgtgtttggcagataacagcaaacatagagagccagatggtggagtttgaggaatctgcagaacttaacagacaagagattcaggagcatgaaaaagaactaggtgaatttgaagttcaaatggaggatggaagaaatgaagggctgttctttaagaacctcagaaggaggacacctgttgacaaatcaaaagccaaggaggaggcagagaaaatcaaagatgtagccagagaaaaagctggtagcagaacaaggaaaggcttttacctcctctttattggcctactgacctttgcaatagttgattctattgcctcatcatcaactgattggaaaaaaatagcagttcttggagctactcttgtggctttagtttctcagttcatctacgaacagaatgtcattagaaactggagaaaaaagaaagaccgacacagaagaggaaaataactgaagtttaattgttactgagattcaatgcaagtttctgtggaagacaaaaagtataatggatgttgcgtgatacaataaacccaagtggaagcttataacttgggcctgataacatcatgctaatttgctttggcatcaacaacagcagatattggtgatataactacaatcaccaaaatctgagtaactgggttaccaagtgatgctgatgaaacttttcacatcttatgtcaatacaaaaaaacatactcttattatcatactagtttttagacatgtacatttggaacctgacgtgtatctctgtgtcttatgtcatatatacaattaatgagaaactaat

SEQ ID NO: 58420 - protein, 137 aa, Glycine max
  peptide (1)..(137): Ceres Seq. ID no. 13594173
MVEFEESAELNRQEIQEHEKELGEFEVQMEDGRNEGLFFKNLRRRTPVDKSKAKEEAEKIKDVAREKAGSRTRKGFYLLFIGLLTFAIVDSIASSSTDWKKIAVLGATLVALVSQFIYEQNVIRNWRKKKDRHRRGK

SEQ ID NO: 58421 - protein, 109 aa, Glycine max
  peptide (1)..(109): Ceres Seq. ID no. 13594174
MEDGRNEGLFFKNLRRRTPVDKSKAKEEAEKIKDVAREKAGSRTRKGFYLLFIGLLTFAIVDSIASSSTDWKKIAVLGATLVALVSQFIYEQNVIRNWRKKKDRHRRGK

SEQ ID NO: 58422 - protein, 107 aa, Glycine max
  peptide (1)..(107): Ceres Seq. ID no. 13594175
HPFFTPTNIKYGINRSRCLNTKGSVLCLCKSNESESQAPQPGDIRKQELLAQIAMLQTQKVCLTDYFDERSEYLTQFGEEAKAEFDKIGKDALQGLDEASAIVCFNF

SEQ ID NO: 58423 - DNA, 1234 bp, Glycine max
  misc_feature (1)..(1234): Ceres Seq. ID no. 14308120
gatcagaagttagctgcataacccagagaaaagtaaacactgcaataggaagagttttcaaatggcagagggaaaaggtagagtttgtgtcactggaggcactgggttccttggttcatggatcatcaagagactccttgaagatggatatgctgttaacaccactattagatctgacccaggacgaaagagagatgttagcttcctcacaaacctaccaggcgcatccgaaaagctaaaaattttcaacgctgatctcagcgaccctgaaagttttgatccagcagttgagggatgtgttggaattttccacacagccacgccaattgattttgcagtgaacgagcctgaggaagtggtaaccaaaagagccatcgatggagcactaggcataatgaaagcaggcctaaaagcaaagacagtgaagagggttgtttacacttctagtggctccaccgtttccttcagcagccttgaagaaaaagatgtggtggatgagagtgtttggagtgatgtggatatgcttaggagtgtaaagccttttggttggtcctatgcagtttcaaaggtgttgactgagaaggctgtgcttgaatttggagaacataatgggttggaagttgcaactgttattgctccttttattgttggtccttttgtttgtcccaagcttcctgactctattgaaaaagctctgcttatggtgttgggcaaaaaagaagaaattggtgtcattcgttaccatatggtacatgtggatgatgtggctagagcacatatcttcctgcttgagcatcctaatccaaaagggagatataattgctcaccattcattgtacccattgaagagatgggtgaacttctttcagccaaatacccggaatttcaactaccaacagtagacgagctgaagggaattaaaggtgccaagcaaccacatttaacctccaagaaacttgttgatgctggttttgagttcaagtatagcttagaggacatgtttcaggatgcaattgaatgctgcaaggaaaagggttatctttaatcgaatttagccatgaagttgacaaaataaaattgatgcatatggttgttagtttgaactatttcagatcgatggcaatcatggctaatgacatatatgtacatctaggaatgcatgatgttactcgtaatagatgaatgaggaaaataatcttcttcgtttgtctaaatgctaaataaaccatttaac

SEQ ID NO: 58424 - protein, 327 aa, Glycine max
  peptide (1)..(327): Ceres Seq. ID no. 14308121
MAEGKGRVCVTGGTGFLGSWIIKRLLEDGYAVNTTIRSDPGRKRDVSFLTNLPGASEKLKIFNADLSDPESFDPAVEGCVGIFHTATPIDFAVNEPEEVVTKRAIDGALGIMKAGLKAKTVKRVVYTSSGSTVSFSSLEEKDVVDESVWSDVDMLRSVKPFGWSYAVSKVLTEKAVLEFGEHNGLEVATVIAPFIVGPFVCPKLPDSIEKALLMVLGKKEEIGVIRYHMVHVDDVARAHIFLLEHPNPKGRYNCSPFIVPIEEMGELLSAKYPEFQLPTVDELKGIKGAKQPHLTSKKLVDAGFEFKYSLEDMFQDAIECCKEKGYL

SEQ ID NO: 58425 - protein, 216 aa, Glycine max
  peptide (1)..(216): Ceres Seq. ID no. 14308122
MKAGLKAKTVKRVVYTSSGSTVSFSSLEEKDVVDESVWSDVDMLRSVKPFGWSYAVSKVLTEKAVLEFGEHNGLEVATVIAPFIVGPFVCPKLPDSIEKALLMVLGKKEEIGVIRYHMVHVDDVARAHIFLLEHPNPKGRYNCSPFIVPIEEMGELLSAKYPEFQLPTVDELKGIKGAKQPHLTSKKLVDAGFEFKYSLEDMFQDAIECCKEKGYL

SEQ ID NO: 58426 - protein, 174 aa, Glycine max
  peptide (1)..(174): Ceres Seq. ID no. 14308123
MLRSVKPFGWSYAVSKVLTEKAVLEFGEHNGLEVATVIAPFIVGPFVCPKLPDSIEKALLMVLGKKEEIGVIRYHMVHVDDVARAHIFLLEHPNPKGRYNCSPFIVPIEEMGELLSAKYPEFQLPTVDELKGIKGAKQPHLTSKKLVDAGFEFKYSLEDMFQDAIECCKEKGYL

SEQ ID NO: 58427 - DNA, 768 bp, Glycine max
  misc_feature (1)..(768): Ceres Seq. ID no. 15226758
accggsccccmcctcgagtcagctacgtaggcccccccccgagagttgttgatatcactcactcctcaaagcgcagaacacacattaagaaacattatatctaatatccatcgagagagtgacacaaaaccctaaccaaaacgacaccgtgggatctgttcctcctctcagattttgctgcaatgggcaagaaaaagttagattcaaagtccgatcgcaaattcgaaaagaaggtccaattttattccaaggtgaaagatgctgttacctccttgagtgcccaaaagtctattactaagaaaaagaaaaagagcaaacaacaaaggcggcagaagaaattgaaggcatataatctatcttcacttttagagtcccttcctgaggtgaaggcatcaaagaaaccaggttgtgcgaatgacagcaaacttacgtgtaaatccaggcagatgctagtattgactgaaagagatcgaatttctgctgttctcaatgatcctaactttcaagcagatcccctgtctgccattcatcaatatatacagaagaaacaaccggtagtagaggaacaacccaagaaaaaagtgaacaaaaatggatccaggaagaagaaatcaaaggcttcaactgggctacaatctatggaaatgtagtgtcttgtgtggctgctataatgatcaactttttttgaaggtctttcaataattttactacttctgtaaaacattagattactcgaattatgaatgcaaataactatggtaattggtc

SEQ ID NO: 58428 - protein, 155 aa, Glycine max
  peptide (1)..(155): Ceres Seq. ID no. 15226759
MGKKKLDSKSDRKFEKKVQFYSKVKDAVTSLSAQKSITKKKKKSKQQRRQKKLKAYNLSSLLESLPEVKASKKPGCANDSKLTCKSRQMLVLTERDRISAVLNDPNFQADPLSAIHQYIQKKQPVVEEQPKKKVNKNGSRKKKSKASTGLQSMEM

SEQ ID NO: 58429 - DNA, 1121 bp, Glycine max
  misc_feature (1)..(1121): Ceres Seq. ID no. 12612090
tgagaaataaattgggcatttatgcatattttaggttacctcgttaccttagaagcctaaagaatgctgctgggagcaggagaaccaaactgttgtttctccctaacggaatgtcgagaagagagaagaatcggtctcaatatgaccagcggaagaagtttatatcttggacaattgaattacattttcactcaacagatattgttttactcgaccatgaagttgatgaaaatacaagcttttactccattctagagaagcacctcaagcctggtccttggaagaatcagctaaggcaattttgtgaagtccagctggattgtctaaagcttttcattcgtaaatacccgaaaggtcccaagtcatctttcaaggagttagatataaaagcgccaatcagacagcaattagcaaatatagtcattttggagtttcctgttgtttttgttttcttgccatctcacagaatcaattttgaagttattaaggatgtcaataccagcaaacataaatcactgcagaaagattgtgaagacaaccaattccctcaaggtttatcttttagggaggaagtgatagaagatgacaacaactctgcagatcctcaggtttttgatctcatgaagcaagtggaatcaagtttatcacatgaagtgatgacccaaaatatgagttctgagaaagcaccaaatgattccccagagaagtctctgtttgaaggagcttctgggggtaatctttcacattctttgacggaaaccaatgaactaaaattctctgaagatatgacatttgactttgatcaggatttgatggatttctatactgatatcttggatcaaacaaatcctggtgatctttttgattttgatggtgaattttcaaagaaaacagaaaatgaaatagatttaattggtactagtgatttattccctatgccagaggaattggaggaaggggaaattttagaataattggtagctataattcacttctgttgaatagttggagagaaaatgagaaaacattgacaacatcaatactattatatgttttgaggttgaggtccattgattcccataatgggtttgaagccgagtttccagttgtgtggacatgat

SEQ ID NO: 58430 - protein, 323 aa, Glycine max
  peptide (1)..(323): Ceres Seq. ID no. 12612091
RNKLGIYAYFRLPRYLRSLKNAAGSRRTKLLFLPNGMSRREKNRSQYDQRKKFISWTIELHFHSTDIVLLDHEVDENTSFYSILEKHLKPGPWKNQLRQFCEVQLDCLKLFIRKYPKGPKSSFKELDIKAPIRQQLANIVILEFPVVFVFLPSHRINFEVIKDVNTSKHKSLQKDCEDNQFPQGLSFREEVIEDDNNSADPQVFDLMKQVESSLSHEVMTQNMSSEKAPNDSPEKSLFEGASGGNLSHSLTETNELKFSEDMTFDFDQDLMDFYTDILDQTNPGDLFDFDGEFSKKTENEIDLIGTSDLFPMPEELEEGEILE

SEQ ID NO: 58431 - protein, 287 aa, Glycine max
  peptide (1)..(287): Ceres Seq. ID no. 12612092
MSRREKNRSQYDQRKKFISWTIELHFHSTDIVLLDHEVDENTSFYSILEKHLKPGPWKNQLRQFCEVQLDCLKLFIRKYPKGPKSSFKELDIKAPIRQQLANIVILEFPVVFVFLPSHRINFEVIKDVNTSKHKSLQKDCEDNQFPQGLSFREEVIEDDNNSADPQVFDLMKQVESSLSHEVMTQNMSSEKAPNDSPEKSLFEGASGGNLSHSLTETNELKFSEDMTFDFDQDLMDFYTDILDQTNPGDLFDFDGEFSKKTENEIDLIGTSDLFPMPEELEEGEILE

SEQ ID NO: 58432 - DNA, 1497 bp, Glycine max
  misc_feature (1)..(1497): Ceres Seq. ID no. 15170493
aaaattccgattccgccgctaacaaaccctaataaagcttaattagcttggactgttaacttgactcagcgcaccacaaccccagtgtggttcccggaaccggaaggtactggcttggctaggttagttgcagcagcaacaccacacaacagccaaggtagggccagtttgaatatttgctcaacacaagcgtttactagggttttttccgctgaaaagtacgtgtcccattcttgtcaacaaacgtggcgcgcttcttaacataagcacttgcaatggcggattcagagcgaatccaaaattcgtggatggcttcggatcaaactgcaattgaaatgagcggcgagggcacaggttccagggaatgctcttctctccctccgccgccgcaaaaaccattcaattctgatcaattgggaatcggagaacgagctttctccgccgccggcgccgccttcctctccgccattattgtcaatcccctcgacgttgccaagacaaggttgcaagcacaagcggcaggggtcgcatattctcatccactcagtaatatgaccagtagaatggcttgttttgggccaaatatgatatttgctgatttaaaatgttctccatcatgccaccgggctggattccagggcacagtgtccatttgtcctcccgagtgttttcgctacaaaggaacactagatgttatctacaaaattataaaacaggagggaatttctaggctatggagaggcacaaatgctggcctggctcttgcagtaccaactgtgggaatataccttccttgctatgacatactccgcaattggttggaggaattcacagctaaaaaggcaccaaccacaactacttatgtacctctagtagctggttcattggcacgctctctagcttgcactacttgctaccctattgaacttgctaaaactcgtatgcaggcatttaaagagactcaaattggtaaaaagcctcctggagtgatccagactctgctaggtgttgtttcaaatgtcaagagcacaaacactccacagaacagcttgcaaggttatcgtgttttgtggactggcatgggagctcaacttgcccgtgatgtacccttctctgctatttgttggtcgacacttgaaccgactagaagaaaacttcttggtttgattggaggtgatgatgccaatgcattgagtgttcttggggcaaattttggagctgggtttgttgcaggaaccttagcagctggagccacatgtccgctagatgttgtaaaaactcgaaggcagatagagagggatcctgttagggcattgaaaatgactacaagacagacactgatggaggtgtggagagatggaggcttgaaaggattgtttacaggtgttggtccacgagttggtcgagcaggcccctctgttggaattgtgatttcattttatgaagttgtaaagtttgttctacatcatcagtacacataatcatgattttctgcac

SEQ ID NO: 58433 - protein, 401 aa, Glycine max; identical to SEQ ID NO: 54591
  peptide (1)..(401): Ceres Seq. ID no. 15170494

SEQ ID NO: 58434 - protein, 390 aa, Glycine max; identical to SEQ ID NO: 54592
  peptide (1)..(390): Ceres Seq. ID no. 15170495

SEQ ID NO: 58435 - protein, 381 aa, Glycine max; identical to SEQ ID NO: 54593
  peptide (1)..(381): Ceres Seq. ID no. 15170496

SEQ ID NO: 58436 - DNA, 1325 bp, Glycine max
  misc_feature (1)..(1325): Ceres Seq. ID no. 15177592
actacttctccctctctccctctctaatagtaacagtaatagtaatatacataacataaccaatggaagcacgtgcaggagccaatcaacgtattgcaagaatctctgctcatcttcagccttcaaatttccaggaagggagtgatgttcttcttaagagaggtgagtgcagagcaaaaggtggggcacctggattcaaagttgcaattttgggggctgctggaggaattggtcaatccctttctttgctgatgaagatgaacccattggtttcagttcttcatctttatgatgttgtcaacacccctggtgtcacagctgatgttagccacatggacactggtgctgtggttcgtggctttctggggcagcaacaacttgagagtgcactcactggcatggacttggtaatcatacctgctggggtgccaaggaaacctgggatgacaagagatgatttatttaaaataaatgctggaattgtgaggaccctttctgaaggaattgccaagtgctgccccaatgcaattgtcaacttgattagtaatccagtgaattccacagttgctattgctgcggaggttttcaagaaagccggtacatatgatccaaagcgactactgggtgttacaacccttgatgttgtgagggcaaatacttttgtggcagagatacttggagttgatccaagagaggttgatgttccagtggttggaggtcatgctggagtcacaattttgcctcttttgtcacaggttaagcctcccagtagcttcactgcagaagaaactgaatacctgacaaatcgcatccaaaatggtggaactgaagttgttgaggcaaaagctggggctggttctgcaacactgtcaatggcatatgcagctgccaagtttgctggtgcatgcctccgtggcttaaaaggagaagctggggtagtggagtgtgcttttgttgattctcaggttacagaacttcccttctttgcaaccaaagtgcgtctaggtcgtgctggagcagaagaagtttatcaactgggtcccctgaatgagtatgaaaggattggattggaaaaagcaaagagagagttagcaggaagcatccagaagggtgtagagttcatcagaaaataaatgtgataaggaaaaactagtttttgtctcttatatttaaggaccatgtgtaatacttctctttgttcatagatttttttcttcttcttaagaatagtactctaaatttttggtgtcatccgtaattgctgatgataacggatttgacatcaataatctcagaaagatactaaaatatcagccttttgtact

SEQ ID NO: 58437 - protein, 356 aa, Glycine max
  peptide (1)..(356): Ceres Seq. ID no. 15177593
MEARAGANQRIARISAHLQPSNFQEGSDVLLKRGECRAKGGAPGFKVAILGAAGGIGQSLSLLMKMNPLVSVLHLYDVVNTPGVTADVSHMDTGAVVRGFLGQQQLESALTGMDLVIIPAGVPRKPGMTRDDLFKINAGIVRTLSEGIAKCCPNAIVNLISNPVNSTVAIAAEVFKKAGTYDPKRLLGVTTLDVVRANTFVAEILGVDPREVDVPVVGGHAGVTILPLLSQVKPPSSFTAEETEYLTNRIQNGGTEVVEAKAGAGSATLSMAYAAAKFAGACLRGLKGEAGVVECAFVDSQVTELPFFATKVRLGRAGAEEVYQLGPLNEYERIGLEKAKRELAGSIQKGVEFIRK

SEQ ID NO: 58438 - protein, 293 aa, Glycine max
  peptide (1)..(293): Ceres Seq. ID no. 15177594
MKMNPLVSVLHLYDVVNTPGVTADVSHMDTGAVVRGFLGQQQLESALTGMDLVIIPAGVPRKPGMTRDDLFKINAGIVRTLSEGIAKCCPNAIVNLISNPVNSTVAIAAEVFKKAGTYDPKRLLGVTTLDVVRANTFVAEILGVDPREVDVPVVGGHAGVTILPLLSQVKPPSSFTAEETEYLTNRIQNGGTEVVEAKAGAGSATLSMAYAAAKFAGACLRGLKGEAGVVECAFVDSQVTELPFFATKVRLGRAGAEEVYQLGPLNEYERIGLEKAKRELAGSIQKGVEFIRK

SEQ ID NO: 58439 - protein, 291 aa, Glycine max
  peptide (1)..(291): Ceres Seq. ID no. 15177595
MNPLVSVLHLYDVVNTPGVTADVSHMDTGAVVRGFLGQQQLESALTGMDLVIIPAGVPRKPGMTRDDLFKINAGIVRTLSEGIAKCCPNAIVNLISNPVNSTVAIAAEVFKKAGTYDPKRLLGVTTLDVVRANTFVAEILGVDPREVDVPVVGGHAGVTILPLLSQVKPPSSFTAEETEYLTNRIQNGGTEVVEAKAGAGSATLSMAYAAAKFAGACLRGLKGEAGVVECAFVDSQVTELPFFATKVRLGRAGAEEVYQLGPLNEYERIGLEKAKRELAGSIQKGVEFIRK

SEQ ID NO: 58440 - DNA, 1421 bp, Glycine max
  misc_feature (1)..(1421): Ceres Seq. ID no. 15169191
gaactatccttctctctctctctcatccacgccccaaatcttagggttttcaccaaataaaacaaccccaattcctcgaactcttcgattcgattacccaaccccacacgctgattccacatcctccatgagatttggttgattggatcgtacgatggcggcgccgaggaatgtgacggcgacgagggacgaagagaagggcgaggacgatgattcgccctccgcgaagaagcccaaatcggagaggttcccgctgaacacgtgggaattcgccgtcgccgtcgccgtcttcttggtgttctccaccggcctcttctgcatttacctcaccatggcctcgggcgcttacaccaacctcaaactcccccgcaccctctccgatcttcgcctcctcaaggaacatctttcgacgtatgcgagtaaccaccctgcgcagttcattcttgggtactgctccacctacatcttcatgcaaactttcatgattcttgggacaatcttcatgtccctcttggctggggcgctttttggagttgtacgaggaatcctattggttgttttcaacgccactgcgggtgcatcttcctgtttctttttgtctaagttaattgggaggcctttggtttcttggttgtggcctgaaaagctaaggttcttccaagctgagattgcgaagcgtagggataggctgctgaattacatgctttttctgaggataaccccgacattgccgaatctgttcatcaatttggcgtctcccatcgttgatgttcccttccatatattcttttcggcgacattgattgggctcgttccagcctcttatattactgtcagagctggccttgctcttggggatctaaagtcaattaaggatctatatgattttaagaccttatcagtacttttcctcattggttttgtttccatagctccaacacttttgaagcggaagcgagtatatgaatgaaggtttcctggctcagcttgcacaatcaagtttgtcaaaaggcaagttacgtgatctaattagatgatgaagacagtggatcagagaagataatatttaagaaagatatccatgaaaaaggaatgtattgttattaacttaaacagtggcatatgctccattttattttctgtggtggagcctaagtttttttgtttcccttttcattttttgatcgtgtggagagagtaaggttagacttagctgattggtgtacaatcaattcagctaaggttacgaggctttgttggagcattaaattatgtattggccttgatgtcatcaggaagattgtggtgattgtttagcggtgctgtatgtatgtgcttcgcaccaaataggatctgactttttaccctgtagtattgctttattcaattataagatattatcgtagaaaatttcaagtatc

SEQ ID NO: 58441 - protein, 271 aa, Glycine max
  peptide (1)..(271): Ceres Seq. ID no. 15169192
MAAPRNVTATRDEEKGEDDDSPSAKKPKSERFPLNTWEFAVAVAVFLVFSTGLFCIYLTMASGAYTNLKLPRTLSDLRLLKEHLSTYASNHPAQFILGYCSTYIFMQTFMILGTIFMSLLAGALFGVVRGILLVVFNATAGASSCFFLSKLIGRPLVSWLWPEKLRFFQAEIAKRRDRLLNYMLFLRITPTLPNLFINLASPIVDVPFHIFFSATLIGLVPASYITVRAGLALGDLKSIKDLYDFKTLSVLFLIGFVSIAPTLLKRKRVYE

SEQ ID NO: 58442 - protein, 212 aa, Glycine max
  peptide (1)..(212): Ceres Seq. ID no. 15169193
MASGAYTNLKLPRTLSDLRLLKEHLSTYASNHPAQFILGYCSTYIFMQTFMILGTIFMSLLAGALFGVVRGILLVVFNATAGASSCFFLSKLIGRPLVSWLWPEKLRFFQAEIAKRRDRLLNYMLFLRITPTLPNLFINLASPIVDVPFHIFFSATLIGLVPASYITVRAGLALGDLKSIKDLYDFKTLSVLFLIGFVSIAPTLLKRKRVYE

SEQ ID NO: 58443 - protein, 166 aa, Glycine max
  peptide (1)..(166): Ceres Seq. ID no. 15169194
MQTFMILGTIFMSLLAGALFGVVRGILLVVFNATAGASSCFFLSKLIGRPLVSWLWPEKLRFFQAEIAKRRDRLLNYMLFLRITPTLPNLFINLASPIVDVPFHIFFSATLIGLVPASYITVRAGLALGDLKSIKDLYDFKTLSVLFLIGFVSIAPTLLKRKRVYE

SEQ ID NO: 58444 - DNA, 1307 bp, Glycine max
  misc_feature (1)..(1307): Ceres Seq. ID no. 15225111
ccgggccccccctcgagtcagctacgtaggcccccccccaatatctctcttcctttctctttattctctcacacaaaataatggacaagaagcttggcaacacgtctcatgatcctgaagtgagaaaggggccatggacaatggaagaagacttaatcttgatcacctatattgccaatcacggggaaggggtttggaactctttggccaaggctgctggacttaaacgtaccggaaagagttgccggctccggtggctaaactacctccgtcctgatgttagaagagggaatattacacccgaggaacagcttttgatcatggaacttcatgcaaagtggggaaacaggtggtccaaaattgccaagcatctacccggaaggactgataatgagattaagaactactggaggacaaggatccagaagcacctcaagcaagcttccagcagcttccagcaacagagtagtaattctgagataatttatcatccccaagcttgcactagccaagtgtccaccatggcgcagcccatagaaacctattctccacccagttatcaaggaatgttagatccattttcaattcagttcccaacaaatcctcatcattctagttgttgtaccaatgacgacgacaacaacaactattggagcatggaggatatctggtcaatgcaattagccaattactgaacgggaattaaacctataaacataaatataaataatatatataaacctaagtgtctaagttccataaattaagctgtagtctctggcttaaaacatgttaggtttgtttatacaagtagttggatgtttggagtacttcggtcttttgcgtaccatcaatatttaagaactaagttagttatgttccgtaacttatgggctcttaattaaactatatctgcacaaaattatatatatatcaaatgtgatggtatgtggactataaaaagatatggttgagaaccacaaactttgaaacttcgaataatatattgccagtgacagtcttgttgatttgttatagcaagtcctattttcttaatcattgctttgttttaacgtacctagatttcataacttttgtctttgtctcaagctgaacctaatgatgatagtaatattaacttattgtataggggtatttcataggataaaaaatgatgtgcaattacgtgtagaccaaatattacttgatgacagatggataaatatttcrwrwwrwwmmaaaaawrrgaattcctgccagccckgrggatccactarttctasagcggmcgccaccgcassggakct

SEQ ID NO: 58445 - protein, 204 aa, Glycine max
  peptide (1)..(204): Ceres Seq. ID no. 15225112
MDKKLGNTSHDPEVRKGPWTMEEDLILITYIANHGEGVWNSLAKAAGLKRTGKSCRLRWLNYLRPDVRRGNITPEEQLLIMELHAKWGNRWSKIAKHLPGRTDNEIKNYWRTRIQKHLKQASSSFQQQSSNSEIIYHPQACTSQVSTMAQPIETYSPPSYQGMLDPFSIQFPTNPHHSSCCTNDDDNNNYWSMEDIWSMQLANY

SEQ ID NO: 58446 - protein, 184 aa, Glycine max
  peptide (1)..(184): Ceres Seq. ID no. 15225113
MEEDLILITYIANHGEGVWNSLAKAAGLKRTGKSCRLRWLNYLRPDVRRGNITPEEQLLIMELHAKWGNRWSKIAKHLPGRTDNEIKNYWRTRIQKHLKQASSSFQQQSSNSEIIYHPQACTSQVSTMAQPIETYSPPSYQGMLDPFSIQFPTNPHHSSCCTNDDDNNNYWSMEDIWSMQLANY

SEQ ID NO: 58447 - protein, 124 aa, Glycine max
  peptide (1)..(124): Ceres Seq. ID no. 15225114
MELHAKWGNRWSKIAKHLPGRTDNEIKNYWRTRIQKHLKQASSSFQQQSSNSEIIYHPQACTSQVSTMAQPIETYSPPSYQGMLDPFSIQFPTNPHHSSCCTNDDDNNNYWSMEDIWSMQLANY

SEQ ID NO: 58448 - DNA, 1251 bp, Glycine max
  misc_feature (1)..(1251): Ceres Seq. ID no. 12582076
cagctacgtaggccccccccccgagcagcatttgaactctactatcgttttctccgttctttctcaaagccgcactcaactttctaaaaccaaatcggtttgaatcctcatttcccgcctctcactggaaagcagcaaaatcacctttctctactatctatctgttccttttgtactctgagtgggtagaagtcatggtaaggctcactgctgacttgatttggaaaagccctcatttcttcaacacgattaaagagcgtgagttagatctcagaggcaacaagatagctgtaattgaaaacttgggtgctactgaggaccaatttgacacaatagacttatctgacaatgagattgttaaacttgaaaatgtaccatatcttaaccggttgggcacaatgctcattaacaacaacaggattactagaattaatcccaacatcggagagttcttgccaaatttacacactctagttctcacaaacaacagaattgtaaacttggttgaaattgatcctttagcatctcttccaaagctgcacttccttagtctgctggacaacaatattacaaagaaacctaattacaggctttatgttattaacaacctgaaatccctccgggtgttagatttcaagaaagtgaaaaataaggaacggttggaagccaaaaacttgtttgcttcaaaagaagttatagaagagattcaaaggacaccagcaaaaacattttcaactggtgaaactccaaatgtttctgaagcgattgaggaacaacagacgcccaaagtggttgctcctacacctgagcaaattattgctattaaggctgccattgtgaattctcagactcttgaagaggttgctaggcttgaaaaggcattgaagtctggtcagcttcctgcagatttaaaaagcttgagtgataatataatgttggataatgttgatgaaaaacatgaggacatgattcatgatgatagaagtcaagctgatggcaaatcgaatgatacacaagagcagagaaatactgattctgcttcaatggaacaggattagagtgaaaaggttttcaaatagtcctagcactgtggacttctttaatgtcaggttctagagttagactcttggtaattttccatgaggtgtactttatgaatcttccattacttgagaactggatgtttcaatttcactcgtggtgaatcattgctttggcctttatatatgtgttaaattgtattatttttac

SEQ ID NO: 58449 - protein, 287 aa, Glycine max
  peptide (1)..(287): Ceres Seq. ID no. 12582077
MVRLTADLIWKSPHFFNTIKERELDLRGNKIAVIENLGATEDQFDTIDLSDNEIVKLENVPYLNRLGTMLINNNRITRINPNIGEFLPNLHTLVLTNNRIVNLVEIDPLASLPKLHFLSLLDNNITKKPNYRLYVINNLKSLRVLDFKKVKNKERLEAKNLFASKEVIEEIQRTPAKTFSTGETPNVSEAIEEQQTPKVVAPTPEQIIAIKAAIVNSQTLEEVARLEKALKSGQLPADLKSLSDNIMLDNVDEKHEDMIHDDRSQADGKSNDTQEQRNTDSASMEQD

SEQ ID NO: 58450 - protein, 219 aa, Glycine max
  peptide (1)..(219): Ceres Seq. ID no. 12582078
MLINNNRITRINPNIGEFLPNLHTLVLTNNRIVNLVEIDPLASLPKLHFLSLLDNNITKKPNYRLYVINNLKSLRVLDFKKVKNKERLEAKNLFASKEVIEEIQRTPAKTFSTGETPNVSEAIEEQQTPKVVAPTPEQIIAIKAAIVNSQTLEEVARLEKALKSGQLPADLKSLSDNIMLDNVDEKHEDMIHDDRSQADGKSNDTQEQRNTDSASMEQD

SEQ ID NO: 58451 - DNA, 1538 bp, Glycine max
  misc_feature (1)..(1538): Ceres Seq. ID no. 14315261
actctcaaatttgtgtcagccaacattcccatcatcttgttaactttatccaaaccatcacaaaaaccacaacatttccagcttctgctactgtgaagcacaccctgtaccatgaccatccatctgctatatctgccaaatatcgcctacacaccctgcagcaatcacctcactgctcatcaccaccacaaagccgccttcaatctcaattctcaactaaacaacacctctcctttcacagtgagcaccacctcctcaatggatagttcccaacacctcagccccacattccacgtcttgaaccaaaatagctgcacaacattctctgagacaaattttcaccatcctcaacctttgtggcattgacattcttgccactaaactaaccttctcactggaatttaccattcttgagtggatcactctctagagttgcatgaaccactatcaatggaactttccacttctgagaaaaataagagagatgtggcaaacctttgctgctaggatggaggagaatgagagaagaacaagggaaagggtttagggcttatatttctgaaatttatagttcatgttcttggtgaggcttttgtttttaccacaaatgatcatggaggtagtataaagtgctactggaatcaccttgtttctccaaacttgtggacattgtctgagtcattcatgattgtagttgtttataactctcatgttagattttgaaaaagacatgcttttaagttttcaccttgacttcaaccttatatctcattgcctgttgttggtttttggtaatatatattttttcacagattccaacaaatcctgctggtcttattgaatatagggcacatccattctggatccagaaatattgccctactcacgaacatgatggtactacacgctgttgcagctgcgagcgaatggaggttagtatggatggagtatatttatctgataaaatattatttgtagtcttgcctagggaaaggtggatgaacttgtacagtgcaaagtgaatagaatgtaaaattttctctcatcatatgcagtcccaagaggcaggatatattgctcttaaggatggccggaagctctgcttagagtgtcttgattctgctatcatggatactaatgaatgccaaccccttcatgctgatatacaaagattttatgaaagcctaaatatgaaactggaccaacaaattccacttctattggttgaaagacaagcactgaatgaagcaagagaaggagagaagaatgtaagagaaaatgcatttccatctgtttgctataaatataataactgataatttgattgtaatgacattcagctgtctgacatactaggaactattttttggtgtttggcattgtctgcacaactaatattaaaagtaaaataatgccttttgctattgatagctttgagaatgctatctctgatgaaggtttttctattcgtgatatgttaaccacatgctatgtcaaatagttcaatatgactagcacgatatagaaaatttaagagt

SEQ ID NO: 58452 - protein, 88 aa, Glycine max
  peptide (1)..(88): Ceres Seq. ID no. 14315262
MQSQEAGYIALKDGRKLCLECLDSAIMDTNECQPLHADIQRFYESLNMKLDQQIPLLLVERQALNEAREGEKNVRENAFPSVCYKYNN

SEQ ID NO: 58453 - protein, 87 aa, Glycine max
  peptide (1)..(87): Ceres Seq. ID no. 14315263
SQICVSQHSHHLVNFIQTITKTTTFPASATVKHTLYHDHPSAISAKYRLHTLQQSPHCSSPPQSRLQSQFSTKQHLSFHSEHHLLNG

SEQ ID NO: 58454 - protein, 84 aa, Glycine max
  peptide (1)..(84): Ceres Seq. ID no. 14315264
MTIHLLYLPNIAYTPCSNHLTAHHHHKAAFNLNSQLNNTSPFTVSTTSSMDSSQHLSPTFHVLNQNSCTTFSETNFHHPQPLWH

SEQ ID NO: 58455 - DNA, 660 bp, Glycine max
  misc_feature (1)..(660): Ceres Seq. ID no. 14308791
tctctctctcagaattttctcctctctccgattccttttattaattggagttttctcgctcctttttctttccctgaaaacatttcatcttcgtattgatgtcggaaaagggtcggccacttcccaaatttggtgaatgggatgtcaatgatccagcctcagctgaggggttcacagtgatttttaataaggccagggatgagaaaaagacaggtggcaacccagagtcaccaggaaagactgctactgatcctcatagcaaacctgcagtagagcctggcaaaactcagactaaaaaatggttttgctgcatgcaaaacccttctgccgaatcatagcatagcaatggttgctcctgtgaaaagcctgaacagaagaacaatgtttatgtgtaactagcgtcacagtattttctcaaagataagagctgtagagccataagcgaattctacggaatttatattttgtgatgtaaaagtgagctgcaatgggggaaagaaaagaagacagactattatttatgtgtgtgtatcaatgttgtggtttattattaggagccagggttgcttcctgttttgccttgtcttgcgctatgagctagagcgttgcttgtcacattgtattgcttgtattatgaaacaaatcctattttatgaaccc

SEQ ID NO: 58456 - protein, 79 aa, Glycine max
  peptide (1)..(79): Ceres Seq. ID no. 14308792
MSEKGRPLPKFGEWDVNDPASAEGFTVIFNKARDEKKTGGNPESPGKTATDPHSKPAVEPGKTQTKKWFCCMQNPSAES

SEQ ID NO: 58457 - protein, 44 aa, Glycine max
  peptide (1)..(44): Ceres Seq. ID no. 14308793
LSLRIFSSLRFLLLIGVFSLLFLSLKTFHLRIDVGKGSATSQIW

SEQ ID NO: 58458 - protein, 42 aa, Glycine max
  peptide (1)..(42): Ceres Seq. ID no. 14308794
MLWFIIRSQGCFLFCLVLRYELERCLSHCIACIMKQILFYEP

SEQ ID NO: 58459 - DNA, 1169 bp, Glycine max
  misc_feature (1)..(1169): Ceres Seq. ID no. 15225928
gggaagctaaatccagaacatgatactatctttctcaaagtgcaaatttccgacaaggatggttcttgtaggaatgtatactttccttttgacatatacacagacactcccattgatgttgcaatggagatggtgaaggaattggagatcacagatttgaagccttctgatattgcaaatatgattgaaggagagatwtskgtrccgggccccccctcragtcagctactaggcccccccccttatgatcgggcagaaatttttttcataaatcataaactgtgcagcctccttgtgttgatcaacctttgcaatgaatcattaaaaaatgttccaaagtaatgggacacgccaatactcaatgggacacaccaatactcaccaagaacataaattctataaaaaaagttgccactttgcaatgaaagttacatgctatatttgaactagaattgcaaataatgaggtatgcaattatggatccatatcacctgtcctcattgactatcccaccacttaaaatatgctagcattaatactataataacacaatttatcagctgacactttaatgttcgcttttctttggtgagagtagaactagaggtatggaatggggacaggtgatcttcatccctatgattatgtttacaattatgaattaattattcttttcattttatttatgtatggaatgatgctgcttgccattattttttacctgttttatttgctctagagctttaaatatctaactgcttttgttcatagacgcttcttcaataatagagaacaatttagtttgtatcaaccgtgactatgcagattttatcatatctgtcatgtggatcttttgctggataaacttgcaacataattttattgatttttggatacaggcttttacgagactcgaattgcatattatgcatggaggggtgctaaaggataccgcttttctgccatccctgattattagagtgttataataaatgaacaatagagctataccttgaaaacttaaattatcaaatttggttgcaacttgtatgcttcaatggcacagatcgaagtaaatggtagaaaagtgtaatcgtactactactcgatacttaagtaattaattcggtgacaaaatttataaaaattatgcattgaagtttgagttc

SEQ ID NO: 58460 - protein, 113 aa, Glycine max
  peptide (1)..(113): Ceres Seq. ID no. 15225929
  misc_feature (66)..(66): Xaa is any aa, unknown or other
  misc_feature (67)..(67): Xaa is any aa, unknown or other
  misc_feature (68)..(68): Xaa is any aa, unknown or other
  misc_feature (73)..(73): Xaa is any aa, unknown or other
GKLNPEHDTIFLKVQISDKDGSCRNVYFPFDIYTDTPIDVAMEMVKELEITDLKPSDIANMIEGEXXXPGPPXSQLLGPPPYDRAEIFFINHKLCSLLVLINLCNESLKNVPK

SEQ ID NO: 58461 - protein, 72 aa, Glycine max
  peptide (1)..(72): Ceres Seq. ID no. 15225930
  misc_feature (25)..(25): Xaa is any aa, unknown or other
  misc_feature (26)..(26): Xaa is any aa, unknown or other
  misc_feature (27)..(27): Xaa is any aa, unknown or other
  misc_feature (32)..(32): Xaa is any aa, unknown or other
MEMVKELEITDLKPSDIANMIEGEXXXPGPPXSQLLGPPPYDRAEIFFINHKLCSLLVLINLCNESLKNVPK

SEQ ID NO: 58462 - protein, 70 aa, Glycine max
  peptide (1)..(70): Ceres Seq. ID no. 15225931
  misc_feature (23)..(23): Xaa is any aa, unknown or other
  misc_feature (24)..(24): Xaa is any aa, unknown or other
  misc_feature (25)..(25): Xaa is any aa, unknown or other
  misc_feature (30)..(30): Xaa is any aa, unknown or other
MVKELEITDLKPSDIANMIEGEXXXPGPPXSQLLGPPPYDRAEIFFINHKLCSLLVLINLCNESLKNVPK

SEQ ID NO: 58463 - DNA, 2029 bp, Glycine max
  misc_feature (1)..(2029): Ceres Seq. ID no. 14310803
ggttttcaatttggggaaataaaaatagggggaaatattctggagagagtgtgtagaaaatatggttgtcgatgatatgacgctgtgcatcatcgtcggctatggaggttcctcttcttctcgtttctccgatgcttatcccaaaaggggtttgatggaggggagatatagtggggattgatatgatgaaggtgtttataaggttgttttgttgaattgtgtttttgggatggcaatattgtacgaaccagcaataaaactcatccaccagatgagctagcatgggcgattcttgtcttacttctatgtcaatggagaatcaccacccctccacgctcttgtcaatggactcaagtgcatcttctcacgaggaactggatttggagatgaatcgccaaatcatactcactcgtccgcccgatattaacctgcccctctccgccgagcgcagcccgccgccacagccgtggaattctgagccctgtgatattctggatgttggtcttggtactcaaggctacgagactgagagttttcttaatctgcccaaagctggtaggaagtgcgcgaagcgtgttgatagcatatggggtgcttggtttttcttcagtttttactttaaacctgctttgaacgataagtccaaggccaagattgtcagggacagcaatggtgtctcagggttcgataagtctgatctgaagctggatgttttcatggttcagcacgacatggaaaacatgtacatgtgggttttcaaggagaggccggagaacgcacttggtaagatgcagctgaggagttacatgaatgggcattctcgccaaggggagcgcccgtttccgttcagtgttgacaagggttttgctcggtcccacaggatgcagcgaaagcattatagaggactatcaaaccctcagtgcgtgcatggtgttgaggttgtttttgcacccagtctgatgaccctggatgaggatgatcgaaaaaggtggatagaactcactggccgggatttgaatttcacaatcccacctgaagcaagtgatttcagttcatggagaaatcttcccaacacggactttgagcttgagagaccacctcccccaatcaagagtggtcctaatgcacacccgaagaagctgcttaatggatccggacttaatggatctggacttcatctatctaaccacagtaatggtgatgggttggacctctctcctgtcagcagcaaaaaaaggaaggactttttccctcatggaaatgaagaagaatgttacttggctgttaatcctccatctgatcgtataccagatatagaaatgcacccaaccgagccacactggttgaatgacttcagcggggtgataaagagtgtttatggacctgttacagctgcaaaaactatttatgaggatgaacaaggttacttgattattatcagtctgccctttgtagatcttccaagtgtgaaagtttcatggaggaacactctgactcacggtatcataaaggtttcttgtatgagcacatctcggaagcctctcatcaagagacatgataggacattcaagcttacagatccatcgtcagagcactgcccccctggagagttcgtccgagaaatccctctttcaactcgaattcctgaagatgccaacatagaagcatactacgatgggccaggatcagtgcttgagatcctggtgccaaaacatcgcgtgggaccagaagagcatgaagtccgggtttgcctccgccctcatctgggagggaatgatctcaagttaacttgagataggcacttaaaaaaatttgttagggattccggtatggttcgtatgtcattgtttttctaactttgtaccatacagtgttatttgcaatagaattgtgtctcttatgtttgtctctagcaattttagctcactgactgccctggttcttttgttccggtgcatctgtattatgcttttgattgtaagcagtattgaacagctagttctcataatttataagaaattaccaaatc

SEQ ID NO: 58464 - protein, 503 aa, Glycine max
  peptide (1)..(503): Ceres Seq. ID no. 14310804
MGDSCLTSMSMENHHPSTLLSMDSSASSHEELDLEMNRQIILTRPPDINLPLSAERSPPPQPWNSEPCDILDVGLGTQGYETESFLNLPKAGRKCAKRVDSIWGAWFFFSFYFKPALNDKSKAKIVRDSNGVSGFDKSDLKLDVFMVQHDMENMYMWVFKERPENALGKMQLRSYMNGHSRQGERPFPFSVDKGFARSHRMQRKHYRGLSNPQCVHGVEVVFAPSLMTLDEDDRKRWIELTGRDLNFTIPPEASDFSSWRNLPNTDFELERPPPPIKSGPNAHPKKLLNGSGLNGSGLHLSNHSNGDGLDLSPVSSKKRKDFFPHGNEEECYLAVNPPSDRIPDIEMHPTEPHWLNDFSGVIKSVYGPVTAAKTIYEDEQGYLIIISLPFVDLPSVKVSWRNTLTHGIIKVSCMSTSRKPLIKRHDRTFKLTDPSSEHCPPGEFVREIPLSTRIPEDANIEAYYDGPGSVLEILVPKHRVGPEEHEVRVCLRPHLGGNDLKLT

SEQ ID NO: 58465 - protein, 495 aa, Glycine max
  peptide (1)..(495): Ceres Seq. ID no. 14310805
MSMENHHPSTLLSMDSSASSHEELDLEMNRQIILTRPPDINLPLSAERSPPPQPWNSEPCDILDVGLGTQGYETESFLNLPKAGRKCAKRVDSIWGAWFFFSFYFKPALNDKSKAKIVRDSNGVSGFDKSDLKLDVFMVQHDMENMYMWVFKERPENALGKMQLRSYMNGHSRQGERPFPFSVDKGFARSHRMQRKHYRGLSNPQCVHGVEVVFAPSLMTLDEDDRKRWIELTGRDLNFTIPPEASDFSSWRNLPNTDFELERPPPPIKSGPNAHPKKLLNGSGLNGSGLHLSNHSNGDGLDLSPVSSKKRKDFFPHGNEEECYLAVNPPSDRIPDIEMHPTEPHWLNDFSGVIKSVYGPVTAAKTIYEDEQGYLIIISLPFVDLPSVKVSWRNTLTHGIIKVSCMSTSRKPLIKRHDRTFKLTDPSSEHCPPGEFVREIPLSTRIPEDANIEAYYDGPGSVLEILVPKHRVGPEEHEVRVCLRPHLGGNDLKLT

SEQ ID NO: 58466 - protein, 493 aa, Glycine max
  peptide (1)..(493): Ceres Seq. ID no. 14310806
MENHHPSTLLSMDSSASSHEELDLEMNRQIILTRPPDINLPLSAERSPPPQPWNSEPCDILDVGLGTQGYETESFLNLPKAGRKCAKRVDSIWGAWFFFSFYFKPALNDKSKAKIVRDSNGVSGFDKSDLKLDVFMVQHDMENMYMWVFKERPENALGKMQLRSYMNGHSRQGERPFPFSVDKGFARSHRMQRKHYRGLSNPQCVHGVEVVFAPSLMTLDEDDRKRWIELTGRDLNFTIPPEASDFSSWRNLPNTDFELERPPPPIKSGPNAHPKKLLNGSGLNGSGLHLSNHSNGDGLDLSPVSSKKRKDFFPHGNEEECYLAVNPPSDRIPDIEMHPTEPHWLNDFSGVIKSVYGPVTAAKTIYEDEQGYLIIISLPFVDLPSVKVSWRNTLTHGIIKVSCMSTSRKPLIKRHDRTFKLTDPSSEHCPPGEFVREIPLSTRIPEDANIEAYYDGPGSVLEILVPKHRVGPEEHEVRVCLRPHLGGNDLKLT

SEQ ID NO: 58467 - DNA, 1106 bp, Glycine max
  misc_feature (1)..(1106): Ceres Seq. ID no. 15224967
ccttgttcatttccttcacataagatacagccaagcttcattctatttgtttttgtccctggacgcagcacctttcttttgttctgttttaggtccttgtgcattttacttttgggagaattccaaaaaagttattattcatacataacatgaaggaagaatgattacttggtgtggttattcaaaccaaaattaaccaaaataatatgatgactaaaaccactttggtgttttctctccctcttcgtattaaatatttttaacactagttccttacttgaaatcataccttttatttttttggtgacttagccttaagccctcataaaaactgtcctttgatttcagccttttttcttcttcaaaaactgttgtaggatggaatgctaaaacacaaaggtacatatgaaataatatcacctgaggacattggacttgaaagaaccaatgaagtaggtattgtactgggaaagcttaggtatgtaattttcttttctctagaacacttatttttgcatggatcttgtacacactgctaatccctatgttctcttcatcctaacatgagaaaaattttatctctagctttctggacttatgtaagtcctcatggtacaagcataccggttatatttgagtgagtgcacaagaagttgtctgactatggcaggatgaaactctgcggataatgatgattcttggcctgctttattttgatgctcagaagcattctacttgttcatccatgcctggtggttgatatcagtggttgccatgctttgagaaagcgacttgaagttactatcacagtactttttgaggaagatggttatgtcgtgcatgagtggccctgtataggggaaaatcccacttgaattacggacttgacctgagaagaatgtttgaggattattactcttctcattcttctagacttctagttatttttcttatttgtattttattactatttcagtacgttatatttaaatccattcccatctgattggatgatcatgaattaccttcctgcttgtatggattatacattattatagatatatactagctcttactttctttgtgtcaaaaaaaaaaaaaaaaaa

SEQ ID NO: 58468 - protein, 52 aa, Glycine max
  peptide (1)..(52): Ceres Seq. ID no. 15224968
MLRSILLVHPCLVVDISGCHALRKRLEVTITVLFEEDGYVVHEWPCIGENPT

SEQ ID NO: 58469 - protein, 51 aa, Glycine max
  peptide (1)..(51): Ceres Seq. ID no. 15224969
MLKHKGTYEIISPEDIGLERTNEVGIVLGKLRYVIFFSLEHLFLHGSCTHC

SEQ ID NO: 58470 - protein, 50 aa, Glycine max
  peptide (1)..(50): Ceres Seq. ID no. 15224970
PCSFPSHKIQPSFILFVFVPGRSTFLLFCFRSLCILLLGEFQKSYYSYIT

SEQ ID NO: 58471 - DNA, 1106 bp, Glycine max
  misc_feature (1)..(1106): Ceres Seq. ID no. 13638152
ggagagagagaaaaaaaaaaaaaagtctctgtttcttcacttgctcacaagccgcaactgctactgtgtacccaatctgagcccaacgagatgggggggcagaatctttccccaaaggaaaggagtagagattggattggagttcttatgaacagcagctttggttattgtacttatcaccatgatcttcgatctaatgagatgaatgtgttctgcgtggactgtgcacttaggatgtgtaggcactgtaaggaagctcattccctacatagaaggtttcagatttacaaatattcctaccaggatgtcttccgccatgccgagctgcagaagtattttgattgctccaaaattcagacttacatatccaataatgaaaggattgtgcatctcaaacctcggccttcaatcaccaaatctaagtctgctgatctaagtcccgactctaaatacaaagagaccggcatagcaacaagaccaaagtcagggggcacgtgtgaagaatgtggaaaacacttacaagatgagcgtaatcgcttctgctccattacatgcaagatctcagtgcatccagtggagacccaataccaaggtcaaaatcaatgttcaccaaaccaccaaagtgctagaggcatcatcaatccaaaacctgaaggcattgactttacaatgaatgataaccataattcagaaccggagtcatctatctctgaagctgagccatatgggtgggttgaagttgtgaatttcagaaagcgtccaaggaaaagtatccctcagaggcctgtctttgttttcacgtcttagaataagatacactactctaatggttttcttcattttttttttttgactttacatttcttgaacatttgagggaagctcaaccccgttatgccccatattgggatttaggtatatataacttgggagtttgagattcagttgctattagcaaagtaactagccgagcttgtatagcacaaggacaaaggtaatgctactaacacacttccgacactactactacttaatatctgtatagttttcagcatcttactgtactcccttcgccccacatctaatatctattaatgtttgaggtt

SEQ ID NO: 58472 - protein, 268 aa, Glycine max
  peptide (1)..(268): Ceres Seq. ID no. 13638153
GEREKKKKVSVSSLAHKPQLLLCTQSEPNEMGGQNLSPKERSRDWIGVLMNSSFGYCTYHHDLRSNEMNVFCVDCALRMCRHCKEAHSLHRRFQIYKYSYQDVFRHAELQKYFDCSKIQTYISNNERIVHLKPRPSITKSKSADLSPDSKYKETGIATRPKSGGTCEECGKHLQDERNRFCSITCKISVHPVETQYQGQNQCSPNHQSARGIINPKPEGIDFTMNDNHNSEPESSISEAEPYGWVEVVNFRKRPRKSIPQRPVFVFTS

SEQ ID NO: 58473 - protein, 238 aa, Glycine max
  peptide (1)..(238): Ceres Seq. ID no. 13638154
MGGQNLSPKERSRDWIGVLMNSSFGYCTYHHDLRSNEMNVFCVDCALRMCRHCKEAHSLHRRFQIYKYSYQDVFRHAELQKYFDCSKIQTYISNNERIVHLKPRPSITKSKSADLSPDSKYKETGIATRPKSGGTCEECGKHLQDERNRFCSITCKISVHPVETQYQGQNQCSPNHQSARGIINPKPEGIDFTMNDNHNSEPESSISEAEPYGWVEVVNFRKRPRKSIPQRPVFVFTS

SEQ ID NO: 58474 - protein, 219 aa, Glycine max
  peptide (1)..(219): Ceres Seq. ID no. 13638155
MNSSFGYCTYHHDLRSNEMNVFCVDCALRMCRHCKEAHSLHRRFQIYKYSYQDVFRHAELQKYFDCSKIQTYISNNERIVHLKPRPSITKSKSADLSPDSKYKETGIATRPKSGGTCEECGKHLQDERNRFCSITCKISVHPVETQYQGQNQCSPNHQSARGIINPKPEGIDFTMNDNHNSEPESSISEAEPYGWVEVVNFRKRPRKSIPQRPVFVFTS

SEQ ID NO: 58475 - DNA, 1286 bp, Glycine max
  misc_feature (1)..(1286): Ceres Seq. ID no. 14316251
gattaaaaaaaaaaacacaaaaaaattacaatgcaaaattaaagtgagcagggaggattgaattgtccccgctattcgatttgagaaattcgacgttttcaaagaattggaaactggaaacttcactttcattcgatcaatcatgagaactcgaaacgccgattccgcctccaaatccgcaacccctaagaagacgccgccgaagaaatcccctgcggccaagcgcaccaccgccaccaaaaccagagccaccaagaagaacgagctctcgcccgcacccgattccaaccccgatcaatctcctctggaacagaaatcgttaggcagtgctagcagcgcaaaatctgtgaaaaagaagactccggggagatcgagaagtaaagcaatcaatactccgaattcggaagaacaatgtgaggcagtagctgatgaaactccaattgaagatgataccgaggtagcagagaaagtggaagatgttggagtggttgatgcagataatgttgagggtgagaaggaggggggaaaaggtgttggttctgttggattgtctgatgagacggatcgtaagtcgatggaagtggatgaacttgttcaaaaggtttgtgaatctgtgggaaaggaaaatgatgtaatggaagttgaagtagctgcttgctgggatgcttctgtttcttttaggcgaccagggcgacctattgtggatctcaatatatctgcggataatgaagattgtactggtgaaaaggagggagagaaatggaaggaagagttgaaagatcaagagggggacaaagggaaggaagagttgaaaaaacaggaaggagacaacgggaaggaagagttgaaagaactggaaggagagaaaggagaggaagagttgaaagaactggaaggagaaaaaggtgaggaagagttgacagaactggaaggagagaaaggaaatgttgaattgaaagaacagaaaggagacaaaggaaaggaaaagttgaaagagcaggagccagagaaagcaaagggagaggaaacaaacctttttggacatgaagagaactctgagtcttttggtgtagaaggtgaagcccagatgcaaaaagaagatgctaatcctattaaagatggcggtgaaggaccaaagattggtgaaaattcagatcttggagaacaagggaaggtggagcttgttgaagatccagaagaaaaccctgaagaagatccagaggaacctccataagaaacttcggcattggaggaggagcatagggaattggaggctattgcaaatc

SEQ ID NO: 58476 - protein, 363 aa, Glycine max
  peptide (1)..(363): Ceres Seq. ID no. 14316252
MRTRNADSASKSATPKKTPPKKSPAAKRTTATKTRATKKNELSPAPDSNPDQSPLEQKSLGSASSAKSVKKKTPGRSRSKAINTPNSEEQCEAVADETPIEDDTEVAEKVEDVGVVDADNVEGEKEGGKGVGSVGLSDETDRKSMEVDELVQKVCESVGKENDVMEVEVAACWDASVSFRRPGRPIVDLNISADNEDCTGEKEGEKWKEELKDQEGDKGKEELKKQEGDNGKEELKELEGEKGEEELKELEGEKGEEELTELEGEKGNVELKEQKGDKGKEKLKEQEPEKAKGEETNLFGHEENSESFGVEGEAQMQKEDANPIKDGGEGPKIGENSDLGEQGKVELVEDPEENPEEDPEEPP

SEQ ID NO: 58477 - protein, 219 aa, Glycine max
  peptide (1)..(219): Ceres Seq. ID no. 14316253
MEVDELVQKVCESVGKENDVMEVEVAACWDASVSFRRPGRPIVDLNISADNEDCTGEKEGEKWKEELKDQEGDKGKEELKKQEGDNGKEELKELEGEKGEEELKELEGEKGEEELTELEGEKGNVELKEQKGDKGKEKLKEQEPEKAKGEETNLFGHEENSESFGVEGEAQMQKEDANPIKDGGEGPKIGENSDLGEQGKVELVEDPEENPEEDPEEPP

SEQ ID NO: 58478 - protein, 199 aa, Glycine max
  peptide (1)..(199): Ceres Seq. ID no. 14316254
MEVEVAACWDASVSFRRPGRPIVDLNISADNEDCTGEKEGEKWKEELKDQEGDKGKEELKKQEGDNGKEELKELEGEKGEEELKELEGEKGEEELTELEGEKGNVELKEQKGDKGKEKLKEQEPEKAKGEETNLFGHEENSESFGVEGEAQMQKEDANPIKDGGEGPKIGENSDLGEQGKVELVEDPEENPEEDPEEPP

SEQ ID NO: 58479 - DNA, 1471 bp, Glycine max
  misc_feature (1)..(1471): Ceres Seq. ID no. 15226540
atccttaacaacatttcacgcttcctctgtttgctcgcacacgtcgtttttttctttttgttgcttcggagccaactcaacaacaacgccgtgcctaatccttaagaataacgaattacaacaaccaaccatgttgcattgtctcaacacttcctgttcggacatcacagtcttggaaagacaacgggaagcaaccatcaagtgccagaaccaccaaccaccctacttaacggactttaacgccgtcttcccttcttcttcttcttcttcttcttcttcctcttcttcttctcatagtcagggcttgctcatgatgtgctcggattcctcgctcggccaggtcctaactcactccgtcaaacccgatccgggcgtctggcccgaattcggttttctacccgccatttcgagaacttgtagcagagacggagacttggtttcgcccaaggaaaacatggccagtgggaaagaaaatgctaagaagagaaagcctcagaactccaaggttgttgcggagattgataataacaaggacaaggacaagagagtcaaagtaactggcgaggaaggagaatccaaagtaaccgagcaccataccagaaacaagaatgccaaatccaacgcaaataagaacaacagagaaacctctgcggacacttccaaaggctccgaggttcaaaatcagaaaccagactacattcatgtccgagcgcgtcgtggacaagccacggatagtcatagcttagctgaaagagtaaggagggagaagattagcgagagaatgaagtatttgcaagatttaataccgggttgcaacaaagttgcagggaaagctggaatgcttgatgaaattattaactatgttcagtctcttcaacgccaagttgagttcttgtcaatgaaattagcggctgtaaacccaaggcttgacttcaacattgacgaactgtttgccaaagaggtgtttccttcttgtgctcaaagttttccaaacatagggattccctcagatatgagtattagtaacaacccttcgtatcttcagttcaattcagcgcagcaacttgtatcgtgctgtggtggattaataaacagcatgggaataagccctcccaacatgggactccgaacgaacattattagtactagcactgtacctttgcccgaaacttttcttgactcttcctgtttcactcaaattctaccctcctcaaattgggaaggtggtgatttccaaagcctttacaacgttgcttttgatcaagggcgaacagcatcttttccccctcagccatttacaggtctagttgaagctagcaatctaaaaatggagatgtaaaccagataatccattattacaatatgttggattaggtcactcggaatgcctttgtcaagatttttttctattagagtacatcgcatatattggttgtatactgctccgtagaataaataagatcatattaac

SEQ ID NO: 58480 - protein, 445 aa, Glycine max
  peptide (1)..(445): Ceres Seq. ID no. 15226541
SLTTFHASSVCSHTSFFSFCCFGANSTTTPCLILKNNELQQPTMLHCLNTSCSDITVLERQREATIKCQNHQPPYLTDFNAVFPSSSSSSSSSSSSSHSQGLLMMCSDSSLGQVLTHSVKPDPGVWPEFGFLPAISRTCSRDGDLVSPKENMASGKENAKKRKPQNSKVVAEIDNNKDKDKRVKVTGEEGESKVTEHHTRNKNAKSNANKNNRETSADTSKGSEVQNQKPDYIHVRARRGQATDSHSLAERVRREKISERMKYLQDLIPGCNKVAGKAGMLDEIINYVQSLQRQVEFLSMKLAAVNPRLDFNIDELFAKEVFPSCAQSFPNIGIPSDMSISNNPSYLQFNSAQQLVSCCGGLINSMGISPPNMGLRTNIISTSTVPLPETFLDSSCFTQILPSSNWEGGDFQSLYNVAFDQGRTASFPPQPFTGLVEASNLKMEM

SEQ ID NO: 58481 - protein, 402 aa, Glycine max
  peptide (1)..(402): Ceres Seq. ID no. 15226542
MLHCLNTSCSDITVLERQREATIKCQNHQPPYLTDFNAVFPSSSSSSSSSSSSSHSQGLLMMCSDSSLGQVLTHSVKPDPGVWPEFGFLPAISRTCSRDGDLVSPKENMASGKENAKKRKPQNSKVVAEIDNNKDKDKRVKVTGEEGESKVTEHHTRNKNAKSNANKNNRETSADTSKGSEVQNQKPDYIHVRARRGQATDSHSLAERVRREKISERMKYLQDLIPGCNKVAGKAGMLDEIINYVQSLQRQVEFLSMKLAAVNPRLDFNIDELFAKEVFPSCAQSFPNIGIPSDMSISNNPSYLQFNSAQQLVSCCGGLINSMGISPPNMGLRTNIISTSTVPLPETFLDSSCFTQILPSSNWEGGDFQSLYNVAFDQGRTASFPPQPFTGLVEASNLKMEM

SEQ ID NO: 58482 - protein, 342 aa, Glycine max
  peptide (1)..(342): Ceres Seq. ID no. 15226543
MMCSDSSLGQVLTHSVKPDPGVWPEFGFLPAISRTCSRDGDLVSPKENMASGKENAKKRKPQNSKVVAEIDNNKDKDKRVKVTGEEGESKVTEHHTRNKNAKSNANKNNRETSADTSKGSEVQNQKPDYIHVRARRGQATDSHSLAERVRREKISERMKYLQDLIPGCNKVAGKAGMLDEIINYVQSLQRQVEFLSMKLAAVNPRLDFNIDELFAKEVFPSCAQSFPNIGIPSDMSISNNPSYLQFNSAQQLVSCCGGLINSMGISPPNMGLRTNIISTSTVPLPETFLDSSCFTQILPSSNWEGGDFQSLYNVAFDQGRTASFPPQPFTGLVEASNLKMEM

SEQ ID NO: 58483 - DNA, 1351 bp, Glycine max
  misc_feature (1)..(1351): Ceres Seq. ID no. 15169380
atgagtattacaagacaatttaacaattgatgcaatgaagaacattaaaaaatgaagataaaatagtgtatcttgcagccatgattgggaaaacaagccataagcatagagtttaattgaaatctattgtcagttgaaactgagtagttatcagtggaaagatgagggaagggtgcagcaaagtatgcgtcacaggagctagtggttacatagcttcctctctggtgaagaagctcttggccaagggtcacagcgtccatgcaactctcagagacttgaagaacgagtcaaaggtgagcctcttaaagagccttccacaatcagaagggaaactggtgctgtttgaagctgatatttacaacccaaatgactttgaccatgcaattgaaggctgtgagtttgtctttcatgttgctactcccatgatccatgatcctggctcccagtacaagaatacttctgaagcggcaatggctgcgtcaaaaagcattgccctgtcttgtgtgagagcagggacggtgaagcgtctcatctacaccgcgtctgttgtttctgcttcttctttgaaagaagatgggagtggtttcaaagatgcaatggatgaaacttgctggacccctctaaatgattccttggcatatgtatacccagatgatcctttttataaggactatacttattcaaagacactgtcggagaaacatgtgttgagctacgggaacgatgaaaatggtggaggattggaggtggtaacactcccttgtgggctagtgggaggcgacacccttcaatcttctacacccgttagcggagtagtttgtatcgcacagatcatgcaagatgcaagggcgtacatatcactcaagttcctaaagaaattgctggggaaaattcctcttgtacacattgatgatgtctgtgaagctcatattttctgcatggaaagtacctcgatcagtggaagattcttgtgtgcaagttcatatatttcattagaagagatggctaatcatttcgctcttcattatccagaattcaatgtgaaacaagaatatgaagatgagctgaagaaggatatcaagtgggcctcaacaaagctgtgtgacaaaggatttgtatacaaatatgacgccaagatgatattagatgattgtatcaaatgtgcaagaaggatgggtgatctctagtctccatctacacccatgcttgccatatctgcttgtaatacgatatatagcaggcgtctgcctcatttcttctcgttccctatccaaatgttattaccattgtttttgtcattttgttaaaaaataaactcagtttcaaatcaattagaaaagtgaattaactg

SEQ ID NO: 58484 - protein, 341 aa, Glycine max
  peptide (1)..(341): Ceres Seq. ID no. 15169381
MREGCSKVCVTGASGYIASSLVKKLLAKGHSVHATLRDLKNESKVSLLKSLPQSEGKLVLFEADIYNPNDFDHAIEGCEFVFHVATPMIHDPGSQYKNTSEAAMAASKSIALSCVRAGTVKRLIYTASVVSASSLKEDGSGFKDAMDETCWTPLNDSLAYVYPDDPFYKDYTYSKTLSEKHVLSYGNDENGGGLEVVTLPCGLVGGDTLQSSTPVSGVVCIAQIMQDARAYISLKFLKKLLGKIPLVHIDDVCEAHIFCMESTSISGRFLCASSYISLEEMANHFALHYPEFNVKQEYEDELKKDIKWASTKLCDKGFVYKYDAKMILDDCIKCARRMGDL

SEQ ID NO: 58485 - protein, 254 aa, Glycine max
  peptide (1)..(254): Ceres Seq. ID no. 15169382
MIHDPGSQYKNTSEAAMAASKSIALSCVRAGTVKRLIYTASVVSASSLKEDGSGFKDAMDETCWTPLNDSLAYVYPDDPFYKDYTYSKTLSEKHVLSYGNDENGGGLEVVTLPCGLVGGDTLQSSTPVSGVVCIAQIMQDARAYISLKFLKKLLGKIPLVHIDDVCEAHIFCMESTSISGRFLCASSYISLEEMANHFALHYPEFNVKQEYEDELKKDIKWASTKLCDKGFVYKYDAKMILDDCIKCARRMGDL

SEQ ID NO: 58486 - protein, 238 aa, Glycine max
  peptide (1)..(238): Ceres Seq. ID no. 15169383
MAASKSIALSCVRAGTVKRLIYTASVVSASSLKEDGSGFKDAMDETCWTPLNDSLAYVYPDDPFYKDYTYSKTLSEKHVLSYGNDENGGGLEVVTLPCGLVGGDTLQSSTPVSGVVCIAQIMQDARAYISLKFLKKLLGKIPLVHIDDVCEAHIFCMESTSISGRFLCASSYISLEEMANHFALHYPEFNVKQEYEDELKKDIKWASTKLCDKGFVYKYDAKMILDDCIKCARRMGDL

SEQ ID NO: 58487 - DNA, 1838 bp, Glycine max
  misc_feature (1)..(1838): Ceres Seq. ID no. 14312951
aacgctgcctccaaggtgatcgatcatcaatccatccatttaattgcatttctagaaattgaattattagtttttttctcctccttggtctgcatttgcttgattccgtgatttagttttgtaacagaaaacacaagagggtaaaatctttgactctaataagtacaattattgaatagggttttggaacagaaatgagaatagggtaaatgaatatatattaggaaaaaaagttaaatacatttttagtcctttaagctatgtttgagattaaaaatctattatatttgtagagattaaaaatatttaatattttaaaatattattaagataaatatattgtcaatttacatgtaatttttttacaatatcaattaattataagtcatacaaattgatataaattaaagtaattattataaaaatgagcaaacttttatcattcagcgcaagaatttgtgattgattagacaataattgtgcattctaattataattaatagtttttttttataatttttatcttttaataattgagtataattaacatgatatgggagttttaaaaagaatagttaaagggtaaagtaaggaaataattaaaagataaagtagtgaatagtttcgaaagtagttaaagaataaaatagtctagttaaaaacaaatgttttgtctgtgttaatttgttcctaatgctacgaagaagcaaatgtagtccttgggtaaatttaatttttctaatgttaaggaccaaatttaccagtattgtaaatttcagggacaaaatagtgttaataatgtcaaggacccaaattgatcgtttgtgccaaactagattaaattgatgttttgcttattcttcttatggtattcatggaataaacattagagtgcttgtaaatgagtaatgactactggcccaatatttcttcaaaaaaaatatgtttggggctctttgaaaatttaactaaaacattcattagttgttctctccccttctatctgagaaaattagtcactacacattgtcaagggtgtggacagtgttcacaagtcaatggatgcggttgaagcagcaaagttgttagctcggacaagtggtgcaatagttgcagtgtcaggagccacggacattgtcacagatggaaatcgagttgttggggctcataatggggtggcgatgatgcagaaaataacagcaacgggatgttcagtcactgcactgattgctgcctttgttgccgttgacaaaagccatgctttggatgccgcagtgtctgcattagctgtatttggtgttgctggtgagctaggaatgaagatggctaaaggtcctgcatcgcttcgaatgcacttgatagatgaactctatgggcttgatgaatctgccttgaattctcatgttaatgtcaccagtttgtgatgaaatgtgaagatctgcattcaaattgataattaattatcataaaattcgcatgtatcatagttgatagttgtctatcaatggtgtccattggttgaattggaaggtggatcgtattagttagcaatagagatccctctataatttatgtcaataataatcactggtagctacctctggtaataacagtttgttcctgtagttaaaaatatctcatggtttcagcccttaatttagtttggtcaacattttgtatgtataggtttattttgttgaaagttaacttcgtaatttctgtttgatgtataggaatgggtttggtggaaattgtttatgaactcctgatgcattgttaatcagattgtgaaccggtaaagttgagtgtatatatgaattaacaaataacattttctc

SEQ ID NO: 58488 - protein, 121 aa, Glycine max
  peptide (1)..(121): Ceres Seq. ID no. 14312952
MDAVEAAKLLARTSGAIVAVSGATDIVTDGNRVVGAHNGVAMMQKITATGCSVTALIAAFVAVDKSHALDAAVSALAVFGVAGELGMKMAKGPASLRMHLIDELYGLDESALNSHVNVTSL

SEQ ID NO: 58489 - protein, 80 aa, Glycine max
  peptide (1)..(80): Ceres Seq. ID no. 14312953
MMQKITATGCSVTALIAAFVAVDKSHALDAAVSALAVFGVAGELGMKMAKGPASLRMHLIDELYGLDESALNSHVNVTSL

SEQ ID NO: 58490 - protein, 79 aa, Glycine max
  peptide (1)..(79): Ceres Seq. ID no. 14312954
MQKITATGCSVTALIAAFVAVDKSHALDAAVSALAVFGVAGELGMKMAKGPASLRMHLIDELYGLDESALNSHVNVTSL

SEQ ID NO: 58491 - DNA, 1290 bp, Glycine max
  misc_feature (1)..(1290): Ceres Seq. ID no. 15169419
aaagcactatccattccattccacgttccaagctaagatctgggctttggcttaaaggaatattccgtggggtgatcatagtttttaccctgttcttatgatgggtgactcagaggtggcaaagttcggcttaaaagtcgggaagaatgagaaaaatgggttcccaaggggactagatcctgcaatatccaagttttttgtgcagctccaaagtgttgttaagtctcgacttagtagattagcaaaacaggatggaatgagtttgatgagttctgtccaaagaaaaggggataagtctttcagttactctgaagctgaactaaatgagcaactgcaagcatggagagaaaatccatcttgggttgacaagcctccactaataaaggtcactgctcccaaaggttctctttgcaaccttgatgtagaagttgatgttggcctaccccctgatgcagtatataatatagtgatagatcctgacaataggagagttttcaaaaatatcaaagaagtggtatccagaaaagtgttggttgatgagggtcataggcaagtggttgatcttgaccaagcagccatttggaaatttctttggtggtctgggactatatcaatcaatgttttggtagatcaaaacagaaaggtcagttctatgaagttcaagcaaaccaaggctggattcatgaaaaaatttgagggctgctggagagtagagcctttatttgttgacgaagcaatgtgccatccctttaagccagtgacaaaggaagactattatgcatgtgcaagaggcaaaggaagaattggatctaaagttagcctgaaacaaacacttcagccatccattgtccctccccctcccctatcatggtatttgaggggaattaccgcccggacgactgagatgcttataaatgatatgcttgcagaaactgctagaatcagaggaggatatgaggctgaaaagtctaaggcagaggagcttcagggaaaacctggtgaaaatgtggacctggtttctaacacaagtgacattaaagaaagatggaaattgcgtagagaaaatgcaaagcatagccatagaagactgctgaccaagtgatattcctatgtttgttttattttttcagcaatctatctagattgttacatgtagtccagtttaaaggattctaatgtatgcattacacaatgttaaagtcactaattccagctcattgcatgacatttcagtcggatgagttgatgtatccaatagcatagcaagagggaaacattgcagttcttttc

SEQ ID NO: 58492 - protein, 334 aa, Glycine max
  peptide (1)..(334): Ceres Seq. ID no. 15169420
MMGDSEVAKFGLKVGKNEKNGFPRGLDPAISKFFVQLQSVVKSRLSRLAKQDGMSLMSSVQRKGDKSFSYSEAELNEQLQAWRENPSWVDKPPLIKVTAPKGSLCNLDVEVDVGLPPDAVYNIVIDPDNRRVFKNIKEVVSRKVLVDEGHRQVVDLDQAAIWKFLWWSGTISINVLVDQNRKVSSMKFKQTKAGFMKKFEGCWRVEPLFVDEAMCHPFKPVTKEDYYACARGKGRIGSKVSLKQTLQPSIVPPPPLSWYLRGITARTTEMLINDMLAETARIRGGYEAEKSKAEELQGKPGENVDLVSNTSDIKERWKLRRENAKHSHRRLLTK

SEQ ID NO: 58493 - protein, 333 aa, Glycine max
  peptide (1)..(333): Ceres Seq. ID no. 15169421
MGDSEVAKFGLKVGKNEKNGFPRGLDPAISKFFVQLQSVVKSRLSRLAKQDGMSLMSSVQRKGDKSFSYSEAELNEQLQAWRENPSWVDKPPLIKVTAPKGSLCNLDVEVDVGLPPDAVYNIVIDPDNRRVFKNIKEVVSRKVLVDEGHRQVVDLDQAAIWKFLWWSGTISINVLVDQNRKVSSMKFKQTKAGFMKKFEGCWRVEPLFVDEAMCHPFKPVTKEDYYACARGKGRIGSKVSLKQTLQPSIVPPPPLSWYLRGITARTTEMLINDMLAETARIRGGYEAEKSKAEELQGKPGENVDLVSNTSDIKERWKLRRENAKHSHRRLLTK

SEQ ID NO: 58494 - protein, 281 aa, Glycine max
  peptide (1)..(281): Ceres Seq. ID no. 15169422
MSLMSSVQRKGDKSFSYSEAELNEQLQAWRENPSWVDKPPLIKVTAPKGSLCNLDVEVDVGLPPDAVYNIVIDPDNRRVFKNIKEVVSRKVLVDEGHRQVVDLDQAAIWKFLWWSGTISINVLVDQNRKVSSMKFKQTKAGFMKKFEGCWRVEPLFVDEAMCHPFKPVTKEDYYACARGKGRIGSKVSLKQTLQPSIVPPPPLSWYLRGITARTTEMLINDMLAETARIRGGYEAEKSKAEELQGKPGENVDLVSNTSDIKERWKLRRENAKHSHRRLLTK

SEQ ID NO: 58495 - DNA, 1785 bp, Glycine max
  misc_feature (1)..(1785): Ceres Seq. ID no. 14311183
aataaaccatctcattccctctctccctaaaatggccactcttccctcctacgaccacctcatcttcactgccttagctttcttcttatctggccttattttcttcctcaaacacaaatccaaatccaaatccaaaaaattcaacctccctccaggaccccctggatggcctattgttggaaacctcttccaagttgctcgttccgggaaacctttctttgaatacgtgaacgatgtgagactcaaatatggctcaatcttcaccctcaagatggggacaaggaccatgatcatcctcaccgactcaaaactggtccacgaggccatgatacaaaagggtgcaacctacgccaccaggcctccagagaatcccaccagaaccatcttcagcgaaaacaagttcaccgtgaatgctgccacctatggccccgtgtggaagtctctcaggaggaacatggtgcagaacatgctcagctcaacaagacttaaggagtttcgcagcgttcgcgacaatgcgatggacaagctcatcaacaggctcaaggacgaagccgagaataataatggtgcggtttgggttctcaaagatgctaggtttgctgttttttgcatacttgtggctatgtgttttggtcttgagatggatgaggagacagttgagagaatcgatcaggttatgaagagtgttctcatcaccttggatccgagaattgatgactatcttccaattctaagtccgtttttctcaaagcaaagaaagaaagccttggaggttcgtagagaacaagttgagttcttagttccaattatagaacaaagaagaagagcaatccaaaacccgggttcagatcacaccgccacaacgttttcctacctagacacactttttgatctcaaagttgaagggaagaaatcagcaccttctgatgcagaattggtttcactgtgctcagagtttctcaacggtggcacagacacaacagcaacagcggttgagtggggcatagcacagctcatagcaaaccctcacgttcagaaaaagctctatgaagaaataaagaggacggtgggagagaagaaagtggatgaaaaggatgttgagaaaatgccatacctacacgctgtggtgaaggagcttcttagaaagcaccctccaacacactttgtgctaacacatgctgtgactgaacccaccactttgggtggttatgacataccaattgatgcaagtgttgaggtgtacacaccagccattgctggtgacccgaaaaattggtcaaaccctgagaagtttgaccccgagaggttcatctctgggggtgaggaagcagacataaccggggtaactggggtgaagatgatgccttttggtgttgggagaaggatttgccctggcttggctatggccacagtgcatattcacctcatgatggctaggatggtgcaggagtttgagtgggatgcttacccaccagagaagaagttggatttcactggcaagtgggagttcactgtggtcatgaaagagtctctaagagcaaccatcaaaccaagaggaggaggaggagaaaaagtgcacttgtaaaattttgttgctcctcctcctttctggtttttaatttcacagataacataaatattattgttgctattgttattattatatatggatacatcatcgtggtttgtggtggatttgcatacagagtactgcaagtttcatcacatcattatattgccttcttaattggtccggtttgttggagaaatatttgttttgatgac

SEQ ID NO: 58496 - protein, 527 aa, Glycine max
  peptide (1)..(527): Ceres Seq. ID no. 14311184
INHLIPSLPKMATLPSYDHLIFTALAFFLSGLIFFLKHKSKSKSKKFNLPPGPPGWPIVGNLFQVARSGKPFFEYVNDVRLKYGSIFTLKMGTRTMIILTDSKLVHEAMIQKGATYATRPPENPTRTIFSENKFTVNAATYGPVWKSLRRNMVQNMLSSTRLKEFRSVRDNAMDKLINRLKDEAENNNGAVWVLKDARFAVFCILVAMCFGLEMDEETVERIDQVMKSVLITLDPRIDDYLPILSPFFSKQRKKALEVRREQVEFLVPIIEQRRRAIQNPGSDHTATTFSYLDTLFDLKVEGKKSAPSDAELVSLCSEFLNGGTDTTATAVEWGIAQLIANPHVQKKLYEEIKRTVGEKKVDEKDVEKMPYLHAVVKELLRKHPPTHFVLTHAVTEPTTLGGYDIPIDASVEVYTPAIAGDPKNWSNPEKFDPERFISGGEEADITGVTGVKMMPFGVGRRICPGLAMATVHIHLMMARMVQEFEWDAYPPEKKLDFTGKWEFTVVMKESLRATIKPRGGGGEKVHL

SEQ ID NO: 58497 - protein, 517 aa, Glycine max
  peptide (1)..(517): Ceres Seq. ID no. 14311185
MATLPSYDHLIFTALAFFLSGLIFFLKHKSKSKSKKFNLPPGPPGWPIVGNLFQVARSGKPFFEYVNDVRLKYGSIFTLKMGTRTMIILTDSKLVHEAMIQKGATYATRPPENPTRTIFSENKFTVNAATYGPVWKSLRRNMVQNMLSSTRLKEFRSVRDNAMDKLINRLKDEAENNNGAVWVLKDARFAVFCILVAMCFGLEMDEETVERIDQVMKSVLITLDPRIDDYLPILSPFFSKQRKKALEVRREQVEFLVPIIEQRRRAIQNPGSDHTATTFSYLDTLFDLKVEGKKSAPSDAELVSLCSEFLNGGTDTTATAVEWGIAQLIANPHVQKKLYEEIKRTVGEKKVDEKDVEKMPYLHAVVKELLRKHPPTHFVLTHAVTEPTTLGGYDIPIDASVEVYTPAIAGDPKNWSNPEKFDPERFISGGEEADITGVTGVKMMPFGVGRRICPGLAMATVHIHLMMARMVQEFEWDAYPPEKKLDFTGKWEFTVVMKESLRATIKPRGGGGEKVHL

SEQ ID NO: 58498 - protein, 437 aa, Glycine max
  peptide (1)..(437): Ceres Seq. ID no. 14311186
MGTRTMIILTDSKLVHEAMIQKGATYATRPPENPTRTIFSENKFTVNAATYGPVWKSLRRNMVQNMLSSTRLKEFRSVRDNAMDKLINRLKDEAENNNGAVWVLKDARFAVFCILVAMCFGLEMDEETVERIDQVMKSVLITLDPRIDDYLPILSPFFSKQRKKALEVRREQVEFLVPIIEQRRRAIQNPGSDHTATTFSYLDTLFDLKVEGKKSAPSDAELVSLCSEFLNGGTDTTATAVEWGIAQLIANPHVQKKLYEEIKRTVGEKKVDEKDVEKMPYLHAVVKELLRKHPPTHFVLTHAVTEPTTLGGYDIPIDASVEVYTPAIAGDPKNWSNPEKFDPERFISGGEEADITGVTGVKMMPFGVGRRICPGLAMATVHIHLMMARMVQEFEWDAYPPEKKLDFTGKWEFTVVMKESLRATIKPRGGGGEKVHL

SEQ ID NO: 58499 - DNA, 1103 bp, Glycine max
  misc_feature (1)..(1103): Ceres Seq. ID no. 12582229
cagctacgtaggccccccccccgatgatgagaagcgaagtgctgttactgccatggacagtatattttctgtgctaacccattacagtgaggccacagggagattggtgtgtagaaagaggtccagcattcctgacgtgggtcttttaagcacatccttgattatttctcttggtagaatcaaacaaagctttgtattgtgagttattggaaatgtctagttttgttattactttaccgcaagctttatgcttttttgcagacccttaatttgttgtttgtatgattttgagtttccatgcagaactaatccgcatttaccagacatgcctattgtttatgctagtgacgccttcttgaaattgacaggttatgcaaaaaatgaagttttgggccacaactgtagatttttaggtggaacagataccgatacctcgactttacatctggtgatacacttcttctcgccataggttttttaattttgtcttgtaatttggcaacttagagtcttagactaatgggaatggaccattttgttatgcctttctcttattgcttacgttcagataagggaaagcattaaaacagaacaaccatgcacagtacgtattttgaattacaggaaggacaaaagctcattttggaattttcttcatatctcacccgttcgtgatgcttctggcaaggttgcatactttgtgggagttcaaatagaagacaacaataaaaacgatgatagccattgtttgagtcctgagaagagacaacttagtgtggttggtgtagtcaaggttgcagtgaggagtttatcaatgactgcgggatcttctgagtcgtagcaaaaggatcatgtgagtttggaacaaataatatttgcctacttcccagaaatattaatccattcgaaaaaataatcaatctcaattggtgattgttgagatgatagaaaggtaaaagaattaatttgtgaagaagaaaaaaaaagagagtccatactgtcaattgtaagaaaacattctctgttggacgtgtataaataaaatgtattatatttcctaactgcatttattttccgtaatgtagcaataaaagttgacttgt

SEQ ID NO: 58500 - protein, 74 aa, Glycine max
  peptide (1)..(74): Ceres Seq. ID no. 12582230
MLFCRPLICCLYDFEFPCRTNPHLPDMPIVYASDAFLKLTGYAKNEVLGHNCRFLGGTDTDTSTLHLVIHFFSP

SEQ ID NO: 58501 - protein, 66 aa, Glycine max
  peptide (1)..(66): Ceres Seq. ID no. 12582231
SYVGPPPDDEKRSAVTAMDSIFSVLTHYSEATGRLVCRKRSSIPDVGLLSTSLIISLGRIKQSFVL

SEQ ID NO: 58502 - protein, 49 aa, Glycine max
  peptide (1)..(49): Ceres Seq. ID no. 12582232
MDSIFSVLTHYSEATGRLVCRKRSSIPDVGLLSTSLIISLGRIKQSFVL

SEQ ID NO: 58503 - DNA, 2188 bp, Glycine max
  misc_feature (1)..(2188): Ceres Seq. ID no. 14310784
atgagtgagtgaactttggataagtaagtgttgtgtgaagattttgtatgagtacttgagcttctttgccttgtcagcttttgatttttgatgttgtggtgtggcagtggaagtcatactaaaaaaggtgattcttttgcagtggcaagcatggcaagaggaagagcagatgtgaactccagaaaaaaattggtcacagctgtgttggttttggtgattgttggtggttttttctatttctattctcagaatagtgattcatcttctgttgtgtatggtgataaatctttgagccactttggtttgggaggggacaaagatgatggtgaatcttcctccacagttgttggaggagagggcagtgttgtaccaaagagcattccagtctgtgatgatcgattatccgagctgattccttgtctggacagaaatctcatataccaaacaagattgaagcttgatttatctttgatggagcactatgagagacactgcccaacacctgataggagatacaattgtttaattcctcctcctccagggtacaaggttcctatcaagtggcccaaaagcagagaccaggtgtggaaggcaaatatacctcatacccatctagcaactgaaaaatctgaccagaactggatggttgtgaaaggtgaaacaatagtgtttcctggtggaggaacccacttccattatggtgctggtaaatacattgcttcaattgctaatatgcttaattttccaaacaatgatataaacaatgggggaagagtcaggtctgttcttgatgttggctgtggggttgctagctttggaggatatcttatttcctctaatgtgatagcaatgtcattggcaccaaatgatgttcatcaaaatcaaatccagtttgccttagagaggggaattccagcatatcttggtgtcttggggacccaaagactcccttatccaagtagatcattcgaacttgctcattgctctcgctgtagaatcgattggcttcagagagatggtatacttctgcttgagctggataggttactgaggccaggaggttatttcgcgtactcatctcctgaagcctatgcacaggatgaagaggataggaggatatggcgagaaatgagcactcttgtggagaggatgtgctggaaaatagcttctaagaaggatcagactgttatttgggtcaagcctctcactaatagctgctacttaaagagattgcctggtactaagcctccactctgcaggtctgatgatgatcctgatgctgtttggggagttaaaatgaaagtttgcatctcacgttattcagatcaaatgcacaaagcaaaaggaagtgatttggctccttggcctgctcgattgactactccacctcctcgtctggcagaaattcactattctactgaaatgtttgagaaggacatggaagtttggaaacaacgagttcgtaattactggagcaagctagccagtaagattaagccagacacaattcggaacgtgatggatatgaaggcaaacttgggttcatttgcagcagctttgaaggacaaagatgtttgggttatgaatgtagtgccagaaaatgaacaaaaaactctcaagattatatacgacagaggacttataggaacagttcacaactggtgtgaagctttttcaacctaccctcgaacgtatgatctactccatgcatggactgtgttttctgatattattaagaaagaatgcagtccagaggatttattaattgagatggatagaatcctaaggccaaagggtttcatcattgtccatgataagcgttcagtggtggagtatataaagaaatacttgccagcattacactgggaggctgtgaccatatatgatgtagatgatgatgatacagtgattataattcaaaagaaaatgtggctcacaagtcaaagcatcaaggtctctgaatagtgtcataatattcacttgtataagttaccagtgctactaggtgtataagtgtattatgtagctctattcctaaggcctaagctttcagtgtagctctcttcactatagacgcaagtcacagtgaaagctcacccaaatcgtctttatctttttttgcatttattgaattttgtacgcttcaacatttatatccactctgaagaaatattctaatttaaaaatt

SEQ ID NO: 58504 - protein, 624 aa, Glycine max
  peptide (1)..(624): Ceres Seq. ID no. 14310785
MLWCGSGSHTKKGDSFAVASMARGRADVNSRKKLVTAVLVLVIVGGFFYFYSQNSDSSSVVYGDKSLSHFGLGGDKDDGESSSTVVGGEGSVVPKSIPVCDDRLSELIPCLDRNLIYQTRLKLDLSLMEHYERHCPTPDRRYNCLIPPPPGYKVPIKWPKSRDQVWKANIPHTHLATEKSDQNWMVVKGETIVFPGGGTHFHYGAGKYIASIANMLNFPNNDINNGGRVRSVLDVGCGVASFGGYLISSNVIAMSLAPNDVHQNQIQFALERGIPAYLGVLGTQRLPYPSRSFELAHCSRCRIDWLQRDGILLLELDRLLRPGGYFAYSSPEAYAQDEEDRRIWREMSTLVERMCWKIASKKDQTVIWVKPLTNSCYLKRLPGTKPPLCRSDDDPDAVWGVKMKVCISRYSDQMHKAKGSDLAPWPARLTTPPPRLAEIHYSTEMFEKDMEVWKQRVRNYWSKLASKIKPDTIRNVMDMKANLGSFAAALKDKDVWVMNVVPENEQKTLKIIYDRGLIGTVHNWCEAFSTYPRTYDLLHAWTVFSDIIKKECSPEDLLIEMDRILRPKGFIIVHDKRSVVEYIKKYLPALHWEAVTIYDVDDDDTVIIIQKKMWLTSQSIKVSE

SEQ ID NO: 58505 - protein, 604 aa, Glycine max
  peptide (1)..(604): Ceres Seq. ID no. 14310786
MARGRADVNSRKKLVTAVLVLVIVGGFFYFYSQNSDSSSVVYGDKSLSHFGLGGDKDDGESSSTVVGGEGSVVPKSIPVCDDRLSELIPCLDRNLIYQTRLKLDLSLMEHYERHCPTPDRRYNCLIPPPPGYKVPIKWPKSRDQVWKANIPHTHLATEKSDQNWMVVKGETIVFPGGGTHFHYGAGKYIASIANMLNFPNNDINNGGRVRSVLDVGCGVASFGGYLISSNVIAMSLAPNDVHQNQIQFALERGIPAYLGVLGTQRLPYPSRSFELAHCSRCRIDWLQRDGILLLELDRLLRPGGYFAYSSPEAYAQDEEDRRIWREMSTLVERMCWKIASKKDQTVIWVKPLTNSCYLKRLPGTKPPLCRSDDDPDAVWGVKMKVCISRYSDQMHKAKGSDLAPWPARLTTPPPRLAEIHYSTEMFEKDMEVWKQRVRNYWSKLASKIKPDTIRNVMDMKANLGSFAAALKDKDVWVMNVVPENEQKTLKIIYDRGLIGTVHNWCEAFSTYPRTYDLLHAWTVFSDIIKKECSPEDLLIEMDRILRPKGFIIVHDKRSVVEYIKKYLPALHWEAVTIYDVDDDDTVIIIQKKMWLTSQSIKVSE

SEQ ID NO: 58506 - protein, 497 aa, Glycine max
  peptide (1)..(497): Ceres Seq. ID no. 14310787
MEHYERHCPTPDRRYNCLIPPPPGYKVPIKWPKSRDQVWKANIPHTHLATEKSDQNWMVVKGETIVFPGGGTHFHYGAGKYIASIANMLNFPNNDINNGGRVRSVLDVGCGVASFGGYLISSNVIAMSLAPNDVHQNQIQFALERGIPAYLGVLGTQRLPYPSRSFELAHCSRCRIDWLQRDGILLLELDRLLRPGGYFAYSSPEAYAQDEEDRRIWREMSTLVERMCWKIASKKDQTVIWVKPLTNSCYLKRLPGTKPPLCRSDDDPDAVWGVKMKVCISRYSDQMHKAKGSDLAPWPARLTTPPPRLAEIHYSTEMFEKDMEVWKQRVRNYWSKLASKIKPDTIRNVMDMKANLGSFAAALKDKDVWVMNVVPENEQKTLKIIYDRGLIGTVHNWCEAFSTYPRTYDLLHAWTVFSDIIKKECSPEDLLIEMDRILRPKGFIIVHDKRSVVEYIKKYLPALHWEAVTIYDVDDDDTVIIIQKKMWLTSQSIKVSE

SEQ ID NO: 58507 - DNA, 1212 bp, Glycine max
  misc_feature (1)..(1212): Ceres Seq. ID no. 14310756
agttgcattcgttcattcactccctaacatagcaattactaccatttaccaaagtaaacccagagatggagtggtgtgtgtcaatgccaaagattgagctgcatgctcacctcaatggatccatccgagactccacacttcttgaactcactaaggctttgattggaaagggtgtcatgaatttctccgaagtggagcatatcatcctcaaatataaccgttccctaaaagaagttttcaagctgttcgacctaatccacattctcaccactgatcacaacactgttacaagaattaccagagaagttattgaggattttgcatcagagaatgttgtctatctggagttgaggaccactccaaagaaaaatgattctgtgggaatgagcaaacactcttatgttgaagctgtactgaaaggtctaagatcaatcacttcagttgatgtggatttcattccacattgtgaagattcaaagactctttttactcctgcaccggttattaatggacatgtgagaaaaaaaatctttgttaggcttctcttgagcattgacagaagggagacaacagaagctgcaatggaaactgtcaagcttgcattggaaatgaggccttatggggtagttggaattgacctctctggaaatccaagtattggtgattggaccacatatttgccagcattgaaatttgctcgagaacaaggtctttatgtaacacttcattgtggcgagttacctaattcaaaggagataaaaaatatgcttgacttccgtccccaaaggattggacatgcttgtttctttgaggatgaacactggagacagctgaagtcgtcgaacattccggttgaaatttgcttgacatcaaacgttaggacaatgactgttccatctatagatgttcaccactttgctcatttgtacaacgcaaaacatcctttagccctgtgtactgatgactcgggagtcttctctacctgtctctccaaggaatacaaaattgctgctgattcatttgggctgggaaggagggaaatgtttgagctatcaaggaatgctgttgagcatatattcgcagatagcaaagtaaaggaggatttaagaaaaattttcaattcagtggcaaaaaaatatggaagtgtaaccacagtttcatctttagagaatatctgcatttagatataattaatattagagctttgttgac

SEQ ID NO: 58508 - protein, 372 aa, Glycine max
  peptide (1)..(372): Ceres Seq. ID no. 14310757
MEWCVSMPKIELHAHLNGSIRDSTLLELTKALIGKGVMNFSEVEHIILKYNRSLKEVFKLFDLIHILTTDHNTVTRITREVIEDFASENVVYLELRTTPKKNDSVGMSKHSYVEAVLKGLRSITSVDVDFIPHCEDSKTLFTPAPVINGHVRKKIFVRLLLSIDRRETTEAAMETVKLALEMRPYGVVGIDLSGNPSIGDWTTYLPALKFAREQGLYVTLHCGELPNSKEIKNMLDFRPQRIGHACFFEDEHWRQLKSSNIPVEICLTSNVRTMTVPSIDVHHFAHLYNAKHPLALCTDDSGVFSTCLSKEYKIAADSFGLGRREMFELSRNAVEHIFADSKVKEDLRKIFNSVAKKYGSVTTVSSLENICI

SEQ ID NO: 58509 - protein, 366 aa, Glycine max
  peptide (1)..(366): Ceres Seq. ID no. 14310758
MPKIELHAHLNGSIRDSTLLELTKALIGKGVMNFSEVEHIILKYNRSLKEVFKLFDLIHILTTDHNTVTRITREVIEDFASENVVYLELRTTPKKNDSVGMSKHSYVEAVLKGLRSITSVDVDFIPHCEDSKTLFTPAPVINGHVRKKIFVRLLLSIDRRETTEAAMETVKLALEMRPYGVVGIDLSGNPSIGDWTTYLPALKFAREQGLYVTLHCGELPNSKEIKNMLDFRPQRIGHACFFEDEHWRQLKSSNIPVEICLTSNVRTMTVPSIDVHHFAHLYNAKHPLALCTDDSGVFSTCLSKEYKIAADSFGLGRREMFELSRNAVEHIFADSKVKEDLRKIFNSVAKKYGSVTTVSSLENICI

SEQ ID NO: 58510 - protein, 335 aa, Glycine max
  peptide (1)..(335): Ceres Seq. ID no. 14310759
MNFSEVEHIILKYNRSLKEVFKLFDLIHILTTDHNTVTRITREVIEDFASENVVYLELRTTPKKNDSVGMSKHSYVEAVLKGLRSITSVDVDFIPHCEDSKTLFTPAPVINGHVRKKIFVRLLLSIDRRETTEAAMETVKLALEMRPYGVVGIDLSGNPSIGDWTTYLPALKFAREQGLYVTLHCGELPNSKEIKNMLDFRPQRIGHACFFEDEHWRQLKSSNIPVEICLTSNVRTMTVPSIDVHHFAHLYNAKHPLALCTDDSGVFSTCLSKEYKIAADSFGLGRREMFELSRNAVEHIFADSKVKEDLRKIFNSVAKKYGSVTTVSSLENICI

SEQ ID NO: 58511 - DNA, 1632 bp, Glycine max
  misc_feature (1)..(1632): Ceres Seq. ID no. 15178169
tttttttctgtgggaagaagaaaatgctggttcggaggagggtgatgagttggagaagggtggcgaaggcccttcaggctctggtagctcatgtcttacttttctccttcactatttcccttgctctcaagcttgaccatgtcattcgtcactcatggtggaaggtattttttcctctatgggtttttcatgctgtggtagcacgaggcaggttttccttgcccgctccttcgatgcctcatgatcgccgatgggctccttttcattcactcgtagcaactcctctacttgttgcatttgagctacttctttgtatgcatctcgggagcagttatgtgatgaatttaagaattgtcttcatgcccctgatatttcttgaaatggcgattttgtttgataatgtcaggatgtgtagggctttgatgcctggagatgatgaaaatttgaccgacgaagcagtatgggaaactcttccgcacttctgggtttcaatatccatggtcttctttattgctgccacagtgttcacccttctaaagatatgtggtgatgttgcagctctagggtggtgggacttgtttattaacttcggcattgcacagtgctttgcgtttcttgtttgtacaaagtggcacaatccaactattcatggaggctgtcatattacagaaccgtgttcatcatcaaataccataagatacctagacttgaggacaggaggcttagttgtttacacagatgaagatagacagcaaaatgggttctgcaatctgcaggatatcggcagccatattatgaaaattccattcattggtttccaaatacttctttttatgcatttagagggaacaccatccagtgcaaaaaatctgccacactgggtcattatttccccactatttttgttgcaaggagctggggttttatttgcagcttatagattaatagagaagatagttcttttactctacattggagatattcctgaaagatactcagctatagcatcaaaatcccgtgagtgctttgggttctttcgacgtgggtcaaggttgcttggttggtggtcaatagatgaaggaagtagagaggaagaagctagacttttttgtgctgggagtcctgggtataatactttcacccctgagacggtgaagaaaatgcctagaacagatctggttgaggagatttggagactacaagctgcactgggtgagcagacacacgttacaaaatttagccaggaggagtatgaaagacttcaaaatgagaagatcttatgcagaatttgctttgaggagcagatcaacgtggtcctacttccctgcaggcatcacattctttgtagcacttgctgcgaaaaatgtaaaaggtgccctgtctgccgtggatccattgaagaaaggatgcctgtatatgatgtatagaccgagttcaatgaagatgtataggtatcttactgatcatccagcttgtgattttagatgaggcaagcgctgagaattatcaatttctcttctcatagatatgatgaacatcagaagttgtatagaattttaaacgtgttactccccctccctcctaatttttcttccatagtgcatttttgcaattctgaagggattgccaatg

SEQ ID NO: 58512 - protein, 474 aa, Glycine max
  peptide (1)..(474): Ceres Seq. ID no. 15178170
FFCGKKKMLVRRRVMSWRRVAKALQALVAHVLLFSFTISLALKLDHVIRHSWWKVFFPLWVFHAVVARGRFSLPAPSMPHDRRWAPFHSLVATPLLVAFELLLCMHLGSSYVMNLRIVFMPLIFLEMAILFDNVRMCRALMPGDDENLTDEAVWETLPHFWVSISMVFFIAATVFTLLKICGDVAALGWWDLFINFGIAQCFAFLVCTKWHNPTIHGGCHITEPCSSSNTIRYLDLRTGGLVVYTDEDRQQNGFCNLQDIGSHIMKIPFIGFQILLFMHLEGTPSSAKNLPHWVIISPLFLLQGAGVLFAAYRLIEKIVLLLYIGDIPERYSAIASKSRECFGFFRRGSRLLGWWSIDEGSREEEARLFCAGSPGYNTFTPETVKKMPRTDLVEEIWRLQAALGEQTHVTKFSQEEYERLQNEKILCRICFEEQINVVLLPCRHHILCSTCCEKCKRCPVCRGSIEERMPVYDV

SEQ ID NO: 58513 - protein, 467 aa, Glycine max
  peptide (1)..(467): Ceres Seq. ID no. 15178171
MLVRRRVMSWRRVAKALQALVAHVLLFSFTISLALKLDHVIRHSWWKVFFPLWVFHAVVARGRFSLPAPSMPHDRRWAPFHSLVATPLLVAFELLLCMHLGSSYVMNLRIVFMPLIFLEMAILFDNVRMCRALMPGDDENLTDEAVWETLPHFWVSISMVFFIAATVFTLLKICGDVAALGWWDLFINFGIAQCFAFLVCTKWHNPTIHGGCHITEPCSSSNTIRYLDLRTGGLVVYTDEDRQQNGFCNLQDIGSHIMKIPFIGFQILLFMHLEGTPSSAKNLPHWVIISPLFLLQGAGVLFAAYRLIEKIVLLLYIGDIPERYSAIASKSRECFGFFRRGSRLLGWWSIDEGSREEEARLFCAGSPGYNTFTPETVKKMPRTDLVEEIWRLQAALGEQTHVTKFSQEEYERLQNEKILCRICFEEQINVVLLPCRHHILCSTCCEKCKRCPVCRGSIEERMPVYDV

SEQ ID NO: 58514 - protein, 460 aa, Glycine max
  peptide (1)..(460): Ceres Seq. ID no. 15178172
MSWRRVAKALQALVAHVLLFSFTISLALKLDHVIRHSWWKVFFPLWVFHAVVARGRFSLPAPSMPHDRRWAPFHSLVATPLLVAFELLLCMHLGSSYVMNLRIVFMPLIFLEMAILFDNVRMCRALMPGDDENLTDEAVWETLPHFWVSISMVFFIAATVFTLLKICGDVAALGWWDLFINFGIAQCFAFLVCTKWHNPTIHGGCHITEPCSSSNTIRYLDLRTGGLVVYTDEDRQQNGFCNLQDIGSHIMKIPFIGFQILLFMHLEGTPSSAKNLPHWVIISPLFLLQGAGVLFAAYRLIEKIVLLLYIGDIPERYSAIASKSRECFGFFRRGSRLLGWWSIDEGSREEEARLFCAGSPGYNTFTPETVKKMPRTDLVEEIWRLQAALGEQTHVTKFSQEEYERLQNEKILCRICFEEQINVVLLPCRHHILCSTCCEKCKRCPVCRGSIEERMPVYDV

SEQ ID NO: 58515 - DNA, 1584 bp, Glycine max
  misc_feature (1)..(1584): Ceres Seq. ID no. 13493536
gtgtcagaaagcaaatattgcctattcggcaatatggcggaaaatggttcaattgagctgaacaagtttgtgttgttttgtttgttgttgctaatacaagtggcagtttctgaaatcatttttgaagagcgatttgatgatggatggcgaagtaggtgggtgaaatcagactggaaaagcagtgagggcaaagcaggttcattcaagcacacagctggaaaatgggctggtgatccagatgacaaaggtattcaaacatccagtgatgccaaacactttgccatctctgcaaaaataccagaattcacaaacaagaacagaacattggtccttcagtattctgtaaaatttgagcaagagattgaatgtggtggagggtacatcaagcttctctctggatttgttaatcaaaagaagtttggtggggatacaccatatattttaatgtttggaccagatttatgtggcacggatacaaagaagctccatgtgatactctcctaccacggtcaaaattaccccataaagaaggacctgcaatgtgaaactgacaggttaactcatttctacacattcattctcaggccagatgccacatacagtgtcctggttgataatagagagagagattctggaagcatgtatacagattgggatattcttcctccacgaaaaatcaaatatgtcaaggccaaaaagcctgcagactgggaggaaagagaatacattgaagaccctgatgatgtcaaacctgagggatatgattcaatcccaagagaaattcctgacccaaatgctaaagagcctgaaaactgggatgaagaggaagatgggaaatggaaaccaccaaagataccaaatccagcatacaaaggaccatggaaaagaaagaaaatcaagaaccctaactacaaagggaaatggaaaactccatggatagataatccagagtttgaagacgaccctgatctttatgtgcttaagcctatcaagtatgtaggtattgaagtttggcaggttaaaggcggttcagtttttgacaacgttttgatttgtgacgaccctgattatgcaaaacaagttgttgaggaggtgtttgccaacagggagattgaaaaggaaggttttgaggaagcagagaaagtgagaaaagccaaagaggaggaggaggctcaaagagcaagagaagaaggtgaaaggcgtagacgagagagaggtcatgatcgacgatatcgggacagatatagagacaaatatagaaggcatcgctatgattacgatggtcatgacgagctttgatgggataaaacgtccttctcaattatctggttgacaaatttcaagattgttatgaattatagttacattgatagtccatctcatgttactttccaagggaaactttttaattttaaataaaagtggtttatttgtcgcatatctatataggagtattatttttgtcttgtcttcagttgtcatgcatttactatagactggggaatataaacccaaacccaatttgccatcgataanaagnttgcaacaagggctatagaaatgtgcacgagttttttttttttt

SEQ ID NO: 58516 - protein, 432 aa, Glycine max
  peptide (1)..(432): Ceres Seq. ID no. 13493537
VSESKYCLFGNMAENGSIELNKFVLFCLLLLIQVAVSEIIFEERFDDGWRSRWVKSDWKSSEGKAGSFKHTAGKWAGDPDDKGIQTSSDAKHFAISAKIPEFTNKNRTLVLQYSVKFEQEIECGGGYIKLLSGFVNQKKFGGDTPYILMFGPDLCGTDTKKLHVILSYHGQNYPIKKDLQCETDRLTHFYTFILRPDATYSVLVDNRERDSGSMYTDWDILPPRKIKYVKAKKPADWEEREYIEDPDDVKPEGYDSIPREIPDPNAKEPENWDEEEDGKWKPPKIPNPAYKGPWKRKKIKNPNYKGKWKTPWIDNPEFEDDPDLYVLKPIKYVGIEVWQVKGGSVFDNVLICDDPDYAKQVVEEVFANREIEKEGFEEAEKVRKAKEEEEAQRAREEGERRRRERGHDRRYRDRYRDKYRRHRYDYDGHDEL

SEQ ID NO: 58517 - protein, 421 aa, Glycine max
  peptide (1)..(421): Ceres Seq. ID no. 13493538
MAENGSIELNKFVLFCLLLLIQVAVSEIIFEERFDDGWRSRWVKSDWKSSEGKAGSFKHTAGKWAGDPDDKGIQTSSDAKHFAISAKIPEFTNKNRTLVLQYSVKFEQEIECGGGYIKLLSGFVNQKKFGGDTPYILMFGPDLCGTDTKKLHVILSYHGQNYPIKKDLQCETDRLTHFYTFILRPDATYSVLVDNRERDSGSMYTDWDILPPRKIKYVKAKKPADWEEREYIEDPDDVKPEGYDSIPREIPDPNAKEPENWDEEEDGKWKPPKIPNPAYKGPWKRKKIKNPNYKGKWKTPWIDNPEFEDDPDLYVLKPIKYVGIEVWQVKGGSVFDNVLICDDPDYAKQVVEEVFANREIEKEGFEEAEKVRKAKEEEEAQRAREEGERRRRERGHDRRYRDRYRDKYRRHRYDYDGHDEL

SEQ ID NO: 58518 - protein, 284 aa, Glycine max
  peptide (1)..(284): Ceres Seq. ID no. 13493539
MFGPDLCGTDTKKLHVILSYHGQNYPIKKDLQCETDRLTHFYTFILRPDATYSVLVDNRERDSGSMYTDWDILPPRKIKYVKAKKPADWEEREYIEDPDDVKPEGYDSIPREIPDPNAKEPENWDEEEDGKWKPPKIPNPAYKGPWKRKKIKNPNYKGKWKTPWIDNPEFEDDPDLYVLKPIKYVGIEVWQVKGGSVFDNVLICDDPDYAKQVVEEVFANREIEKEGFEEAEKVRKAKEEEEAQRAREEGERRRRERGHDRRYRDRYRDKYRRHRYDYDGHDEL

SEQ ID NO: 58519 - DNA, 1336 bp, Glycine max
  misc_feature (1)..(1336): Ceres Seq. ID no. 15226515
atagtatcttcagaatgctttctgtgagggatttttggaggcggcataggaggaaggttttcgtcactgttggtgttttaggaagtgggtatcttttgtataagctctacggtgctcacaggcatggggttcaggaacttgaaagagaactcgcagttcagagggaaactgaggagcttatgaaggctcagatgcaagctcactttgagaatattcagaggatgtctgatgtaacattgccgcatgctatgcacgagttaagttgtcggatcacagaagagttggatctttctcaccttcttgaaaggttaatacaaggaaagggtcaaccaaacaccttaacccaatcagagaaactagatttatggagtagactcaaaattctaagttttacaagaatgacattgtcagtatgggctacaacaatgcttagcttatatacaaaagttcaagtcaatatactaggaaggcatttatacattgatacagcacgaagccttggaatctctgattcagtagaaagtggagatgtggtcgatagggaggaccagaagaaatttctagatagtgttgattttctctctcagcatggtatgcctgccttgatttctgatatggaagcagcaacaaaagaagttctcaaaggaaagcagttgagtactttcttcaacagcacaacgcttcatgaaactatcatgcagatactcaacaccttcatgagcatggggactccaaattcctggataaagtatatgatacctgaagatgttagaccgtattccacaacctctggcagtgatgacccggtaccatttgacgtgactgaatttgaacaacttatgattgaagcacgggcagtattatcaagtgctgaatttggaagcattgtagagatatctctgaaagcagtggtggatacactggtggagcttatgaggactaaatttagtggaggaagtgtagctgagggcatgccgctggccagagtgttgcctcaagttgcacagatgtgtcctttgctcctcggagaacccagcaaaaatcagttcatccaaatcattaaaaatatacaggaggttgaactttttttcactctcctctatgcaaatatgccacatgagtagtgattaattatttatgtttccaaccaaagagattaaatttattgcatgaaaggcatcgggcagtgtacaaaaaattagacgaggttcaaaagagagatataggtgctaaattgttagctttcatcttttcaatatgacatttcccatttgttgtaattagtgattagtgatgcataatgctcccactttggctcaaacgtggcatttggtgg

SEQ ID NO: 58520 - protein, 373 aa, Glycine max
  peptide (1)..(373): Ceres Seq. ID no. 15226516
SIFRMLSVRDFWRRHRRKVFVTVGVLGSGYLLYKLYGAHRHGVQELERELAVQRETEELMKAQMQAHFENIQRMSDVTLPHAMHELSCRITEELDLSHLLERLIQGKGQPNTLTQSEKLDLWSRLKILSFTRMTLSVWATTMLSLYTKVQVNILGRHLYIDTARSLGISDSVESGDVVDREDQKKFLDSVDFLSQHGMPALISDMEAATKEVLKGKQLSTFFNSTTLHETIMQILNTFMSMGTPNSWIKYMIPEDVRPYSTTSGSDDPVPFDVTEFEQLMIEARAVLSSAEFGSIVEISLKAVVDTLVELMRTKFSGGSVAEGMPLARVLPQVAQMCPLLLGEPSKNQFIQIIKNIQEVELFFTLLYANMPHE

SEQ ID NO: 58521 - protein, 369 aa, Glycine max
  peptide (1)..(369): Ceres Seq. ID no. 15226517
MLSVRDFWRRHRRKVFVTVGVLGSGYLLYKLYGAHRHGVQELERELAVQRETEELMKAQMQAHFENIQRMSDVTLPHAMHELSCRITEELDLSHLLERLIQGKGQPNTLTQSEKLDLWSRLKILSFTRMTLSVWATTMLSLYTKVQVNILGRHLYIDTARSLGISDSVESGDVVDREDQKKFLDSVDFLSQHGMPALISDMEAATKEVLKGKQLSTFFNSTTLHETIMQILNTFMSMGTPNSWIKYMIPEDVRPYSTTSGSDDPVPFDVTEFEQLMIEARAVLSSAEFGSIVEISLKAVVDTLVELMRTKFSGGSVAEGMPLARVLPQVAQMCPLLLGEPSKNQFIQIIKNIQEVELFFTLLYANMPHE

SEQ ID NO: 58522 - protein, 314 aa, Glycine max
  peptide (1)..(314): Ceres Seq. ID no. 15226518
MKAQMQAHFENIQRMSDVTLPHAMHELSCRITEELDLSHLLERLIQGKGQPNTLTQSEKLDLWSRLKILSFTRMTLSVWATTMLSLYTKVQVNILGRHLYIDTARSLGISDSVESGDVVDREDQKKFLDSVDFLSQHGMPALISDMEAATKEVLKGKQLSTFFNSTTLHETIMQILNTFMSMGTPNSWIKYMIPEDVRPYSTTSGSDDPVPFDVTEFEQLMIEARAVLSSAEFGSIVEISLKAVVDTLVELMRTKFSGGSVAEGMPLARVLPQVAQMCPLLLGEPSKNQFIQIIKNIQEVELFFTLLYANMPHE

SEQ ID NO: 58523 - DNA, 876 bp, Glycine max
  misc_feature (1)..(876): Ceres Seq. ID no. 14309686
gggcaggaagatctgcagacaacatttggacgcggtagagaagaaagaaaggaaagggtagggtagatcaggcaggcttcagttcagccatgagaactcacactcacacttacacttatactattttctctctaattcttctctccttatttcttcgaacccattccgaggttataacgttaacctctgatacatttaatgataagatcaaggagaaagacactgcatggtttgtgaaattctgcgttccctggtgcaagcattgtaagaatcttggttcattgtgggatgatttggggaaagcaatggaaggagaagatgaaatagaggttggagaagtcgattgcggcatggacaaagcagtatgttccaaagttgatattcactcctatcctacctttaaggttttctatgatggtgaagaagtagccagataccaaggtacaagagatgttgaatcaatgaaaacctttgttttggaagaagctgaaaaggcagcagcaaaagcacttgaaagtaacaaagaattataacaacttttgaggtgcagtcattatctggattacaactagctctttactgtgggtggtgcacatcccagataagtaatcacctttgggttcaggctgagacattcattcttctctgttctgatcaacatttgtttgtttgacgtagcagttgtgagttaagaactaatttcgtacactaccacaatttctttctgctatactccacaattttcttttttaggtttatttatactctactaaactgatagtggcttgtcatgtttaaagtttcaatataatgatcagtgaattatgaatcgtacctcaggatttgtttatataatcatttggtcttttgaatgct

SEQ ID NO: 58524 - protein, 147 aa, Glycine max
  peptide (1)..(147): Ceres Seq. ID no. 14309687
MRTHTHTYTYTIFSLILLSLFLRTHSEVITLTSDTFNDKIKEKDTAWFVKFCVPWCKHCKNLGSLWDDLGKAMEGEDEIEVGEVDCGMDKAVCSKVDIHSYPTFKVFYDGEEVARYQGTRDVESMKTFVLEEAEKAAAKALESNKEL

SEQ ID NO: 58525 - protein, 75 aa, Glycine max
  peptide (1)..(75): Ceres Seq. ID no. 14309688
MEGEDEIEVGEVDCGMDKAVCSKVDIHSYPTFKVFYDGEEVARYQGTRDVESMKTFVLEEAEKAAAKALESNKEL

SEQ ID NO: 58526 - DNA, 1375 bp, Glycine max
  misc_feature (1)..(1375): Ceres Seq. ID no. 15171508
acatgccaactattccaaagtcattacttcaccctctcatcgtatcaaaagagtgttttacttcaaggttcttggcaaaatcacctgtatctctaagtgtgtaatacaattagtcatctctgtccaattgttttctgtttttagaacctagcacttcaattcttaagctgagaacatataagatagagtaatcaatcatgccatttggtttggtctcactctcggcctggaacaagcgccgtagaagcaaatctcaagatcatacagatccctgggtttacaaacctgcacagctttggcaacttgaagatcaaacaccacgacctacaaaaaggctacatggatcatctgtttacacactcaaggagatggaggaggcaacatgttcattcagtgatgagaatctgcttggaaaaggaggatttggcaaagtctatcggggcactttgcggtcaggagaggttgtagcaatcaagaaaatggagttgccagcaattaaagcagctgagggggaacgcgagtttcgagtcgaagttgacatcttgagcagacttgaccacccaaatcttgtttctttgataggctactgtgctgatggaaagcatagattcctagtatatgaatatatgcgtaaagggaacctgcaggatcatttgaatggaattggggaaagaaacatggattggcctcgaagactccaagtggcactgggagctgcaaaaggacttgcttatctccattcaagttctgatgttggaattcctattgttcatagggatttcaaatcgaccaatattctcttagacgataactttgaagcaaagatatctgattttggactcgcgaagttaatgccagaagggcaagagacacatgtgactgccagagtgcttggtacctttggctattttgatcccgagtatacatcgactgggaaactcactctacagagtgatgtttatgcttttggtgttgttcttttggagcttttgactggacgtcgagctgtagatctaaaccaaggtcccaacgatcaaaaccttgtactacaggtgaggcacatactgcatgaccgcaagaagcttcgtaaggtgatagatccagagatggctcgaaattcttacaccattcagtctatagtcatgtttgccaatctggcatcaagatgcgttcgtactgagagtaatgaaagaccttcaatcgtagaatgtataaaagaactcctaatgattatctatacaaattcaaaaggcttgggaatggttatgcatagtttgagaatgatctagtgaaatcacaagtttagacattggaattatgatgatttcttgatgagaataaaaagtgaactccaaaagtgatcagtacaaagcac

SEQ ID NO: 58527 - protein, 363 aa, Glycine max
  peptide (1)..(363): Ceres Seq. ID no. 15171509
MPFGLVSLSAWNKRRRSKSQDHTDPWVYKPAQLWQLEDQTPRPTKRLHGSSVYTLKEMEEATCSFSDENLLGKGGFGKVYRGTLRSGEVVAIKKMELPAIKAAEGEREFRVEVDILSRLDHPNLVSLIGYCADGKHRFLVYEYMRKGNLQDHLNGIGERNMDWPRRLQVALGAAKGLAYLHSSSDVGIPIVHRDFKSTNILLDDNFEAKISDFGLAKLMPEGQETHVTARVLGTFGYFDPEYTSTGKLTLQSDVYAFGVVLLELLTGRRAVDLNQGPNDQNLVLQVRHILHDRKKLRKVIDPEMARNSYTIQSIVMFANLASRCVRTESNERPSIVECIKELLMIIYTNSKGLGMVMHSLRMI

SEQ ID NO: 58528 - protein, 306 aa, Glycine max
  peptide (1)..(306): Ceres Seq. ID no. 15171510
MEEATCSFSDENLLGKGGFGKVYRGTLRSGEVVAIKKMELPAIKAAEGEREFRVEVDILSRLDHPNLVSLIGYCADGKHRFLVYEYMRKGNLQDHLNGIGERNMDWPRRLQVALGAAKGLAYLHSSSDVGIPIVHRDFKSTNILLDDNFEAKISDFGLAKLMPEGQETHVTARVLGTFGYFDPEYTSTGKLTLQSDVYAFGVVLLELLTGRRAVDLNQGPNDQNLVLQVRHILHDRKKLRKVIDPEMARNSYTIQSIVMFANLASRCVRTESNERPSIVECIKELLMIIYTNSKGLGMVMHSLRMI

SEQ ID NO: 58529 - protein, 269 aa, Glycine max
  peptide (1)..(269): Ceres Seq. ID no. 15171511
MELPAIKAAEGEREFRVEVDILSRLDHPNLVSLIGYCADGKHRFLVYEYMRKGNLQDHLNGIGERNMDWPRRLQVALGAAKGLAYLHSSSDVGIPIVHRDFKSTNILLDDNFEAKISDFGLAKLMPEGQETHVTARVLGTFGYFDPEYTSTGKLTLQSDVYAFGVVLLELLTGRRAVDLNQGPNDQNLVLQVRHILHDRKKLRKVIDPEMARNSYTIQSIVMFANLASRCVRTESNERPSIVECIKELLMIIYTNSKGLGMVMHSLRMI

SEQ ID NO: 58530 - DNA, 1423 bp, Glycine max
  misc_feature (1)..(1423): Ceres Seq. ID no. 15170741
agttaatgaagtgatagcccttgcagacagtggatttactagggatgaaatttgttcggaaccccaacaaaaagggatggttgcctcattggatactgaagaaaaatcaagtgaaacaatgggtagaaaattctctgaaccaaggcagcaacaagaaagtcctattttaaaaggaaaccttgactgtgttagggagtgttctacgtctgttgagggtaacttatcaagtccgggaacaagtaaaactggagagagaagacgggttaaagcagagaaaactataactttgcaagttcttagacaatattttgctggaagcctaaaagatgctgccaagaatattggtgtttgtactacaactttgaaaaggatctgccggcagcatgggataaagcgttggccttctcgaaagatcaaaaaggttggccactccttacaaaaacttcaacttgtcatcgactcggttcaaggtgcctctggtgcatttcaaatcaattccttctattcaaacttcccggatctagcttctccaaatttatcaggaactggcttcttctcaactttgaatcaaagtgataatccaaactcaacaagcacgcagcctgaacatggctcattgagcccagaaggtgcatcaaaatcaccctcttcgtcgagcagccagagttccatttcaagccattcctgctctagcatgtcagagctacaacagcagcacacaactaacattgccagtgacaaagatcctgccacggttggtgaatattctgctgatgttgtgttgaagttgatcagaaacgaggcaaagcttaaaagccttagtcaagatagagcaaagctcttgccaagatcactgagccaggaaacacttggtgaacacccgaaaactcagtatcaactgcctttattgaaaaccagtagcagcaaggtggattctcacagagtaaaagtcacatatggagatgagaaaacccggtttcggatgctgaaaaattgggtctatgaagatcttctgcaggaaattggtaggaaatttaatgtgagtgacatgagcaaatttgatgtcaaatacttggatgatgattgtgagtggatactactcacttgtgatgctgatttagaggagtgcattgatgtttgtcaatcttccgagagtggtaccatcaaacttagtctacaaccttctagtcatagtgtgagaagttttttagaatttagataacagattgattgtaaattataagatctttgtcatgtatgtgaagcagtcttagaaaaggcacaattatttttttgtgaaaaaaattattattttggcagaatgtaaggataaacttttgcttatccttgtgctccaagcaataagcaaattcagcttttgtttgattggtataatataataccatttgtgcaattgaattct

SEQ ID NO: 58531 - protein, 406 aa, Glycine max
  peptide (1)..(406): Ceres Seq. ID no. 15170742
VNEVIALADSGFTRDEICSEPQQKGMVASLDTEEKSSETMGRKFSEPRQQQESPILKGNLDCVRECSTSVEGNLSSPGTSKTGERRRVKAEKTITLQVLRQYFAGSLKDAAKNIGVCTTTLKRICRQHGIKRWPSRKIKKVGHSLQKLQLVIDSVQGASGAFQINSFYSNFPDLASPNLSGTGFFSTLNQSDNPNSTSTQPEHGSLSPEGASKSPSSSSSQSSISSHSCSSMSELQQQHTTNIASDKDPATVGEYSADVVLKLIRNEAKLKSLSQDRAKLLPRSLSQETLGEHPKTQYQLPLLKTSSSKVDSHRVKVTYGDEKTRFRMLKNWVYEDLLQEIGRKFNVSDMSKFDVKYLDDDCEWILLTCDADLEECIDVCQSSESGTIKLSLQPSSHSVRSFLEFR

SEQ ID NO: 58532 - protein, 381 aa, Glycine max
  peptide (1)..(381): Ceres Seq. ID no. 15170743
MVASLDTEEKSSETMGRKFSEPRQQQESPILKGNLDCVRECSTSVEGNLSSPGTSKTGERRRVKAEKTITLQVLRQYFAGSLKDAAKNIGVCTTTLKRICRQHGIKRWPSRKIKKVGHSLQKLQLVIDSVQGASGAFQINSFYSNFPDLASPNLSGTGFFSTLNQSDNPNSTSTQPEHGSLSPEGASKSPSSSSSQSSISSHSCSSMSELQQQHTTNIASDKDPATVGEYSADVVLKLIRNEAKLKSLSQDRAKLLPRSLSQETLGEHPKTQYQLPLLKTSSSKVDSHRVKVTYGDEKTRFRMLKNWVYEDLLQEIGRKFNVSDMSKFDVKYLDDDCEWILLTCDADLEECIDVCQSSESGTIKLSLQPSSHSVRSFLEFR

SEQ ID NO: 58533 - protein, 367 aa, Glycine max
  peptide (1)..(367): Ceres Seq. ID no. 15170744
MGRKFSEPRQQQESPILKGNLDCVRECSTSVEGNLSSPGTSKTGERRRVKAEKTITLQVLRQYFAGSLKDAAKNIGVCTTTLKRICRQHGIKRWPSRKIKKVGHSLQKLQLVIDSVQGASGAFQINSFYSNFPDLASPNLSGTGFFSTLNQSDNPNSTSTQPEHGSLSPEGASKSPSSSSSQSSISSHSCSSMSELQQQHTTNIASDKDPATVGEYSADVVLKLIRNEAKLKSLSQDRAKLLPRSLSQETLGEHPKTQYQLPLLKTSSSKVDSHRVKVTYGDEKTRFRMLKNWVYEDLLQEIGRKFNVSDMSKFDVKYLDDDCEWILLTCDADLEECIDVCQSSESGTIKLSLQPSSHSVRSFLEFR

SEQ ID NO: 58534 - DNA, 1849 bp, Glycine max
  misc_feature (1)..(1849): Ceres Seq. ID no. 15176273
aaaacaaaatacaataaatttggtaaagggcaatggcactttaaagggaagaaagcaccacctgaaaccagaagtggaaagtgctcctaacattagattagaccctctaccatgctcctctgcctctgaagtctgaacctcccacaggaatggcaatggagaagacaacattgtttgtgttgttgctgaatgtgcttgtgttcagtgcctctcttgtgtcctcggagcaaagtcatgtctcagctgtaggggacccaggaatgcagagagatggtctgagggtggcctttgaggcttggaacttctgcaatgaagttggtcaagaagctcctcacatgggtagtccaagagctgctgattgttttgatctttcaggttctctgactcacaaggtcacagaagctgataacagacttggggtgggggactcatttcctggtttaaaaccagaaaatatcaacaacacagacctttatgcaattgaaaaggaattgtatttgggttctttatgtgaagttgcagacaccccaaggccttggcagttttggatggtaatgctgaaaaatggtaactatgacaccaggtcggggttatgtcctcaggacgggaaaaaggtacccccttttagcccgggaaggtttccttgttttggacaagggtgcatgaatcaacccatcttgtgtcatcaatggacacagctcaaagatggcacaatgcaaggggggttcagtggtacttatgatttggattctggttgtggaggtgaacacgatggtgtgtcttactatgaggtagtttgggagaagaaagttaatgttgggagttgggtgttcaaacacaaactaaggacttcaaagaagtacccttggttgatgttgtaccttagagctgatgcaaccaaaggattctctggaggttaccattatgacactaggggaatgctaaaaactcttccaaagtcaccaaatttcaaggtgaggttgagcttggatatcaagaaggggggaggggccaagagccagttctatctgttagacattggaagctgctggaagaacaatggtgctccttgtgatggagatgtactcactgatgtcactagatatagtgagatgatcataaaccctgaaaccccagcttggtgcagccccaaaggcttggttaactgtccaccatttcacatcactccagacaacaaaaaaatatacagaaatgacacagccaatttcccctactcagcatatcactactactgtgctcctgggaatgctcaacacttggagcaaccagtgagcacttgtgatccttacagcaatcctcatgctcaagagatagttcagttgcttcctcaccctacttggggtgagtatggctatcccaccaaaaaaggtgatggttgggtgggggatgcaaggacttgggagcttgatgttggagggctatcaagtagactctacttttatcaggacccaggcactcctcctgccaagagaatatggacatctattgattctggtactgagatatttgttagtgacaaagatgaagaagcagagtggactcttagtgactttgacgtcattctaacacaatcagggaccaacttgatgaacaaggctgagagaaagaagtaaggaatattgataatggactaaacttttgggattttagatagtccaccaagtgtaggcttttaaatcataggcgttacagacacatttacacgaaaataattttcattggtcaaatcctgatcataggatcttgagttgtgcatgtttggactgtaatttgcacattccaaatcttagtttggagattgtgaatgttacatccacaaaataacgtc

SEQ ID NO: 58535 - protein, 494 aa, Glycine max
  peptide (1)..(494): Ceres Seq. ID no. 15176274
MAMEKTTLFVLLLNVLVFSASLVSSEQSHVSAVGDPGMQRDGLRVAFEAWNFCNEVGQEAPHMGSPRAADCFDLSGSLTHKVTEADNRLGVGDSFPGLKPENINNTDLYAIEKELYLGSLCEVADTPRPWQFWMVMLKNGNYDTRSGLCPQDGKKVPPFSPGRFPCFGQGCMNQPILCHQWTQLKDGTMQGGFSGTYDLDSGCGGEHDGVSYYEVVWEKKVNVGSWVFKHKLRTSKKYPWLMLYLRADATKGFSGGYHYDTRGMLKTLPKSPNFKVRLSLDIKKGGGAKSQFYLLDIGSCWKNNGAPCDGDVLTDVTRYSEMIINPETPAWCSPKGLVNCPPFHITPDNKKIYRNDTANFPYSAYHYYCAPGNAQHLEQPVSTCDPYSNPHAQEIVQLLPHPTWGEYGYPTKKGDGWVGDARTWELDVGGLSSRLYFYQDPGTPPAKRIWTSIDSGTEIFVSDKDEEAEWTLSDFDVILTQSGTNLMNKAERKK

SEQ ID NO: 58536 - protein, 492 aa, Glycine max
  peptide (1)..(492): Ceres Seq. ID no. 15176275
MEKTTLFVLLLNVLVFSASLVSSEQSHVSAVGDPGMQRDGLRVAFEAWNFCNEVGQEAPHMGSPRAADCFDLSGSLTHKVTEADNRLGVGDSFPGLKPENINNTDLYAIEKELYLGSLCEVADTPRPWQFWMVMLKNGNYDTRSGLCPQDGKKVPPFSPGRFPCFGQGCMNQPILCHQWTQLKDGTMQGGFSGTYDLDSGCGGEHDGVSYYEVVWEKKVNVGSWVFKHKLRTSKKYPWLMLYLRADATKGFSGGYHYDTRGMLKTLPKSPNFKVRLSLDIKKGGGAKSQFYLLDIGSCWKNNGAPCDGDVLTDVTRYSEMIINPETPAWCSPKGLVNCPPFHITPDNKKIYRNDTANFPYSAYHYYCAPGNAQHLEQPVSTCDPYSNPHAQEIVQLLPHPTWGEYGYPTKKGDGWVGDARTWELDVGGLSSRLYFYQDPGTPPAKRIWTSIDSGTEIFVSDKDEEAEWTLSDFDVILTQSGTNLMNKAERKK

SEQ ID NO: 58537 - protein, 457 aa, Glycine max
  peptide (1)..(457): Ceres Seq. ID no. 15176276
MQRDGLRVAFEAWNFCNEVGQEAPHMGSPRAADCFDLSGSLTHKVTEADNRLGVGDSFPGLKPENINNTDLYAIEKELYLGSLCEVADTPRPWQFWMVMLKNGNYDTRSGLCPQDGKKVPPFSPGRFPCFGQGCMNQPILCHQWTQLKDGTMQGGFSGTYDLDSGCGGEHDGVSYYEVVWEKKVNVGSWVFKHKLRTSKKYPWLMLYLRADATKGFSGGYHYDTRGMLKTLPKSPNFKVRLSLDIKKGGGAKSQFYLLDIGSCWKNNGAPCDGDVLTDVTRYSEMIINPETPAWCSPKGLVNCPPFHITPDNKKIYRNDTANFPYSAYHYYCAPGNAQHLEQPVSTCDPYSNPHAQEIVQLLPHPTWGEYGYPTKKGDGWVGDARTWELDVGGLSSRLYFYQDPGTPPAKRIWTSIDSGTEIFVSDKDEEAEWTLSDFDVILTQSGTNLMNKAERKK

SEQ ID NO: 58538 - DNA, 1597 bp, Glycine max
  misc_feature (1)..(1597): Ceres Seq. ID no. 14308615
aaaaaaaaaaaaaaagtctacacactactatgatgtatctaacattctaaatttctaactttcctctctctctctctctctctccgaggtcttagatctctgctctgtctctatctctacttgaggcctttccctctgttccgttggcgggtgggtctttcttctctcaaaatggccaccggagtgaccagaaaaatttctgctgcatcagctcgggcccacaccagaagggcgaagaaaaccaattctctaccccttccttcaggaattcttggaacagcactagcagtgttgtttattgggtttctagcatgggcttatcaggttattcaacctccccctcccaagatatgcggcactcctgatggaccacctataacagcaccaagaatcaaattaagagacggaaggcatttggcatacaaagagcatggtgttccaaaagatgcagccaagtataaaatcatctctgtacatggttttaatagttgcaggcatgatgctgtgattgccgataccctatcaccggatgttgttgaggagctggggatctacattgtatctttcgacagacctggttatggggaaagtgatcctgatccaaatcgtacactaaaaagcattgctctagatatacaagagcttgcagatcagctgggattgggctccaaattctatgtagttggtgtctccatgggtggacaagttgtttggaactgccttaagtacatacctcacaggctgacaggtgcagtacttgtcgccccagttgtcaactactggtggcctggtctacctgcaaacttaactactgaagcctatgaccaacaaaaattacaagaccaatgggcacttcgtgttgctcactacgtaccatggctaacttactggtggaacactcagcgatggttcccaggatctagtgtaattgctcatagtccacatatcttttctcatcaagacaaagaacttctgcctaagttgttgtccgatagaaagagttatgcggcacaggtaatacagcaaggtgattatgaaaccatccacctcgacataaatattggatttggtaactgggaatatagtccccttgatcttgaaaacccatttccaaataacgaaggctctgtccatctttggcaaggagatgaggatatgatggttccagttacactgcaacgatacatagcacaaaaccttccatggattaactatcatgaactccaaggttctggtcacatttttgctcatgctgatggtatgagtgatactatcatcaagtcacttttacgtgcgaagtaggcttcttttatgttagttactgtctgtgagaagttggcggcttctatattggttacggtctatctcaggtcagtttcagcatttaatatctcagttttggaggattcaaactgttgaacagaatgatgtatgatcaactttgaacaacattgtgtacacttaatggtagggagaattcaattactcaataattgtatgaactatattcttttgtgtgggaagttgtttaacagaaattggcttgtttaagttactctgaagctgacactatggcgatgagtagcactatttttgc

SEQ ID NO: 58539 - protein, 376 aa, Glycine max
  peptide (1)..(376): Ceres Seq. ID no. 14308616
MATGVTRKISAASARAHTRRAKKTNSLPLPSGILGTALAVLFIGFLAWAYQVIQPPPPKICGTPDGPPITAPRIKLRDGRHLAYKEHGVPKDAAKYKIISVHGFNSCRHDAVIADTLSPDVVEELGIYIVSFDRPGYGESDPDPNRTLKSIALDIQELADQLGLGSKFYVVGVSMGGQVVWNCLKYIPHRLTGAVLVAPVVNYWWPGLPANLTTEAYDQQKLQDQWALRVAHYVPWLTYWWNTQRWFPGSSVIAHSPHIFSHQDKELLPKLLSDRKSYAAQVIQQGDYETIHLDINIGFGNWEYSPLDLENPFPNNEGSVHLWQGDEDMMVPVTLQRYIAQNLPWINYHELQGSGHIFAHADGMSDTIIKSLLRAK

SEQ ID NO: 58540 - protein, 202 aa, Glycine max
  peptide (1)..(202): Ceres Seq. ID no. 14308617
MGGQVVWNCLKYIPHRLTGAVLVAPVVNYWWPGLPANLTTEAYDQQKLQDQWALRVAHYVPWLTYWWNTQRWFPGSSVIAHSPHIFSHQDKELLPKLLSDRKSYAAQVIQQGDYETIHLDINIGFGNWEYSPLDLENPFPNNEGSVHLWQGDEDMMVPVTLQRYIAQNLPWINYHELQGSGHIFAHADGMSDTIIKSLLRAK

SEQ ID NO: 58541 - DNA, 2112 bp, Glycine max
  misc_feature (1)..(2112): Ceres Seq. ID no. 14308618
gaccttgtgttgtttcagattgcatttgcagatagattgaatgttgtgaacaaacaatgggttcatccaaggccttatgcagtgtttctctgctccatttgttcatagtggtttgccttgtcttccaatgctttgctactaaaaaccatgctgacctgaccacaactctaactgtgaatgcttctgatgcatctggaaagccaataccagagacactttttggcatattctttgaggagattaatcatgctggagctgggggattgtgggctgagcttgtgagcaacagaggatttgaagctggcggtcctaacactccttcaaatattgatccttggtcaattattggaaatgaatcattgataaatgttgaaactgatcgtacctcttgctttgaccgtaataaggttgcacttcgattggaggtatcatgtgacagcgaaggtgacaacatctgcccagctgatggtgttggtgtttataatcctggtttctggggcatgaatattgagcaagggaagaaatacaaagtggtcttctatgttcgttcaactgaatcacttaatctaacagtttcattgactggatccaatggtgtaggaaacctggcttcatctgtgatcacaggttctgcacttgatttttcaaactggacaaaggtggagaagatactggttgccaaggcaacagataataactcaagacttcaattaacaaccaccaccaaaggtgtgatatggttggaccaagtgtctgctatgccactggacacatataagggacatggtttccgaactgaccttgttgaaatgctgacagctttgaaaccaagatttatcagatttccgggcggttgttttgttgaaggagaatggttaagaaatgcatttcgatggaaaacatccattggaccatgggaggagagacctgggcactttggtgatgtttggatgtactggactgatgatggacttggttattatgagtttctccaacttgcagaggacttgggtgcttcaccaatatgggtatttaataatggtgtcagtcataatgatcaagttgatacatcggcggtcttacctcttgtgcaagaagcccttgatggaattgagttcgcgagaggtgatcccacttcaaaatggggttcccttagagctgctatgggacatcctgagccatttgacctcagatatgttgctgttgggaatgaagattgtggaaaaaagaattatcgaggaaactacctgaaattctatagtgcaataaaaagtgcttatccagatatccaaattatctcaaactgtgatggttcttctcgacctttagatcatccagctgatatgtatgattatcatgtttatacaaatgcgaatgacatgttttatagagctaacacatttgatcatacatcacgaaatggtccaaaggcttttgtaagtgagtatgccgtgactggaaaagatgctgggacaggaagcctcttggcagccctagctgaagctggcttcctaattggactggaaaagaacagtgatgttatccaaatggccagctatgctccactttttgttaatgccaatgataggaggtggaacctggatgcaattgtattcaactcctttcagctctatggaactcctagctattgggtgcaactatttttctcagagtcaagtggagcaacacttctaagtacatcacttcaagcaccttcctcaaattcacttgttgcatcagcaattacatttcaaaattctgtagataagaaaaattacatacgaataaaggttgtgaacttcggtaccactgccgtgaacctcaaaatctctcttgatggactggaaccaaactcattgcagttatctgggtcaacaaagactgtgcttacatctgcaaatgtaatggatgagaactccttctcacagccaaagaaggtggtgccaatccaaagtctacttcagaatgttgagaaggacatgaatgtcacagtcccacctcgttcgttcacatcatttgatctgctgaaacaatccagtaatttgaagatggcagggagcgattcttccacgtggtcttctatttaacgttattaaaaatttgaccaaaagc

SEQ ID NO: 58542 - protein, 676 aa, Glycine max
  peptide (1)..(676): Ceres Seq. ID no. 14308619
MGSSKALCSVSLLHLFIVVCLVFQCFATKNHADLTTTLTVNASDASGKPIPETLFGIFFEEINHAGAGGLWAELVSNRGFEAGGPNTPSNIDPWSIIGNESLINVETDRTSCFDRNKVALRLEVSCDSEGDNICPADGVGVYNPGFWGMNIEQGKKYKVVFYVRSTESLNLTVSLTGSNGVGNLASSVITGSALDFSNWTKVEKILVAKATDNNSRLQLTTTTKGVIWLDQVSAMPLDTYKGHGFRTDLVEMLTALKPRFIRFPGGCFVEGEWLRNAFRWKTSIGPWEERPGHFGDVWMYWTDDGLGYYEFLQLAEDLGASPIWVFNNGVSHNDQVDTSAVLPLVQEALDGIEFARGDPTSKWGSLRAAMGHPEPFDLRYVAVGNEDCGKKNYRGNYLKFYSAIKSAYPDIQIISNCDGSSRPLDHPADMYDYHVYTNANDMFYRANTFDHTSRNGPKAFVSEYAVTGKDAGTGSLLAALAEAGFLIGLEKNSDVIQMASYAPLFVNANDRRWNLDAIVFNSFQLYGTPSYWVQLFFSESSGATLLSTSLQAPSSNSLVASAITFQNSVDKKNYIRIKVVNFGTTAVNLKISLDGLEPNSLQLSGSTKTVLTSANVMDENSFSQPKKVVPIQSLLQNVEKDMNVTVPPRSFTSFDLLKQSSNLKMAGSDSSTWSSI

SEQ ID NO: 58543 - protein, 528 aa, Glycine max
  peptide (1)..(528): Ceres Seq. ID no. 14308620
MNIEQGKKYKVVFYVRSTESLNLTVSLTGSNGVGNLASSVITGSALDFSNWTKVEKILVAKATDNNSRLQLTTTTKGVIWLDQVSAMPLDTYKGHGFRTDLVEMLTALKPRFIRFPGGCFVEGEWLRNAFRWKTSIGPWEERPGHFGDVWMYWTDDGLGYYEFLQLAEDLGASPIWVFNNGVSHNDQVDTSAVLPLVQEALDGIEFARGDPTSKWGSLRAAMGHPEPFDLRYVAVGNEDCGKKNYRGNYLKFYSAIKSAYPDIQIISNCDGSSRPLDHPADMYDYHVYTNANDMFYRANTFDHTSRNGPKAFVSEYAVTGKDAGTGSLLAALAEAGFLIGLEKNSDVIQMASYAPLFVNANDRRWNLDAIVFNSFQLYGTPSYWVQLFFSESSGATLLSTSLQAPSSNSLVASAITFQNSVDKKNYIRIKVVNFGTTAVNLKISLDGLEPNSLQLSGSTKTVLTSANVMDENSFSQPKKVVPIQSLLQNVEKDMNVTVPPRSFTSFDLLKQSSNLKMAGSDSSTWSSI

SEQ ID NO: 58544 - protein, 442 aa, Glycine max
  peptide (1)..(442): Ceres Seq. ID no. 14308621
MPLDTYKGHGFRTDLVEMLTALKPRFIRFPGGCFVEGEWLRNAFRWKTSIGPWEERPGHFGDVWMYWTDDGLGYYEFLQLAEDLGASPIWVFNNGVSHNDQVDTSAVLPLVQEALDGIEFARGDPTSKWGSLRAAMGHPEPFDLRYVAVGNEDCGKKNYRGNYLKFYSAIKSAYPDIQIISNCDGSSRPLDHPADMYDYHVYTNANDMFYRANTFDHTSRNGPKAFVSEYAVTGKDAGTGSLLAALAEAGFLIGLEKNSDVIQMASYAPLFVNANDRRWNLDAIVFNSFQLYGTPSYWVQLFFSESSGATLLSTSLQAPSSNSLVASAITFQNSVDKKNYIRIKVVNFGTTAVNLKISLDGLEPNSLQLSGSTKTVLTSANVMDENSFSQPKKVVPIQSLLQNVEKDMNVTVPPRSFTSFDLLKQSSNLKMAGSDSSTWSSI

SEQ ID NO: 58545 - DNA, 1530 bp, Glycine max
  misc_feature (1)..(1530): Ceres Seq. ID no. 15177965
aagattttcttggacgtgttagaaaatacagtagccgttgaccaaaaccaacaaaaaaaaaaatagtattatatgaacgtgaaccagcgtcacaaagaagtttgtgagcataaagaaacatctcaatctcaaaagaagcatctcgtgtattgtctcttaaaaacaatggaattgatgtgccattgttcgagctttcttcttccgccggagaatcctaacacgacgtgttcgctttctctaaagtacgctctcgttgttctcaaccaaagcctaccgagatttgctcctctgctctgggaccacgctcaagtacgagtttgcgctgatggaggtgccaatagggtgtatgatgaaatgcctcttttcttccctcatcaacaaccttcccatgttcgcaccaggtacaagcctgatgtaattaaaggagacatggattcaatcaggacagaagtacttgacttctatgcaaagctgggaactaagataattgatgagtctcatgatcaggacaccacagatttacacaaatgtgtggcatacatacgtgacctcaccccaaatgttgatggatcagaactatgcattcttgttgctggagcacttggtgggagattcgaccatgagattggaaatattaatgtgctgtgccgattttccaacacacgaattatccttctatctgatgattgcctcattcatcttcttccaaagaatcattgtcatcaaatctttattgaatcttctgttgagggtccgcattgtggactcattcccattgggatgccttctggaagctctacatccacaggactcaaatgggatctcaatgacacagcgatgagttttggaggtttagtaagtacatccaatattgtaaaaggggaaatagttacagtacagtctgattcagatcttctttggactatttctattaagaagctcgaggttttacatggtgcatagtgcggtgatttttcagatcttcaataccaatttatatgggccctatattccagttaaaagccagagcttctgctgacctttataactttacgtttcattctttcaatttactctgaattatgggagggtggaagggaattaggaaattattctttaaattaggaagttctattcctagtaactgtgccttgaaagtcagttttcaaaaggctacttacattccttggctcagttgtattgtatgttattgttatccgtaaatgaaatagcaggaataagatgagcaagaaaaagaaggagaaaaccatgtcatgtactattgcttatgcatacagaacagttactgtcaattgaaatggttaatggattgttagttgccactctacactgcaggaccatgacgggtcaataattctggttaatatctagtatgtgattagtgatatggatttttgaattagaagaatgagttgaaatttgattatacattgtaacgggagtaattattatatgtgagacgggtttttcaatttacaagaacgagttaataaaatttgattatgcagg

SEQ ID NO: 58546 - protein, 296 aa, Glycine max
  peptide (1)..(296): Ceres Seq. ID no. 15177966
MNVNQRHKEVCEHKETSQSQKKHLVYCLLKTMELMCHCSSFLLPPENPNTTCSLSLKYALVVLNQSLPRFAPLLWDHAQVRVCADGGANRVYDEMPLFFPHQQPSHVRTRYKPDVIKGDMDSIRTEVLDFYAKLGTKIIDESHDQDTTDLHKCVAYIRDLTPNVDGSELCILVAGALGGRFDHEIGNINVLCRFSNTRIILLSDDCLIHLLPKNHCHQIFIESSVEGPHCGLIPIGMPSGSSTSTGLKWDLNDTAMSFGGLVSTSNIVKGEIVTVQSDSDLLWTISIKKLEVLHGA

SEQ ID NO: 58547 - protein, 265 aa, Glycine max
  peptide (1)..(265): Ceres Seq. ID no. 15177967
MELMCHCSSFLLPPENPNTTCSLSLKYALVVLNQSLPRFAPLLWDHAQVRVCADGGANRVYDEMPLFFPHQQPSHVRTRYKPDVIKGDMDSIRTEVLDFYAKLGTKIIDESHDQDTTDLHKCVAYIRDLTPNVDGSELCILVAGALGGRFDHEIGNINVLCRFSNTRIILLSDDCLIHLLPKNHCHQIFIESSVEGPHCGLIPIGMPSGSSTSTGLKWDLNDTAMSFGGLVSTSNIVKGEIVTVQSDSDLLWTISIKKLEVLHGA

SEQ ID NO: 58548 - protein, 262 aa, Glycine max
  peptide (1)..(262): Ceres Seq. ID no. 15177968
MCHCSSFLLPPENPNTTCSLSLKYALVVLNQSLPRFAPLLWDHAQVRVCADGGANRVYDEMPLFFPHQQPSHVRTRYKPDVIKGDMDSIRTEVLDFYAKLGTKIIDESHDQDTTDLHKCVAYIRDLTPNVDGSELCILVAGALGGRFDHEIGNINVLCRFSNTRIILLSDDCLIHLLPKNHCHQIFIESSVEGPHCGLIPIGMPSGSSTSTGLKWDLNDTAMSFGGLVSTSNIVKGEIVTVQSDSDLLWTISIKKLEVLHGA

SEQ ID NO: 58549 - DNA, 1238 bp, Glycine max
  misc_feature (1)..(1238): Ceres Seq. ID no. 14308084
ggtgcccttcattcctatcaattatcaaacagcttcggtgatcatcgtaactacctctacatttgtttgtttatcatttctttgctcgtatcaatgtctaacaccagcaacaatgtcgctggggtcgacaacacgttcagaagaaaatttgatcgagaagagtatctagaacgagcacgggagcgcgagagacaggaggaggagggtcgagcgaaacctaaagccaaaggtcctcccgtgcagaggaagcccttgaaacatagagattatgaagtggaccttgaatcccgcttgggcaagactcaggttgttacgccggttgcaccactaagtcagcaggctggatactactgctcagtttgtgagtgtgtggtgaaggactctgcaaactacttggatcatattaatggaaagaaacatcaaagagccttgggcatgtccatgcgagtagaacgtgcttctctccaacaggttcaggaacgatttgaagttcttaagaagcgtaaagatgttggcagcttcacagagcaagatcttgacgagcggattttaaaacagcagcaagaggaggaagaaagaaagcgactgcgtcgagaaaagaaaaaagaaaaggtagtgtctgtatagtcgtttaattttagttagaaataggcaataggtttgaataaaccttttttctatcctccctttaccttatcccactaccatcaagtacaattagtttttttaatgttatttacttattataactgctaataattgcatccatctttctaaaaatgatttttaatgttattttaataaacaaagattgcttttgtttttcacaacttagctaatagcatgtgttaaattttggattcagaaggagaaggcagttgaagaacctgaaattgatcctgatgttgctgccatgatggggtttggaggtttccggtcatccaacaagaaatgatagcattctgcatgcggaatgaactgcgtatgaaattttggaacaattattctgcaatgataagctgaaagattattctgtggagaatcgttaaatagttgggctgcggtatcttccagcctgattttgggtgtggcttaaagatttttctgtggagaatagttaaatagttgggctgctcaaacagtagtatgggtgctggtgcattgcgttatattcaatcatttgattcggttgattcatgtacatttcttctgatagctaacctgatgtattattatat

SEQ ID NO: 58550 - protein, 208 aa, Glycine max
  peptide (1)..(208): Ceres Seq. ID no. 14308085
GALHSYQLSNSFGDHRNYLYICLFIISLLVSMSNTSNNVAGVDNTFRRKFDREEYLERARERERQEEEGRAKPKAKGPPVQRKPLKHRDYEVDLESRLGKTQVVTPVAPLSQQAGYYCSVCECVVKDSANYLDHINGKKHQRALGMSMRVERASLQQVQERFEVLKKRKDVGSFTEQDLDERILKQQQEEEERKRLRREKKKEKVVSV

SEQ ID NO: 58551 - protein, 177 aa, Glycine max
  peptide (1)..(177): Ceres Seq. ID no. 14308086
MSNTSNNVAGVDNTFRRKFDREEYLERARERERQEEEGRAKPKAKGPPVQRKPLKHRDYEVDLESRLGKTQVVTPVAPLSQQAGYYCSVCECVVKDSANYLDHINGKKHQRALGMSMRVERASLQQVQERFEVLKKRKDVGSFTEQDLDERILKQQQEEEERKRLRREKKKEKVVSV

SEQ ID NO: 58552 - DNA, 421 bp, Glycine max
  misc_feature (1)..(421): Ceres Seq. ID no. 15226489
accgggccccccctcgagtcagctacgtaggccccccccccttttgagaagtttgtggaccttgcaatggagtgtgttgaagattcaggagctgacaggcccgcaatgagtgatgtggttaaagaaattgaagacatgttgcagtctgttggtatgcacctaacatctgaatcagtaacatccacaacatctagtcatagatatcaggaggtaagtatagtgagtttccatctggaccaaccttacagcaatgagtcctttggttcaagtgcagaacatattcaaaaattgaacctagttagttaagttagtcttttttctcaagattgaagtcaagagagacttgtttattagtatttcttggccaaaacacagaaaagtagaaattgtggaatttagagtttgtggctgtgagcttcag

SEQ ID NO: 58553 - protein, 79 aa, Glycine max
  peptide (1)..(79): Ceres Seq. ID no. 15226490
MECVEDSGADRPAMSDVVKEIEDMLQSVGMHLTSESVTSTTSSHRYQEVSIVSFHLDQPYSNESFGSSAEHIQKLNLVS

SEQ ID NO: 58554 - protein, 66 aa, Glycine max
  peptide (1)..(66): Ceres Seq. ID no. 15226491
MSDVVKEIEDMLQSVGMHLTSESVTSTTSSHRYQEVSIVSFHLDQPYSNESFGSSAEHIQKLNLVS

SEQ ID NO: 58555 - protein, 56 aa, Glycine max
  peptide (1)..(56): Ceres Seq. ID no. 15226492
MLQSVGMHLTSESVTSTTSSHRYQEVSIVSFHLDQPYSNESFGSSAEHIQKLNLVS

SEQ ID NO: 58556 - DNA, 1039 bp, Glycine max
  misc_feature (1)..(1039): Ceres Seq. ID no. 14313391
aacaattcaagaaaactaatcatgaacttgaggtttgtgatagggatatagccaatgtgcttgtgtgaatgcttattctggaaattaaggtttaatttttaactgaccaattatttcaaatcactttgtaagtgctttacctttctgcaatcatgtttatctttcccccttacaactgggagctgtaaaggggattgtaggtctcaaagatacttaatggaaatataaaaaactgagtttaatttattacttgtatgggagaatatgtgcatgctgttgctttggttcttgggagtttttcctttatagaattcccattctcattggttttctttctcaatcatttttcctcaacagtcaacatctgctctataacgggcatatggctccatccttctattgatggttccattgattctttatggcaggaaacgtttatttagcttgatcaatgatcttcctactgtttttgaagttgtgactgagaggaagccagtaaaggacaagcccactgcagacagtggaagcaagtctagaggcagcaccaagagatcaagtgatgggcaagttaagagcaacccaaagtttgcagatgatggttatgaagacgaggatgatgagcacagtgaaaccctttgtgggagctgtggcggaaattacaatgcagatgaattttggattggctgcgatatatgtgagaggtggttccatgggaaatgtgtgaagatcactcctgcaaaagctgagagcataaagcaatacaaatgtccatcatgcagcttgaggcgaggcaggccctaagccgaaggcaaaatgtgaagtgaataatgctgtttcatggccgacaaagatactgtaatattgttgtatcttttatagaagttcttgtaaacggtatagtatctatgtctgatcataatctttcagattaagttaatttcttctaccaagattaatcatcagtgtatgttatataattttatagaatagaattctatacattttatttttgtctattaatctatattttgcttgaatt

SEQ ID NO: 58557 - protein, 132 aa, Glycine max
  peptide (1)..(132): Ceres Seq. ID no. 14313392
MVPLILYGRKRLFSLINDLPTVFEVVTERKPVKDKPTADSGSKSRGSTKRSSDGQVKSNPKFADDGYEDEDDEHSETLCGSCGGNYNADEFWIGCDICERWFHGKCVKITPAKAESIKQYKCPSCSLRRGRP

SEQ ID NO: 58558 - DNA, 1260 bp, Glycine max
  misc_feature (1)..(1260): Ceres Seq. ID no. 13594193
gatcatccactacttgtagctattagcttataacagagagagagagagagagagagagagagagggagagatcacatttcctgaactataagctatatagcacttccataatcttacaacaatggaggggaccagcagccaaagcacgtttgccttcatccctagcacaattgagacaccaagtccaagcatccctgagatatcatcatcatcttcccctggctctcttgcaagaattgcacaaagttaccctcccggctttcccagaaaggtgttagcggagattatagggacatttttgttggtgtttgtgggaagtggttctgctgggctaagcaagattgatgagaggatggtgtcaaagcttggagcatcacttgcaggaggactcatagtgacggtcatgatatactcaattggacacatatcaggggcacacatgaatcccgcggtttctcttgctttcaccgccgtcaggcatcttccttggccacagctcccattttatatagcagctcaactcactggtgccatttctgcttcatacacattgcgagagctgttacgaccatcaaatgagattggaggaacatcacctgctggatcacacattcaagccctaatcatggaaatggtgaccacatataccatggtgttcatttccatggccgtggccactgactcaaacgcgacaggacagctatcaggagtagcagtaggttcttctgtttgcatagcaagcattgtagccggaccaatatcagggggatcaatgaatccagcaaggacattaggtcctgcaattgcgacatcatactacaagggactttgggtatattttgttggacctattactggggcggttttagcagcttggtcttacaatgtgattagggacactgaacaccctggttttcccatttcactatcctccatttcatccaaggtgcgccaaagcattggtggaactgaacaaaaaagcgaccaaagatgcttggtgtgaatgaaataataaacaacaatgttttttctgacaccacaccaccgcccaaatcaacatcaccttcaatttcttgtcttggaggatctcaagtttccacatgtattatcatgtatatgatcaaaaataccatgcctagatcatatggtattattagcttggccatgtatcgagttaatttcagggctatgagctagccatgtgtaatgcaaaagtgtgtagtgtgattttcctacattaatgaaatgtcagcttcatcc

SEQ ID NO: 58559 - protein, 293 aa, Glycine max
  peptide (1)..(293): Ceres Seq. ID no. 13594194
MEGTSSQSTFAFIPSTIETPSPSIPEISSSSSPGSLARIAQSYPPGFPRKVLAEIIGTFLLVFVGSGSAGLSKIDERMVSKLGASLAGGLIVTVMIYSIGHISGAHMNPAVSLAFTAVRHLPWPQLPFYIAAQLTGAISASYTLRELLRPSNEIGGTSPAGSHIQALIMEMVTTYTMVFISMAVATDSNATGQLSGVAVGSSVCIASIVAGPISGGSMNPARTLGPAIATSYYKGLWVYFVGPITGAVLAAWSYNVIRDTEHPGFPISLSSISSKVRQSIGGTEQKSDQRCLV

SEQ ID NO: 58560 - protein, 216 aa, Glycine max
  peptide (1)..(216): Ceres Seq. ID no. 13594195
MVSKLGASLAGGLIVTVMIYSIGHISGAHMNPAVSLAFTAVRHLPWPQLPFYIAAQLTGAISASYTLRELLRPSNEIGGTSPAGSHIQALIMEMVTTYTMVFISMAVATDSNATGQLSGVAVGSSVCIASIVAGPISGGSMNPARTLGPAIATSYYKGLWVYFVGPITGAVLAAWSYNVIRDTEHPGFPISLSSISSKVRQSIGGTEQKSDQRCLV

SEQ ID NO: 58561 - protein, 199 aa, Glycine max
  peptide (1)..(199): Ceres Seq. ID no. 13594196
MIYSIGHISGAHMNPAVSLAFTAVRHLPWPQLPFYIAAQLTGAISASYTLRELLRPSNEIGGTSPAGSHIQALIMEMVTTYTMVFISMAVATDSNATGQLSGVAVGSSVCIASIVAGPISGGSMNPARTLGPAIATSYYKGLWVYFVGPITGAVLAAWSYNVIRDTEHPGFPISLSSISSKVRQSIGGTEQKSDQRCLV

SEQ ID NO: 58562 - DNA, 1540 bp, Glycine max
  misc_feature (1)..(1540): Ceres Seq. ID no. 15170209
aaaaaacttaaattgaaaacagagtccttccttgtctgttatcactgtgtaagcagtgatcgattctgcgaactgcgattcgcatcgccaattcaaaagcgttcgttcgtcggagatggagacgctaccgacgacgacgacaaagcgaggaggagcgagatcgaagcccgttcagacctcgaaatcgtctctcgttatggccttcttctcctgcgtcgcgtggctctacgtcgccggaaggttatggcaagacgcagagaatcgcaatttactcgctagtcttctgaaaaagaattcagctcagaggcctaaggttcttacagtggaagataagttaatggtgcttgggtgcagggatctggagaggaggattgtggaagctgagatggaattgacattggctaagagccaagggtacctaaaggggcaaggccagagaagcggctcttctgatcgtaggcttcttgctgttatcggagtgtatactggatttgggagtaaattgaagagaaatgttttcagggggtcttggatgcccagaggtgatgccttgaaaaaacttgaagaaagaggagtggtcatacgttttgttattggtcggagtgctaatcgaggtgatagcttagatcgcaatattgacgaggaaaatcgcacaacaaaggatttcctgattcttgaaggtcatgaggaagctcaagaagagttgcctaaaaaagttaaaaccttcttcagtactgcagttcagaactgggatgctgacttttatgtaaaagttgatgatggcattgatattgatctcgagggtttaattgaacttcttgaccgtcgtcgtggtcaggatagggcatatgttggatgcatgaagtcaggagaagtgatatcagaagagggaaagccatggtatgaacctgattggtggaaatttggggatgaaaaatcgtatttccgacatgcggctggttcacttgttataatttcaaagaatttggcacaatacattaatataaacagtgtatctttgaagacatatgcctatgatgatacatcattgggatcatggatgatgggcgtccaagcaacttacatagatgacagtcggctttgctgcagtagtatcagacaagacaaggtatgctccttggcttgattggaggatcacaagcacattcttccctactcttatgggaactcacacaatttgtctgaaaatcagtatcagttgaacattatgttcactcttttcagttgcatactgccttgagagctttgtagacaatatcaatataattcctttctagatccagttatctgttcattcttttagatgctagcagcgaaattgagggataactactgattacggagttcagcccttggtgctcaattgctatttccgggggtgatatgattgtacttttactctgctattggatatacacaacttctgttgatgaccaaatattgaagagaaaaaaaaactatatacaaaatattgatgtattgaaccgctgacgaactaattgtagactttgttgcactg

SEQ ID NO: 58563 - protein, 343 aa, Glycine max
  peptide (1)..(343): Ceres Seq. ID no. 15170210
METLPTTTTKRGGARSKPVQTSKSSLVMAFFSCVAWLYVAGRLWQDAENRNLLASLLKKNSAQRPKVLTVEDKLMVLGCRDLERRIVEAEMELTLAKSQGYLKGQGQRSGSSDRRLLAVIGVYTGFGSKLKRNVFRGSWMPRGDALKKLEERGVVIRFVIGRSANRGDSLDRNIDEENRTTKDFLILEGHEEAQEELPKKVKTFFSTAVQNWDADFYVKVDDGIDIDLEGLIELLDRRRGQDRAYVGCMKSGEVISEEGKPWYEPDWWKFGDEKSYFRHAAGSLVIISKNLAQYININSVSLKTYAYDDTSLGSWMMGVQATYIDDSRLCCSSIRQDKVCSLA

SEQ ID NO: 58564 - protein, 316 aa, Glycine max
  peptide (1)..(316): Ceres Seq. ID no. 15170211
MAFFSCVAWLYVAGRLWQDAENRNLLASLLKKNSAQRPKVLTVEDKLMVLGCRDLERRIVEAEMELTLAKSQGYLKGQGQRSGSSDRRLLAVIGVYTGFGSKLKRNVFRGSWMPRGDALKKLEERGVVIRFVIGRSANRGDSLDRNIDEENRTTKDFLILEGHEEAQEELPKKVKTFFSTAVQNWDADFYVKVDDGIDIDLEGLIELLDRRRGQDRAYVGCMKSGEVISEEGKPWYEPDWWKFGDEKSYFRHAAGSLVIISKNLAQYININSVSLKTYAYDDTSLGSWMMGVQATYIDDSRLCCSSIRQDKVCSLA

SEQ ID NO: 58565 - protein, 269 aa, Glycine max
  peptide (1)..(269): Ceres Seq. ID no. 15170212
MVLGCRDLERRIVEAEMELTLAKSQGYLKGQGQRSGSSDRRLLAVIGVYTGFGSKLKRNVFRGSWMPRGDALKKLEERGVVIRFVIGRSANRGDSLDRNIDEENRTTKDFLILEGHEEAQEELPKKVKTFFSTAVQNWDADFYVKVDDGIDIDLEGLIELLDRRRGQDRAYVGCMKSGEVISEEGKPWYEPDWWKFGDEKSYFRHAAGSLVIISKNLAQYININSVSLKTYAYDDTSLGSWMMGVQATYIDDSRLCCSSIRQDKVCSLA

SEQ ID NO: 58566 - DNA, 1215 bp, Glycine max
  misc_feature (1)..(1215): Ceres Seq. ID no. 14308077
ggaatagagccacacatagggcgaagaggtgtcagcgggaagaggtgccacgtgtaggattttgccctcgctcattgcacttcccagtgagtgacttgactctctttctcacacctccttttttccccgatgctaactctacaagcttcgtctcgtaaagaaaattcgaaagctcaatagagagaactcaattgaatcatcaaatgaggacagtgatttcgcgcttgatccattccacgccttccatttccaggctcaatgccacggtagtgtcaatcagcgggagaaatctctgcacagattctaacaaagttgatgggccattcaaagttgaagaagcagagactgtaaatgtgcctccactcccaacagaaaagttgcttgtgttgggagggaatgggtttgttggatcacacatttgtagagaagccttagaccgtgatttgtctgttgcgagtcttagcaggtctggtaggtcatccctgcatgattcctgggctaccaatgttgcttggtataaagggaatctcctttcaactgattcattgaaagaagctctgaatggggtcactgctgttatctcatgtgttggtggttttggctccaactcttacatgtacaaaattaatgggactgctaacatcaatgcaattagagcagcttcagatcaaggtgttaaaagatttgtctatatctctgcagctgactttggtgtagtaaattacttactgcgggggtattatgaaggaaagagagcttctgaaacagagctcctgaccagattcccatatggaggagtaattctgaggccaggatttatttatggtactcgaagtgttgggagtatgaagataccccttggtgtaattggatctccattggaaatggttctccaagttgctaaaccattgaaccagatcccacttgttgggcctctattgacacctcctgtcaatgttactgcggtggcaaaagttgctgttagagctgctactgatcctgtttttcccccggggatcattgatgcttatggaatacaacgttacagtcagcataaatcaaactagaaaattatctatattttgttttctgggtaaatctaatatggggcgatttgcctctgaatatctgtgttttagtattgttaaactgagaatatttcttcattccatatccttgagagaataaaatctgaaagtgcgagcatgtagccat

SEQ ID NO: 58567 - protein, 287 aa, Glycine max
  peptide (1)..(287): Ceres Seq. ID no. 14308078
MRTVISRLIHSTPSISRLNATVVSISGRNLCTDSNKVDGPFKVEEAETVNVPPLPTEKLLVLGGNGFVGSHICREALDRDLSVASLSRSGRSSLHDSWATNVAWYKGNLLSTDSLKEALNGVTAVISCVGGFGSNSYMYKINGTANINAIRAASDQGVKRFVYISAADFGVVNYLLRGYYEGKRASETELLTRFPYGGVILRPGFIYGTRSVGSMKIPLGVIGSPLEMVLQVAKPLNQIPLVGPLLTPPVNVTAVAKVAVRAATDPVFPPGIIDAYGIQRYSQHKSN

SEQ ID NO: 58568 - protein, 150 aa, Glycine max
  peptide (1)..(150): Ceres Seq. ID no. 14308079
MYKINGTANINAIRAASDQGVKRFVYISAADFGVVNYLLRGYYEGKRASETELLTRFPYGGVILRPGFIYGTRSVGSMKIPLGVIGSPLEMVLQVAKPLNQIPLVGPLLTPPVNVTAVAKVAVRAATDPVFPPGIIDAYGIQRYSQHKSN

SEQ ID NO: 58569 - DNA, 1433 bp, Glycine max
  misc_feature (1)..(1433): Ceres Seq. ID no. 14308217
gaggcacgggttttgtttgaggttttctgttcgtttcatttcatttggtcgcacagtgctgtcggccactgtctctctttctctttcgcgcttcaactttcgtttatgcaccgattgggatggatcagtgggatgctcatcatcgactcatgttcattggtcggcatgaggaagatggaactgctgatacttctaagggagaggaatcaaatgatgaagaaaaaataagtaaaactgaacccgtctttgtgcctgaaactaagaaaaggaaacgccttagccttagtcagcttaaagaggtgaaagaggagtctcatgggaagcaaagcagtagcaagtctaagagaaagaagcatgatagtagggatagatggtcagctgagaggtatcaattggccgagcaaaacatgtgggaggtactaaaggctgaaggggcgacatttgaaaacccaataacccgacctgcactaagattagctgcccgcaaacacattggagatactggacttttagaccacttactgaagcacattgatggtaaagtggcacctggagggactgagcgtttccgaagatggttcaacaccaatggaatcatggagtattggttggagagtgctgacttggacaaggtgcgccaggaggcaggggtgcaggacccttactggataccgccatctacatatagggaagctggtgccccctcccagaatattgattcttctggtgaattgaaacagcttaaaatagaattgatgcaaatgaagaaagatatgcatgagctcattgccaagaaggaagagaaaagtgatattaacatggtggaggtgaatgttgaataatttgttaattcaatggtttgctgtcttctcttgcagcactttatgatgttttgttttgagttgctatggcaggagacacacaaggaatctgtaaagtggaaatttatgactgaccatcgccttactgaaatcatgacttctttgaaggatattcaggggaagtatggtgaattgatgatttggaaaactacagttgagcaacaacttatggaaataactgataaattgaatgatcttcaagcatctagggagtgcaccactaatagtcctccttcagaaaggtggcaagattggatagaaagtaccaacctagacaatattcaggaagatgcatttgcaacttggattgggaatccggagctacttaatgttccacaagaggttatacttgaagatcccaacacaaccataccaacacagccacccagtgaagaactgactaacaagaggagcgatgtgctggagttagtacctggtaaactagaagatcaacctaatgtaacccctgattcttctacaactgttaattcgaagtcagaccatgacaacaactcattgatcatgtttcaggagatgtttatggatttatac

SEQ ID NO: 58570 - protein, 240 aa, Glycine max
  peptide (1)..(240): Ceres Seq. ID no. 14308218
MDQWDAHHRLMFIGRHEEDGTADTSKGEESNDEEKISKTEPVFVPETKKRKRLSLSQLKEVKEESHGKQSSSKSKRKKHDSRDRWSAERYQLAEQNMWEVLKAEGATFENPITRPALRLAARKHIGDTGLLDHLLKHIDGKVAPGGTERFRRWFNTNGIMEYWLESADLDKVRQEAGVQDPYWIPPSTYREAGAPSQNIDSSGELKQLKIELMQMKKDMHELIAKKEEKSDINMVEVNVE

SEQ ID NO: 58571 - protein, 230 aa, Glycine max
  peptide (1)..(230): Ceres Seq. ID no. 14308219
MFIGRHEEDGTADTSKGEESNDEEKISKTEPVFVPETKKRKRLSLSQLKEVKEESHGKQSSSKSKRKKHDSRDRWSAERYQLAEQNMWEVLKAEGATFENPITRPALRLAARKHIGDTGLLDHLLKHIDGKVAPGGTERFRRWFNTNGIMEYWLESADLDKVRQEAGVQDPYWIPPSTYREAGAPSQNIDSSGELKQLKIELMQMKKDMHELIAKKEEKSDINMVEVNVE

SEQ ID NO: 58572 - protein, 193 aa, Glycine max
  peptide (1)..(193): Ceres Seq. ID no. 14308220
MVCCLLLQHFMMFCFELLWQETHKESVKWKFMTDHRLTEIMTSLKDIQGKYGELMIWKTTVEQQLMEITDKLNDLQASRECTTNSPPSERWQDWIESTNLDNIQEDAFATWIGNPELLNVPQEVILEDPNTTIPTQPPSEELTNKRSDVLELVPGKLEDQPNVTPDSSTTVNSKSDHDNNSLIMFQEMFMDLY

SEQ ID NO: 58573 - DNA, 1319 bp, Glycine max
  misc_feature (1)..(1319): Ceres Seq. ID no. 14308310
ggttctctctctctctctcttatttgcttcttcgagtttcacagccaagtcgtaaaagggtttcaagggatggaaaacatgcagagcttctggcaattgggtgatgaactccgtgggcactcaaaagcatcggaggatcacaagtggttaatggttgcctcgaaactggccgaacagacaagattgaagggggagcgtgtgaacaaccttgatctttcaaagggacccattgaaacaaggtcaagggataaatttgggttccaggaagagaacaaatttgattctcttaacttgagcatgttgaacctggactctaaatttactgagaatgtgagcaaaagctcacttcgaaatggtgtttatggtatgaatgcagtgtatcagaaaaacaatgcaaacttggtgagtaatgtgatcagtaacaagtacaatggcagtattcagcataacaaagagatcaacaacaacactggcaacaacatcaacaccaatgaaagcaacaacacaaatgcaactgacaaaaggtttaagaccttgcctgctgcggagacactcccccgcaatgaggtgcttggaggatacatctttgtctgtaacaatgacacaatgcaggaagacttgaaacgtcagctatttggtttgcctccaaggtatcgagattctgttagggcaataacaccagggctacctttatttctttataactatactactcatcagctgcatggtatttttgaggcagcaagttttggtggctctaacatagatccaactgcctgggaggataaaaaatgcaaaggggaatcaaggtttccagctcaggtaagaatccgtgtcaggaagctctgcaaggcattggaagaagattctttcaggccagtattgcatcattatgacgggccaaagtttcgtcttgaactgtcagttccagagactctggatctgttggacctatgtgaacaagctggttcagcagcataagcaagaatcaaacaaagaatgaatgtgcaaaataggtaggttttggtgtgccagctgtgtggttttggcagattttccgtgaagcgtaagcttggaaagtgaatcatcatcatgttttgggggaagtaaagggagcgtgttgttgagagtgagagaccctttgttggtgaataaatggttgttgtggtatctatcccctggaagatgctttgtagctgttacatgacatttaatacctttgtatgattaagtaaagtacagactactgtttgtactgctaaagtatgtatctgttgaaccaagaaaaaaattaaagttaaaaagcttcatgtattacc

SEQ ID NO: 58574 - protein, 326 aa, Glycine max
  peptide (1)..(326): Ceres Seq. ID no. 14308311
GSLSLSLICFFEFHSQVVKGFQGMENMQSFWQLGDELRGHSKASEDHKWLMVASKLAEQTRLKGERVNNLDLSKGPIETRSRDKFGFQEENKFDSLNLSMLNLDSKFTENVSKSSLRNGVYGMNAVYQKNNANLVSNVISNKYNGSIQHNKEINNNTGNNINTNESNNTNATDKRFKTLPAAETLPRNEVLGGYIFVCNNDTMQEDLKRQLFGLPPRYRDSVRAITPGLPLFLYNYTTHQLHGIFEAASFGGSNIDPTAWEDKKCKGESRFPAQVRIRVRKLCKALEEDSFRPVLHHYDGPKFRLELSVPETLDLLDLCEQAGSAA

SEQ ID NO: 58575 - protein, 303 aa, Glycine max
  peptide (1)..(303): Ceres Seq. ID no. 14308312
MENMQSFWQLGDELRGHSKASEDHKWLMVASKLAEQTRLKGERVNNLDLSKGPIETRSRDKFGFQEENKFDSLNLSMLNLDSKFTENVSKSSLRNGVYGMNAVYQKNNANLVSNVISNKYNGSIQHNKEINNNTGNNINTNESNNTNATDKRFKTLPAAETLPRNEVLGGYIFVCNNDTMQEDLKRQLFGLPPRYRDSVRAITPGLPLFLYNYTTHQLHGIFEAASFGGSNIDPTAWEDKKCKGESRFPAQVRIRVRKLCKALEEDSFRPVLHHYDGPKFRLELSVPETLDLLDLCEQAGSAA

SEQ ID NO: 58576 - protein, 300 aa, Glycine max
  peptide (1)..(300): Ceres Seq. ID no. 14308313
MQSFWQLGDELRGHSKASEDHKWLMVASKLAEQTRLKGERVNNLDLSKGPIETRSRDKFGFQEENKFDSLNLSMLNLDSKFTENVSKSSLRNGVYGMNAVYQKNNANLVSNVISNKYNGSIQHNKEINNNTGNNINTNESNNTNATDKRFKTLPAAETLPRNEVLGGYIFVCNNDTMQEDLKRQLFGLPPRYRDSVRAITPGLPLFLYNYTTHQLHGIFEAASFGGSNIDPTAWEDKKCKGESRFPAQVRIRVRKLCKALEEDSFRPVLHHYDGPKFRLELSVPETLDLLDLCEQAGSAA

SEQ ID NO: 58577 - DNA, 1071 bp, Glycine max
  misc_feature (1)..(1071): Ceres Seq. ID no. 15174347
gatacatataacaatcattcttcttcttctgcaaatacttatccctcattgattcatcatggttcggttcagcaacaatgttatcggactccttaacttcctcaccttcctcttgtccatcccgatcctggtggccggagtgtggctgagcaagcaaggcgccaccgagtgcgagcggtggctggagaagcccgtcatcgcgctcggcgtcttcctcatgctcgtctcactcgccggcctcgtcggcgcgtgctgccgcgtgtcgtggctcctctggctctacctcctcgtcatgtttgtcctcatcgttcttctcttcgccttcaccattttcgctttcgtcgttaccaacaagggcgctggtgaagttgtttctaatagagggtataaagagtataggcttggggattactcgaattggctgcagaagaaggttaataacactaagacgtggaacaggatcagtagttgcttgcattctgggaaagtctgcactgagtttcaatccaagtttctaaacgacaccgttactcagttttacaccgagcacctgtccgcgcttcagtctggatgctgtaaacctgcagaagaatgcctatttacctatgagaattcaacgagctggacgaagcctggaaatgtgaccagttacaacaaccctgactgtgatgcttggaataacaatcaaacagttctgtgcttcaattgccaatcatgcaaggctggctttytgcaaaacttcaagactgaatggaagagggtggctgttgttaacatcgtattccttgttcttctcattattgtatactccatagggtgctgkgcattcaggaacaataggagggaaaattggaagggatattctcgttagctagattactcagtattactagtgagtagatcagtttgctagacaatctggtttatatgttggatttatttttttgggctttatgtgtatgctggattatactgttttcagtacagtctgttatggaaattgctcaattttatatagtagtttcctagtatcatctatacgtagatattacttctggacacactgcattc

SEQ ID NO: 58578 - protein, 270 aa, Glycine max
  peptide (1)..(270): Ceres Seq. ID no. 15174348
  misc_feature (225)..(225): Xaa is any aa, unknown or other
  misc_feature (255)..(255): Xaa is any aa, unknown or other
MVRFSNNVIGLLNFLTFLLSIPILVAGVWLSKQGATECERWLEKPVIALGVFLMLVSLAGLVGACCRVSWLLWLYLLVMFVLIVLLFAFTIFAFVVTNKGAGEVVSNRGYKEYRLGDYSNWLQKKVNNTKTWNRISSCLHSGKVCTEFQSKFLNDTVTQFYTEHLSALQSGCCKPAEECLFTYENSTSWTKPGNVTSYNNPDCDAWNNNQTVLCFNCQSCKAGFXQNFKTEWKRVAVVNIVFLVLLIIVYSIGCXAFRNNRRENWKGYSR

SEQ ID NO: 58579 - protein, 217 aa, Glycine max
  peptide (1)..(217): Ceres Seq. ID no. 15174349
  misc_feature (172)..(172): Xaa is any aa, unknown or other
  misc_feature (202)..(202): Xaa is any aa, unknown or other
MLVSLAGLVGACCRVSWLLWLYLLVMFVLIVLLFAFTIFAFVVTNKGAGEVVSNRGYKEYRLGDYSNWLQKKVNNTKTWNRISSCLHSGKVCTEFQSKFLNDTVTQFYTEHLSALQSGCCKPAEECLFTYENSTSWTKPGNVTSYNNPDCDAWNNNQTVLCFNCQSCKAGFXQNFKTEWKRVAVVNIVFLVLLIIVYSIGCXAFRNNRRENWKGYSR

SEQ ID NO: 58580 - protein, 192 aa, Glycine max
  peptide (1)..(192): Ceres Seq. ID no. 15174350
  misc_feature (147)..(147): Xaa is any aa, unknown or other
  misc_feature (177)..(177): Xaa is any aa, unknown or other
MFVLIVLLFAFTIFAFVVTNKGAGEVVSNRGYKEYRLGDYSNWLQKKVNNTKTWNRISSCLHSGKVCTEFQSKFLNDTVTQFYTEHLSALQSGCCKPAEECLFTYENSTSWTKPGNVTSYNNPDCDAWNNNQTVLCFNCQSCKAGFXQNFKTEWKRVAVVNIVFLVLLIIVYSIGCXAFRNNRRENWKGYSR

SEQ ID NO: 58581 - DNA, 1206 bp, Glycine max
  misc_feature (1)..(1206): Ceres Seq. ID no. 14312330
acgacacgccagccagatccacaaatcggaagaatcagagcgccgtcggaaaccgccgtccacggcggtgaaactcgccttcgcatcctctcgtcttcgaacccgaagcctctctcggttcctcactcttctcacatcgccaaaaactcaaattcacgatggaagagttggagcagtggaaggaacaactttcgcacttcgctaacctagctttggatcgtcttcgcgaggttcccccgaatcagctctacgctgctgctgcaatcgcgattttcacaactctgcttcttctctcaatacggttgttcaagcgcgcgaagtccaacaccattgttttgaccgggctcagtgggagtggaaaaactgttctcttctatcagcttagggatggctcaactcatcagggtacagttacatcgatggagcctaatgaaggcacttttattcttcacaatgagaaaaccaggaagggcaagataaagcctgttcatgttgttgatgttcctgggcattctcggcttcgacccaaactggatgagtacttgcctcaagcagctggggtagtttttgtagtagatgctttggactttttaccaaactgccgtgctgcttcagagtacctttatgatctattgactaaaggaagtgttgtgaggaagaagattccaatgcttattctctgcaacaaaacagacaaagtcactgctcatactaaagagtttatccgaaaacagatggagaaggaaatagacaaattacgggcatcaagaagtgcaatatcagcagctgacatcgcaaatgagttcaccctgggggtacccggtgagccgttttcttttacccagtgctctaacaaagtgacaactgcagacgcttctggtttaactggggaaatatctcagctggaagagtttatcagagaacatgtaaagcgatagctggatattgtgtttaaacttgcggatttttgttgaactgaatgaatatgtagcgttgctcttcttggttgttatttctttgatttcaaagaactgtctggataagaagaggcaaaaaagagaaaatggggttttgggggtggggttggggtgttcggagtaggaatcactatgttgggatcaatgaggatttacttcattttaagtcctggtatattgattggactataatgatttatcaaattgtatccatacttcatttactttt

SEQ ID NO: 58582 - protein, 259 aa, Glycine max
  peptide (1)..(259): Ceres Seq. ID no. 14312331
MEELEQWKEQLSHFANLALDRLREVPPNQLYAAAAIAIFTTLLLLSIRLFKRAKSNTIVLTGLSGSGKTVLFYQLRDGSTHQGTVTSMEPNEGTFILHNEKTRKGKIKPVHVVDVPGHSRLRPKLDEYLPQAAGVVFVVDALDFLPNCRAASEYLYDLLTKGSVVRKKIPMLILCNKTDKVTAHTKEFIRKQMEKEIDKLRASRSAISAADIANEFTLGVPGEPFSFTQCSNKVTTADASGLTGEISQLEEFIREHVKR

SEQ ID NO: 58583 - protein, 172 aa, Glycine max
  peptide (1)..(172): Ceres Seq. ID no. 14312332
MEPNEGTFILHNEKTRKGKIKPVHVVDVPGHSRLRPKLDEYLPQAAGVVFVVDALDFLPNCRAASEYLYDLLTKGSVVRKKIPMLILCNKTDKVTAHTKEFIRKQMEKEIDKLRASRSAISAADIANEFTLGVPGEPFSFTQCSNKVTTADASGLTGEISQLEEFIREHVKR

SEQ ID NO: 58584 - DNA, 1408 bp, Glycine max
  misc_feature (1)..(1408): Ceres Seq. ID no. 15175700
aaagagaaatggaattgcctctttcaagaagcatctgagtgtttattattcgtaatatatagtcactcaagcttctaggatttctgccagctacatgaaaatgggaagcaacttgaggtttttgagtctttgcctcttggcattgattgcatcaactcatgcccaacttcagcttggtttttatgcccagagctgcccaaaagctgagaaaatcattttgaaatttgttcatgagcatatccacaatgctccatcactagcagctgcattgataagaatgcatttccatgattgttttgtaaggggatgtgatggatcagtccttctgaactcaacaaccaatcaggctgagaagaatgctcctccaaatctcacagtaagaggctttgacttcattgacagaataaagagccttgttgaagctgaatgccctggtgtggtctcttgtgctgatatcctcactttggctgccagagacactattgtagccacaggtggaccctattggaaagttccaacaggtcgaagggatggggtcatctctaacttggtggaagccagaaataacattcctgctccatttgacaacatcactacgctacagacactctttgccaaccaaggacttgatttgaaggacttggtcctgctctctggtgctcacacaattggtatcgctcattgttcatcattatcaaaccgcttgttcaatttcactggcaagggtgatcaagacccttcactagacagtgaatatgctgcaaatctgaaagccttcaagtgcaaggacctcagtaaattgaacaccacaaaaattgagatagaccctggaagtcgcaagacatttgatcttagctactatagtcacgttattaagagaaggggtctatttgaatcagatgctgcattgttgactaactcagttacaaagtctcaaatcatccaattgcttgaagggacagttgaaaatttctctgctgagtttgcaacctccatagagaaaatgggaagaattaatgtgaagacagggacagagggagagatcaggaagcattgtgcattcgtaaatagctaagaatcttgtcttgttcatggatgaatcttgtatcttttattttttgggtttgattatttatgctatgccaatgttttttgattagttatgctatgccatgtggtgtctgtctacttataaaagaccccttatggcatggttgttgtatgtgtgttggaataagtaggttccattgttattcttatttccaactttgctggtagatcatgctcttgcaataagcagcagaatttcttgtgctaccaacagcagagttaatgtatgtttagtcttttttttttgtattgatgtactttttcattgttattctcaatttaatgcatttttcctctc

SEQ ID NO: 58585 - protein, 326 aa, Glycine max
  peptide (1)..(326): Ceres Seq. ID no. 15175701
MKMGSNLRFLSLCLLALIASTHAQLQLGFYAQSCPKAEKIILKFVHEHIHNAPSLAAALIRMHFHDCFVRGCDGSVLLNSTTNQAEKNAPPNLTVRGFDFIDRIKSLVEAECPGVVSCADILTLAARDTIVATGGPYWKVPTGRRDGVISNLVEARNNIPAPFDNITTLQTLFANQGLDLKDLVLLSGAHTIGIAHCSSLSNRLFNFTGKGDQDPSLDSEYAANLKAFKCKDLSKLNTTKIEIDPGSRKTFDLSYYSHVIKRRGLFESDAALLTNSVTKSQIIQLLEGTVENFSAEFATSIEKMGRINVKTGTEGEIRKHCAFVNS

SEQ ID NO: 58586 - protein, 324 aa, Glycine max
  peptide (1)..(324): Ceres Seq. ID no. 15175702
MGSNLRFLSLCLLALIASTHAQLQLGFYAQSCPKAEKIILKFVHEHIHNAPSLAAALIRMHFHDCFVRGCDGSVLLNSTTNQAEKNAPPNLTVRGFDFIDRIKSLVEAECPGVVSCADILTLAARDTIVATGGPYWKVPTGRRDGVISNLVEARNNIPAPFDNITTLQTLFANQGLDLKDLVLLSGAHTIGIAHCSSLSNRLFNFTGKGDQDPSLDSEYAANLKAFKCKDLSKLNTTKIEIDPGSRKTFDLSYYSHVIKRRGLFESDAALLTNSVTKSQIIQLLEGTVENFSAEFATSIEKMGRINVKTGTEGEIRKHCAFVNS

SEQ ID NO: 58587 - protein, 265 aa, Glycine max
  peptide (1)..(265): Ceres Seq. ID no. 15175703
MHFHDCFVRGCDGSVLLNSTTNQAEKNAPPNLTVRGFDFIDRIKSLVEAECPGVVSCADILTLAARDTIVATGGPYWKVPTGRRDGVISNLVEARNNIPAPFDNITTLQTLFANQGLDLKDLVLLSGAHTIGIAHCSSLSNRLFNFTGKGDQDPSLDSEYAANLKAFKCKDLSKLNTTKIEIDPGSRKTFDLSYYSHVIKRRGLFESDAALLTNSVTKSQIIQLLEGTVENFSAEFATSIEKMGRINVKTGTEGEIRKHCAFVNS

SEQ ID NO: 58588 - DNA, 845 bp, Glycine max
  misc_feature (1)..(845): Ceres Seq. ID no. 13638156
atttatggatgaaatcaagaagcgtgcaaatcagaggaagcaacttgctaaaaaggaaaagaaggaaaaaataatggctgaagctactgctgcttattctcttcccatatcattaagtcatcagtttacttctcgcaatgatcctccgacattcttcatggatgactttgaagctcttggaaattcaaccatatcatcaagtcctcccttagctggggagagaaaatcgttctcaaatgttactaggcttgggtttgctgctgctcatgattctccatccttacaaattcaagaaactagtggtctgcataataacaacacaactgctgattcttctgtcacaacaggtttgagaaatggggagacacaatcatactccaatgttacatcaagaacagaatctaatataagctcgaatgcaccaaagacaaatgagttggggaagaagggaaagaaaccaaatcgagttcttctgtcaacagctggtggtaggcgctattgattttggttgccgacccttaccctagattatgcgagtgtcaatgattctcagcctcctccctgctatagtcccaagccaaactctctggcagatgatttcagtgtagagttagtaacgttctacggatcatatttatgcacctcttaactacttgtaggtaggtaggcatgtgtggagagaataaatgtttttagcaataaacaagccacaactgttagaaggtcagtatattgtttctgtggatctgtagaactgtgctggcgttgggtatgttaattaaatccagactatgagcattgactatacacaagacatttaaattgggaagggggtttttttctct

SEQ ID NO: 58589 - protein, 166 aa, Glycine max
  peptide (1)..(166): Ceres Seq. ID no. 13638157
FMDEIKKRANQRKQLAKKEKKEKIMAEATAAYSLPISLSHQFTSRNDPPTFFMDDFEALGNSTISSSPPLAGERKSFSNVTRLGFAAAHDSPSLQIQETSGLHNNNTTADSSVTTGLRNGETQSYSNVTSRTESNISSNAPKTNELGKKGKKPNRVLLSTAGGRRY

SEQ ID NO: 58590 - protein, 165 aa, Glycine max
  peptide (1)..(165): Ceres Seq. ID no. 13638158
MDEIKKRANQRKQLAKKEKKEKIMAEATAAYSLPISLSHQFTSRNDPPTFFMDDFEALGNSTISSSPPLAGERKSFSNVTRLGFAAAHDSPSLQIQETSGLHNNNTTADSSVTTGLRNGETQSYSNVTSRTESNISSNAPKTNELGKKGKKPNRVLLSTAGGRRY

SEQ ID NO: 58591 - protein, 142 aa, Glycine max
  peptide (1)..(142): Ceres Seq. ID no. 13638159
MAEATAAYSLPISLSHQFTSRNDPPTFFMDDFEALGNSTISSSPPLAGERKSFSNVTRLGFAAAHDSPSLQIQETSGLHNNNTTADSSVTTGLRNGETQSYSNVTSRTESNISSNAPKTNELGKKGKKPNRVLLSTAGGRRY

SEQ ID NO: 58592 - DNA, 2335 bp, Glycine max
  misc_feature (1)..(2335): Ceres Seq. ID no. 15176302
gaagaaaaggttctctccctctctctcttcttctctttctctgcgtgtgtgttcgtgagtggagtggcgtatgtgtagctgcgctctctatcgccggcgctctcgtcggaatttccgttattgatttttccgatcaccggattcgatccaatccctaatccctaatcccgcgattccatcaattgaaaaaattgaatagccattgaaccgtttcgtttcgggggtagcggagatggacgtttacgcgagcagcgacgaagattaccattacgactccgaccacgaggactccgtcgaggcctacgaaaacgacgagaattacgccttgctctcttccaagggcaccactactaaggtgattacaaaggaatcactgctagctgcacagaaggaggatttgcgcagagtgatggacatgctatcggtgagagagcaacatgctcggacgctgcttatttttcatcgttgggatgtggagaatctgtttgaagtgttagtagacaaggggaaatcatttctctttgctgaagctggtgttagtgtggatgaacatcgcaactctgactcacctgttcctcctgcattcatgtgctacatctgtatggaggaagttcctagtagcaaaacaacgagaatggactgcggtcactgcttttgcaacggctgttggatagagcactttattgtcaagataaatgagggtcaaagtaagcgcattagatgcatggaacacaagtgcaattccatatgtgatgatgccgttgtaagaactctactcagtagagagcaccctcatacggcagagaaatatgaacgctttctgcttgaatcttacattgaagacaataagagagttaaatggtgccccagcacacctcattgtgggaatgcaatacgggtcgaggatgatgaactgtgtgaggtagaatgttcatgtggtgtacaattttgttttagttgtttgtcagaagcacactccccttgttcatgtctgatgtgggagctttgggctaagaagtgccgagatgaatcagaaacagttaattggataactgttcatacaaaaccatgtccaaagtgtcacaaaccagtggagaagaatggtggttgtaacttggttagctgtatctgtggccaagcattttgttggttgtgtggtggagctactggccgagagcatacttggtcaagtatagctggtcatagctgtggtcgatacaaagagcaagaaaagacagctgaacgtgcaaagagggatctatatcgttatatgcattatcataaccgatataaagctcacacagactcctttaagattgaaagtaaactgaaagagactatacaagggaagattgccatttcagaagaaaaagattctacactcagagattatagctgggtaaataatggactctccagacttttcagatctaggcgagtcctatcatattcatatgcatttgcattttatatgtttggagatgagctttttaaggatgaaatgacagatgctcaacgggaaataaaacagaacttatttgaggatcaacagcaacagcttgaggcaaatgttgaaaagctctctaaaattttggaggagccttttgaaaccttttcagatgataaggttgttgagataaggatgcagatactcaacctttcaacaattattgacaaactttgtcaaaaaatgtatgaatgcattgagaatgatctattgggttctctcaatcttggcattcatagtattgctccatacaagtcaaagggcatcgagagggcatcagaactttcagttggctggaacaacaaagtcaataatactggtgtaacagaagaacttgatcgaccatctggatcagggagttcagacgataatggatgttcttctcgtaaacgtgctagaaaagagggtcttggaggtggtggtttttttgatctaaacttgccagcagagtttgtagacagaaattgactttgaaggacaccttattatacgtacaggcgtacaggtctaacaacataaaattgctttgctttgctgcctttggaaggaaggaattaatctttttggatttcataccccatttgctttctcatatctttcttttagccagccatgtctctgctgagataaaagatatgtttccaaggtttcttattcctatgccatctacctttctgtttgaaatcctagcgctgtatatagatagccttggggcatttatttgctagtagttttatgtaaatggctaccttgaggacaactaggatgcttttattcctattttatggagttataggtggaggtaacttcactgatttttcttcaaag

SEQ ID NO: 58593 - protein, 580 aa, Glycine max
  peptide (1)..(580): Ceres Seq. ID no. 15176303
MDVYASSDEDYHYDSDHEDSVEAYENDENYALLSSKGTTTKVITKESLLAAQKEDLRRVMDMLSVREQHARTLLIFHRWDVENLFEVLVDKGKSFLFAEAGVSVDEHRNSDSPVPPAFMCYICMEEVPSSKTTRMDCGHCFCNGCWIEHFIVKINEGQSKRIRCMEHKCNSICDDAVVRTLLSREHPHTAEKYERFLLESYIEDNKRVKWCPSTPHCGNAIRVEDDELCEVECSCGVQFCFSCLSEAHSPCSCLMWELWAKKCRDESETVNWITVHTKPCPKCHKPVEKNGGCNLVSCICGQAFCWLCGGATGREHTWSSIAGHSCGRYKEQEKTAERAKRDLYRYMHYHNRYKAHTDSFKIESKLKETIQGKIAISEEKDSTLRDYSWVNNGLSRLFRSRRVLSYSYAFAFYMFGDELFKDEMTDAQREIKQNLFEDQQQQLEANVEKLSKILEEPFETFSDDKVVEIRMQILNLSTIIDKLCQKMYECIENDLLGSLNLGIHSIAPYKSKGIERASELSVGWNNKVNNTGVTEELDRPSGSGSSDDNGCSSRKRARKEGLGGGGFFDLNLPAEFVDRN

SEQ ID NO: 58594 - protein, 521 aa, Glycine max
  peptide (1)..(521): Ceres Seq. ID no. 15176304
MDMLSVREQHARTLLIFHRWDVENLFEVLVDKGKSFLFAEAGVSVDEHRNSDSPVPPAFMCYICMEEVPSSKTTRMDCGHCFCNGCWIEHFIVKINEGQSKRIRCMEHKCNSICDDAVVRTLLSREHPHTAEKYERFLLESYIEDNKRVKWCPSTPHCGNAIRVEDDELCEVECSCGVQFCFSCLSEAHSPCSCLMWELWAKKCRDESETVNWITVHTKPCPKCHKPVEKNGGCNLVSCICGQAFCWLCGGATGREHTWSSIAGHSCGRYKEQEKTAERAKRDLYRYMHYHNRYKAHTDSFKIESKLKETIQGKIAISEEKDSTLRDYSWVNNGLSRLFRSRRVLSYSYAFAFYMFGDELFKDEMTDAQREIKQNLFEDQQQQLEANVEKLSKILEEPFETFSDDKVVEIRMQILNLSTIIDKLCQKMYECIENDLLGSLNLGIHSIAPYKSKGIERASELSVGWNNKVNNTGVTEELDRPSGSGSSDDNGCSSRKRARKEGLGGGGFFDLNLPAEFVDRN

SEQ ID NO: 58595 - protein, 519 aa, Glycine max
  peptide (1)..(519): Ceres Seq. ID no. 15176305
MLSVREQHARTLLIFHRWDVENLFEVLVDKGKSFLFAEAGVSVDEHRNSDSPVPPAFMCYICMEEVPSSKTTRMDCGHCFCNGCWIEHFIVKINEGQSKRIRCMEHKCNSICDDAVVRTLLSREHPHTAEKYERFLLESYIEDNKRVKWCPSTPHCGNAIRVEDDELCEVECSCGVQFCFSCLSEAHSPCSCLMWELWAKKCRDESETVNWITVHTKPCPKCHKPVEKNGGCNLVSCICGQAFCWLCGGATGREHTWSSIAGHSCGRYKEQEKTAERAKRDLYRYMHYHNRYKAHTDSFKIESKLKETIQGKIAISEEKDSTLRDYSWVNNGLSRLFRSRRVLSYSYAFAFYMFGDELFKDEMTDAQREIKQNLFEDQQQQLEANVEKLSKILEEPFETFSDDKVVEIRMQILNLSTIIDKLCQKMYECIENDLLGSLNLGIHSIAPYKSKGIERASELSVGWNNKVNNTGVTEELDRPSGSGSSDDNGCSSRKRARKEGLGGGGFFDLNLPAEFVDRN

SEQ ID NO: 58596 - DNA, 1358 bp, Glycine max
  misc_feature (1)..(1358): Ceres Seq. ID no. 15169114
agagttcagtagcaatggccgtggttgagtttgaacctcaacaactacgcctcttcatccccaacttcctctccctcgatgaatgcaaagaattggaattcatccataagagtagcagcacggtgggttacagacccaatgtcttctccaccactctctcccatctcattgctaccaactcttcccacttcatcattccttttatacccatcagagaaaggttgaaagacaagttagaggagtttttcaagtgtgagtatgagctcttcattgaattcactggtttaatcagttggagtagaggagcaagcattggatggcatagtgatgataacaggccctacctcaaacaacgccacttctcagcagtatgctatttgaatacttatggcaaggatttcagtggtggactctttcacttccaggatggtgagcccaagtcaattgtgccaaaagccggagatgttgtgatgtacacagctgatgaccgtaacattcattctgttgatgagataactgagggagaaaggctcacacttgctttatggttcagtcgtgatggctcccatgatgaggatatgaagctcatttctcttctttcacaacacctgctacatgagaacgtggctgattcatacctacctttgccagcatccagtaatatgtactggttttctaaggaccaagcttccaattatcaattcggttttaatatatcctgggctagactgcatgttcttggatacgacatatatatttctcaagacagtagctgtgagtctgatgtctttgaattactggtaaagccagtgcgtttagtgagggataatgagttgttagaccaggaattcgtcaatattatgcatgcacttcaggttgtccatttctattgttggaaaggatcagctttactgaacaacatgtcaaatatagactccagggtactaaaagtgacagaggtacagagagagaaaatcagtggtctgaattctgtacttttgaatgataatgattttgcatccaaagttttctgtaatatgccttcggaagaaaagggatgcatttgctttgactggtcagaagttctagctgcagttgctgcttgggaagattatgcgtcaaacttaagcaaacaaattcatttacagttgccttactggagaatgcatgagtctatatataatgtgcaattagagtagtatttgtgatcaacaattccaagaaaaagtaaccacctacaattgtgcttgggttaaaaatttggagaaaagcactgttgaaacaactaaaaagtagtttgtgaaggtttgctttgatagcattattcaatttaatgtgctttgggaaagttttaaggt

SEQ ID NO: 58597 - protein, 398 aa, Glycine max
  peptide (1)..(398): Ceres Seq. ID no. 15169115
SSVAMAVVEFEPQQLRLFIPNFLSLDECKELEFIHKSSSTVGYRPNVFSTTLSHLIATNSSHFIIPFIPIRERLKDKLEEFFKCEYELFIEFTGLISWSRGASIGWHSDDNRPYLKQRHFSAVCYLNTYGKDFSGGLFHFQDGEPKSIVPKAGDVVMYTADDRNIHSVDEITEGERLTLALWFSRDGSHDEDMKLISLLSQHLLHENVADSYLPLPASSNMYWFSKDQASNYQFGFNISWARLHVLGYDIYISQDSSCESDVFELLVKPVRLVRDNELLDQEFVNIMHALQVVHFYCWKGSALLNNMSNIDSRVLKVTEVQREKISGLNSVLLNDNDFASKVFCNMPSEEKGCICFDWSEVLAAVAAWEDYASNLSKQIHLQLPYWRMHESIYNVQLE

SEQ ID NO: 58598 - protein, 394 aa, Glycine max
  peptide (1)..(394): Ceres Seq. ID no. 15169116
MAVVEFEPQQLRLFIPNFLSLDECKELEFIHKSSSTVGYRPNVFSTTLSHLIATNSSHFIIPFIPIRERLKDKLEEFFKCEYELFIEFTGLISWSRGASIGWHSDDNRPYLKQRHFSAVCYLNTYGKDFSGGLFHFQDGEPKSIVPKAGDVVMYTADDRNIHSVDEITEGERLTLALWFSRDGSHDEDMKLISLLSQHLLHENVADSYLPLPASSNMYWFSKDQASNYQFGFNISWARLHVLGYDIYISQDSSCESDVFELLVKPVRLVRDNELLDQEFVNIMHALQVVHFYCWKGSALLNNMSNIDSRVLKVTEVQREKISGLNSVLLNDNDFASKVFCNMPSEEKGCICFDWSEVLAAVAAWEDYASNLSKQIHLQLPYWRMHESIYNVQLE

SEQ ID NO: 58599 - protein, 242 aa, Glycine max
  peptide (1)..(242): Ceres Seq. ID no. 15169117
MYTADDRNIHSVDEITEGERLTLALWFSRDGSHDEDMKLISLLSQHLLHENVADSYLPLPASSNMYWFSKDQASNYQFGFNISWARLHVLGYDIYISQDSSCESDVFELLVKPVRLVRDNELLDQEFVNIMHALQVVHFYCWKGSALLNNMSNIDSRVLKVTEVQREKISGLNSVLLNDNDFASKVFCNMPSEEKGCICFDWSEVLAAVAAWEDYASNLSKQIHLQLPYWRMHESIYNVQLE

SEQ ID NO: 58600 - DNA, 1313 bp, Glycine max
  misc_feature (1)..(1313): Ceres Seq. ID no. 14315557
aattttttttgctcatcattttgtgctcatggtggtgaggtttaacccttcatgtctcaccctctctcataatcctcaccacactacatatttctctaagcaagtgacagttaggagcagttatgggaaacacatgaaaagtggtggccttggaagaaggcctcagatagtgtcttcagttttggggaacagtaacactgaaggggtgagtgtgtttgtggtgtctgacttgcacactgactatgctgagaatttgaagtgggtggagtgcttgtctaatgtgaagcacaagaatgatgtgcttcttgtggcaggtgatgtggctgagacatgttccatgtttgttgtgacaatgtctcttttgaaagagaggtttgagcatgtcttctatgttcctggaaaccatgacctttggtgccgtcgcgaggggcaaaattatgttgattctcttgaaaagctgaataaattgcttgatgcgtgtgagagaattggagtggagacaaatccaacggttatagatgaaataggaatcattcctttgttctcttggtaccatgagagctttgacaaagagaaggacataacaggctttcgcatcccgtctttggagatggcatgtaaagatttctatgcgtgtaagtggcccgagggactttcaaatggagatatgtcactggctttatattttgatgccatgaatgataaacaaatagatgtgataaaggagattcagatggcatgcgatcacatcattaccttttcacactttgttcccaggcaggaactttgtccagagaagaggatgttgttctatcccaagcttccaaaaataattggttcagactctcttgaagatcgaataaggtctattcatggtgctgagggaaggaaggatgcgtcgtcttgtcatgtgtttggtcatactcacttctgttgggatgctgttgttgatggtatcaggtatgtacaggcacccttagcttacccaagggaaaggaagagaagaatgaatggaggtgaaaattggctaccgttttgcctttatgctgacaacaaatttgctgatagactcaacccttgctattggtctgattattactctgccaaccccaggacaccccataatactaaacttgctccttgggtagccagattttataagcaaacagaaactgtggatgtatagtattcactattgactttattgagctggttttatttgttgataagacattcctatattgtgttgtcttttttacattaaatcaataaataacatgagtcattttgcaaggtgaaagttgcacaaacac

SEQ ID NO: 58601 - protein, 394 aa, Glycine max
  peptide (1)..(394): Ceres Seq. ID no. 14315558
IFFAHHFVLMVVRFNPSCLTLSHNPHHTTYFSKQVTVRSSYGKHMKSGGLGRRPQIVSSVLGNSNTEGVSVFVVSDLHTDYAENLKWVECLSNVKHKNDVLLVAGDVAETCSMFVVTMSLLKERFEHVFYVPGNHDLWCRREGQNYVDSLEKLNKLLDACERIGVETNPTVIDEIGIIPLFSWYHESFDKEKDITGFRIPSLEMACKDFYACKWPEGLSNGDMSLALYFDAMNDKQIDVIKEIQMACDHIITFSHFVPRQELCPEKRMLFYPKLPKIIGSDSLEDRIRSIHGAEGRKDASSCHVFGHTHFCWDAVVDGIRYVQAPLAYPRERKRRMNGGENWLPFCLYADNKFADRLNPCYWSDYYSANPRTPHNTKLAPWVARFYKQTETVDV

SEQ ID NO: 58602 - protein, 385 aa, Glycine max
  peptide (1)..(385): Ceres Seq. ID no. 14315559
MVVRFNPSCLTLSHNPHHTTYFSKQVTVRSSYGKHMKSGGLGRRPQIVSSVLGNSNTEGVSVFVVSDLHTDYAENLKWVECLSNVKHKNDVLLVAGDVAETCSMFVVTMSLLKERFEHVFYVPGNHDLWCRREGQNYVDSLEKLNKLLDACERIGVETNPTVIDEIGIIPLFSWYHESFDKEKDITGFRIPSLEMACKDFYACKWPEGLSNGDMSLALYFDAMNDKQIDVIKEIQMACDHIITFSHFVPRQELCPEKRMLFYPKLPKIIGSDSLEDRIRSIHGAEGRKDASSCHVFGHTHFCWDAVVDGIRYVQAPLAYPRERKRRMNGGENWLPFCLYADNKFADRLNPCYWSDYYSANPRTPHNTKLAPWVARFYKQTETVDV

SEQ ID NO: 58603 - protein, 350 aa, Glycine max
  peptide (1)..(350): Ceres Seq. ID no. 14315560
MKSGGLGRRPQIVSSVLGNSNTEGVSVFVVSDLHTDYAENLKWVECLSNVKHKNDVLLVAGDVAETCSMFVVTMSLLKERFEHVFYVPGNHDLWCRREGQNYVDSLEKLNKLLDACERIGVETNPTVIDEIGIIPLFSWYHESFDKEKDITGFRIPSLEMACKDFYACKWPEGLSNGDMSLALYFDAMNDKQIDVIKEIQMACDHIITFSHFVPRQELCPEKRMLFYPKLPKIIGSDSLEDRIRSIHGAEGRKDASSCHVFGHTHFCWDAVVDGIRYVQAPLAYPRERKRRMNGGENWLPFCLYADNKFADRLNPCYWSDYYSANPRTPHNTKLAPWVARFYKQTETVDV

SEQ ID NO: 58604 - DNA, 614 bp, Glycine max
  misc_feature (1)..(614): Ceres Seq. ID no. 13594048
tgtctcaactctatcaaacttcaaagttcacacacacaaaagaatcagcatggctttcaatcaagagttagaagctgtaacccaagctttctcagggcatggagtggatgagaaatcattggtaacattactgggaaaatgggatcctctggagagagaatctttcaggaagaagacaccacatttgttcagtgaagatcatgaacgccattttcagaggtgggatgatcaatatgtccgtcttctcaagcatgaattcgtgcgttttaagaatgctgtggtgctttggtccatgcacccttgggaaagagatgcccgtttagtaaaagaggccctaaagaagggtccaaatgcatatggagtgctgattgaggtttcatgcactagatcctcagaagagctattgggagctaggaaggcataccattccctctttgaccactccattgaagaagatgttgcctctcacatccatggcattgaaagaaagctattggttgccctactaagtgcctatagatacgaaggaacaaaggttaaagatgacactgcaaaatcagaagccaaaatcctttccaatggcattaagaatgctcataagaagcctattaatg

SEQ ID NO: 58605 - protein, 204 aa, Glycine max
  peptide (1)..(204): Ceres Seq. ID no. 13594049
VSTLSNFKVHTHKRISMAFNQELEAVTQAFSGHGVDEKSLVTLLGKWDPLERESFRKKTPHLFSEDHERHFQRWDDQYVRLLKHEFVRFKNAVVLWSMHPWERDARLVKEALKKGPNAYGVLIEVSCTRSSEELLGARKAYHSLFDHSIEEDVASHIHGIERKLLVALLSAYRYEGTKVKDDTAKSEAKILSNGIKNAHKKPIN

SEQ ID NO: 58606 - protein, 188 aa, Glycine max
  peptide (1)..(188): Ceres Seq. ID no. 13594050
MAFNQELEAVTQAFSGHGVDEKSLVTLLGKWDPLERESFRKKTPHLFSEDHERHFQRWDDQYVRLLKHEFVRFKNAVVLWSMHPWERDARLVKEALKKGPNAYGVLIEVSCTRSSEELLGARKAYHSLFDHSIEEDVASHIHGIERKLLVALLSAYRYEGTKVKDDTAKSEAKILSNGIKNAHKKPIN

SEQ ID NO: 58607 - protein, 107 aa, Glycine max
  peptide (1)..(107): Ceres Seq. ID no. 13594051
MHPWERDARLVKEALKKGPNAYGVLIEVSCTRSSEELLGARKAYHSLFDHSIEEDVASHIHGIERKLLVALLSAYRYEGTKVKDDTAKSEAKILSNGIKNAHKKPIN

SEQ ID NO: 58608 - DNA, 1401 bp, Glycine max
  misc_feature (1)..(1401): Ceres Seq. ID no. 13594128
aaaatcattaaaatcttttttttgcccttatgaacaccttcgtaaagaagactagaggcatcatctcccttgccaccagaggtttcgccagctcttccggagccatcaaagttaaacttctcccctccgatacttacaacctcgaaggcagaaagatccccactgaaactgaaaccaacgctgaggaacttatgcactacttcaaggaaatgtccatgatgagaagaatggaaatcgctctcgacaacctctacaaggctcgtgaaatcagaggtttctgccatttgtacgatggtcaggaatctattgccatgggtatcgaagctgccgttacttttgaagattgtttgatcactgcttacagagaccattgccaagcttactgcagaggtgattccgtccatcaaattatcgctgaattgatgggtaagagaaccggttcaaccaacggtaagggtggttctatgcatttctacagaaagaagaccaacttctatggtggtcacggtattgtcggtgctcaatgtgccctcggtactggtttgggcttcgctttgaagtaccaaaagaagcccaatgttgccattactatgtacggtgatggtgctgccaaccaaggacaattgttcgaagctgccaatatggctgctttgtggaagctccccgtcctctacgtctgtgaaaacaaccattacgccatgggtacctccaccgccagaggtgctgccagtactgaatactataaaagacttatgcccgtccccggtattagatttgctgccaacaacgtctttgccgttagagaagtcaccaaattcgccaaggaatactccatcaaagaaggtcccatctgcctcgaaatgcaaacatacagataccacggtcactctatgtctgatcccggtgttacttacagaaagaagcaagaaatcgatgaatacagaaagactaaggattgtatcacccttgtcaagcaactcatcattgacaataaggtcgccactgaggaggatcttaaggaagttgaaagagccatcaagaaggaagtcgatgaaaccgtcgaaaaggtccgtgaagatgcttatcccgatgccaaggatctcctcaaggatgtgtatattgaagaccccaaggaaccccaacacatcagaggtgttgaatacgacaagtctttcgcccccagaggattgccttaagagatttccgcatactagaaatagtagaaattttataagtctataaatgaatttaatgccttgattaaaaatttcttgttaaagaaatctggaaaaagggatttcaaaatgatttattaaatgcgtatttattttatatgacttatattcgctatatagcttggacagcatacatcatcctcatataaaaaattcctcttaactc

SEQ ID NO: 58609 - protein, 388 aa, Glycine max
  peptide (1)..(388): Ceres Seq. ID no. 13594129
MNTFVKKTRGIISLATRGFASSSGAIKVKLLPSDTYNLEGRKIPTETETNAEELMHYFKEMSMMRRMEIALDNLYKAREIRGFCHLYDGQESIAMGIEAAVTFEDCLITAYRDHCQAYCRGDSVHQIIAELMGKRTGSTNGKGGSMHFYRKKTNFYGGHGIVGAQCALGTGLGFALKYQKKPNVAITMYGDGAANQGQLFEAANMAALWKLPVLYVCENNHYAMGTSTARGAASTEYYKRLMPVPGIRFAANNVFAVREVTKFAKEYSIKEGPICLEMQTYRYHGHSMSDPGVTYRKKQEIDEYRKTKDCITLVKQLIIDNKVATEEDLKEVERAIKKEVDETVEKVREDAYPDAKDLLKDVYIEDPKEPQHIRGVEYDKSFAPRGLP

SEQ ID NO: 58610 - protein, 334 aa, Glycine max
  peptide (1)..(334): Ceres Seq. ID no. 13594130
MHYFKEMSMMRRMEIALDNLYKAREIRGFCHLYDGQESIAMGIEAAVTFEDCLITAYRDHCQAYCRGDSVHQIIAELMGKRTGSTNGKGGSMHFYRKKTNFYGGHGIVGAQCALGTGLGFALKYQKKPNVAITMYGDGAANQGQLFEAANMAALWKLPVLYVCENNHYAMGTSTARGAASTEYYKRLMPVPGIRFAANNVFAVREVTKFAKEYSIKEGPICLEMQTYRYHGHSMSDPGVTYRKKQEIDEYRKTKDCITLVKQLIIDNKVATEEDLKEVERAIKKEVDETVEKVREDAYPDAKDLLKDVYIEDPKEPQHIRGVEYDKSFAPRGLP

SEQ ID NO: 58611 - protein, 328 aa, Glycine max
  peptide (1)..(328): Ceres Seq. ID no. 13594131
MSMMRRMEIALDNLYKAREIRGFCHLYDGQESIAMGIEAAVTFEDCLITAYRDHCQAYCRGDSVHQIIAELMGKRTGSTNGKGGSMHFYRKKTNFYGGHGIVGAQCALGTGLGFALKYQKKPNVAITMYGDGAANQGQLFEAANMAALWKLPVLYVCENNHYAMGTSTARGAASTEYYKRLMPVPGIRFAANNVFAVREVTKFAKEYSIKEGPICLEMQTYRYHGHSMSDPGVTYRKKQEIDEYRKTKDCITLVKQLIIDNKVATEEDLKEVERAIKKEVDETVEKVREDAYPDAKDLLKDVYIEDPKEPQHIRGVEYDKSFAPRGLP

SEQ ID NO: 58612 - DNA, 1364 bp, Glycine max
  misc_feature (1)..(1364): Ceres Seq. ID no. 15224558
gtcagctacgtaggccccccccccatttttaattagaaaaggcgcagaaacagaaacagaaagaatggctggtcccggcaaatgcttcctcgtgacgggtcctccgggtgtgggaaaaaccactcttattatgaaagtattcgagtccctcaaagtcaatccatccctcaagcttcagggcttctacactcgggaaattaggcgcgccggccagagggttggttttgaagtggtcacactcgacggtcgcactgccccacttgcttccatcgacatttcaacgttcattttttcattccctcactctttagctccacaccataaacatctcaatttttagtttaccataattagtacttaggacccattatctggtgtttctctgtttggtaacttgtatttattgctcatgccacttgagggtctttattcatttttcaacaaaggtactcatgtgatagtaaatcctaaaggggcaggcaaaaaatagatgaaacgaactgaactgtaaaaggggtttaggcaaactgaactgaactgcaactgaattgaaccggactgttctaaataaacatcttatacaactctgcctatttgattaaatggtgtcatttgattgcattgactttggcagccccgagtctctcagatggcctaatgttggcaagtataaagttgatgttgcttccttcgagtcactagcacttcccgagttacaggttaaagaagacactgatctcttcatcattgacgaagttggtaagatggagttgttcagttcctcattcttccctgcagttctaagagttttggagtcaaatatcccagttttggcttccattccagttccaaaattcggcagagacatacctgaagttgcaaggttgcggaatcatgcaggggcaacttgttttacattgagcgttagtaacagagatgctgttagagaacagatacgctcacaattggaagatatgctgacaaaacactagtcattgcaagtttgtggtctgaattcataccgtgtaatgtagaataaattatgaatttatgatgggctaatactatttagtgagagaaaaaaaaagtgcaaatcttaatcgagccttaaataagttgataagctagttgagctttgaataccattagtagtatacatgacttatctgcatgatagtccttttgtaatgacttatctgtatgtctgtattatggacaatatcttctgcaggaaaaaaaaaaaaaaaaaaaaaaaaaaaaaaaaaaaaaaaaaaaaaaaaaaaaaaagaaaaaaaaaaaaaaaaaagatttcctgcaccccggggaatccactagttctaaagcgcccgcccccgcgggggagc

SEQ ID NO: 58613 - protein, 129 aa, Glycine max
  peptide (1)..(129): Ceres Seq. ID no. 15224559
MVSFDCIDFGSPESLRWPNVGKYKVDVASFESLALPELQVKEDTDLFIIDEVGKMELFSSSFFPAVLRVLESNIPVLASIPVPKFGRDIPEVARLRNHAGATCFTLSVSNRDAVREQIRSQLEDMLTKH

SEQ ID NO: 58614 - protein, 91 aa, Glycine max
  peptide (1)..(91): Ceres Seq. ID no. 15224560
MAGPGKCFLVTGPPGVGKTTLIMKVFESLKVNPSLKLQGFYTREIRRAGQRVGFEVVTLDGRTAPLASIDISTFIFSFPHSLAPHHKHLNF

SEQ ID NO: 58615 - protein, 75 aa, Glycine max
  peptide (1)..(75): Ceres Seq. ID no. 15224561
MELFSSSFFPAVLRVLESNIPVLASIPVPKFGRDIPEVARLRNHAGATCFTLSVSNRDAVREQIRSQLEDMLTKH

SEQ ID NO: 58616 - DNA, 1407 bp, Glycine max
  misc_feature (1)..(1407): Ceres Seq. ID no. 14308679
gagaagaaacgagagcgagagagagaaagaaatggcgaccaacattgggatcatggatgcggcttacttcgtcggcagatctgagattctttcttggatcaactcaactctgcaactcaatctctccaaagtcgaagaggcttgttccggcgccgttcattgtcagcttctcgatgccgctcatccagggatcgtgcctatgcacaaggtcaatttcgacgccaagagcgagtacgagatgattcagaactacaaggtccttcaagatgtcttcaacaaactcaaaatcaccaagcacatcgaggtcagcaagctggtgaaaggaaggccactggataacctcgagttcatgcaatggatgaaacgatactgcgattctgtcgattccggccttcagtacaattataatcctctggagaggagagaggtttgcaaaggaggaagagaaacgagcaagaaatctgcaaactcccaagcctcaaccaagggttctactgcacagagacctcattcttctcataatgctcgaagaaatgaggtttctaatgcaaaccctacaaatcaggctgcaaaggttgcgagagcagcaccttctgctggaaaccctgctcctgtgtatgaagaaaagataacagagttgaagttgtccattgatagccttgagaaggaacgagatttctacttcgcaaagctgagagatattgagatactgtgccagactcctgagatagaacactcaccgattgttgcggcaatacagaagatattatatgctacagatgacaatggaatggctgtggtcgaagctcaagctatgatttctgttggtcgtaaggaaatagagggattaagccccattgctgaggtttcggaggagaagagcagttcagaaactcataagagaaagaatattgccaatattgattttgatgttgctggcctcgcaacgttgtctcccagacagaggctttctgatgtttcagatgttcattgtagcgagtcacctcttatgacttgttagggaggaggaaggatcaccttctgttgttaattcagttagcaacatgttaaaaccgttttggtcacagtaattcctgttacaagtgtgaattgacagggttattcataatggttaggggttttagggagactattctgttatcaagtatcaagtatcgggtatcgggtatcagcccagaaaaatgtagccagatatattttgcctttagaatttgcttgttgtctcaacaatgtttctgaatccagtcatgtaatttctggctagtgctttgagcaacactatttcattttcagcatttttttcatttattatgtgatgatcaaattgtttacaattcagggaaaattacatatcggaatttgtaattaatttctgaattcggtctt

SEQ ID NO: 58617 - protein, 339 aa, Glycine max
  peptide (1)..(339): Ceres Seq. ID no. 14308680
RRNESEREKEMATNIGIMDAAYFVGRSEILSWINSTLQLNLSKVEEACSGAVHCQLLDAAHPGIVPMHKVNFDAKSEYEMIQNYKVLQDVFNKLKITKHIEVSKLVKGRPLDNLEFMQWMKRYCDSVDSGLQYNYNPLERREVCKGGRETSKKSANSQASTKGSTAQRPHSSHNARRNEVSNANPTNQAAKVARAAPSAGNPAPVYEEKITELKLSIDSLEKERDFYFAKLRDIEILCQTPEIEHSPIVAAIQKILYATDDNGMAVVEAQAMISVGRKEIEGLSPIAEVSEEKSSSETHKRKNIANIDFDVAGLATLSPRQRLSDVSDVHCSESPLMTC

SEQ ID NO: 58618 - protein, 329 aa, Glycine max
  peptide (1)..(329): Ceres Seq. ID no. 14308681
MATNIGIMDAAYFVGRSEILSWINSTLQLNLSKVEEACSGAVHCQLLDAAHPGIVPMHKVNFDAKSEYEMIQNYKVLQDVFNKLKITKHIEVSKLVKGRPLDNLEFMQWMKRYCDSVDSGLQYNYNPLERREVCKGGRETSKKSANSQASTKGSTAQRPHSSHNARRNEVSNANPTNQAAKVARAAPSAGNPAPVYEEKITELKLSIDSLEKERDFYFAKLRDIEILCQTPEIEHSPIVAAIQKILYATDDNGMAVVEAQAMISVGRKEIEGLSPIAEVSEEKSSSETHKRKNIANIDFDVAGLATLSPRQRLSDVSDVHCSESPLMTC

SEQ ID NO: 58619 - protein, 322 aa, Glycine max
  peptide (1)..(322): Ceres Seq. ID no. 14308682
MDAAYFVGRSEILSWINSTLQLNLSKVEEACSGAVHCQLLDAAHPGIVPMHKVNFDAKSEYEMIQNYKVLQDVFNKLKITKHIEVSKLVKGRPLDNLEFMQWMKRYCDSVDSGLQYNYNPLERREVCKGGRETSKKSANSQASTKGSTAQRPHSSHNARRNEVSNANPTNQAAKVARAAPSAGNPAPVYEEKITELKLSIDSLEKERDFYFAKLRDIEILCQTPEIEHSPIVAAIQKILYATDDNGMAVVEAQAMISVGRKEIEGLSPIAEVSEEKSSSETHKRKNIANIDFDVAGLATLSPRQRLSDVSDVHCSESPLMTC

SEQ ID NO: 58620 - DNA, 1358 bp, Glycine max
  misc_feature (1)..(1358): Ceres Seq. ID no. 14308331
gaatgaacactttactcatcgctttgtcagttatagggcaagcagctgccgaccggctgctggtggcttcatacggaaatgaaactcatgctggcgccatccagacgctcgaagtactgcctagcacaagcgcaaattctagccatgcgatgaaagttacccaagagaaccacgagtgtggaactttgcctacatggttggatgcgtcccttggcctggataggatagtctgtctagacgaatcagctgccaatgctagtctcacaatgttgagccttggtgatgacggcagcctccaaaaggtgtccaataccagtgtgctgggaggagcagtatcctcggcgtcctacaataacaaatccgcattagcccttgctcactacggacccgagccagccatatcactgtttactatcgatggggaaaacaaattttcgtctttgcaaaacatcaccttccaggcgcctgagcaaatccatcaagcggtcgtcgatcctacggggcaatacatgatattccccagtctcggtgcagatacagtccacgtctattgcatcgatcctgtcagccacttgctcacagagcatgcgccactcaaatccaagcaaggatacggtccgcgacatgcagttttctggacaggttccaattctacaaagacgtacctttttgtagtccatgagaagagcaacaaaatcactagttacgaagtttgttatctggagcagggtggcctagcttttaccgaagtcgacgaggtcagcacatacggcaatcaaaccgtcccaccagcgacgttcgcttcggagatgacgctctcgcctgataacaagttcttgatcgcagcaaaccgtaacggcacagttttcaaagcagagaattcggacccaaccaacagcactcaagttccaagtgattcacttgtgacgttcaaaccgtcagccgacgggaagctatcgtttgtccagcttgcaaaatcagggggatggtaccctcgccacttcagtatgaaccagaatggatcgttgattgcggtcgcaaatcaactcagcaaaaacgtcgacatctatgcccgtaacctagaaactggaatcatcgaagacagcaaagcggtggcaagagctaataatctcgggcccggcgatttgatgttcgtgcagtgggtggggcaacaatagatcatgattgaaattctattcaaagctcaagcagatgagcagtagacctgatatttagcgggttactccacccatgttctatatggagatttctcaaccctatttttgtgcatagcatggcggaattttgtattgtagcatagcatcaaggagtgttagctgaagatacccagttttcct

SEQ ID NO: 58621 - protein, 391 aa, Glycine max
  peptide (1)..(391): Ceres Seq. ID no. 14308332
MNTLLIALSVIGQAAADRLLVASYGNETHAGAIQTLEVLPSTSANSSHAMKVTQENHECGTLPTWLDASLGLDRIVCLDESAANASLTMLSLGDDGSLQKVSNTSVLGGAVSSASYNNKSALALAHYGPEPAISLFTIDGENKFSSLQNITFQAPEQIHQAVVDPTGQYMIFPSLGADTVHVYCIDPVSHLLTEHAPLKSKQGYGPRHAVFWTGSNSTKTYLFVVHEKSNKITSYEVCYLEQGGLAFTEVDEVSTYGNQTVPPATFASEMTLSPDNKFLIAANRNGTVFKAENSDPTNSTQVPSDSLVTFKPSADGKLSFVQLAKSGGWYPRHFSMNQNGSLIAVANQLSKNVDIYARNLETGIIEDSKAVARANNLGPGDLMFVQWVGQQ

SEQ ID NO: 58622 - protein, 342 aa, Glycine max
  peptide (1)..(342): Ceres Seq. ID no. 14308333
MKVTQENHECGTLPTWLDASLGLDRIVCLDESAANASLTMLSLGDDGSLQKVSNTSVLGGAVSSASYNNKSALALAHYGPEPAISLFTIDGENKFSSLQNITFQAPEQIHQAVVDPTGQYMIFPSLGADTVHVYCIDPVSHLLTEHAPLKSKQGYGPRHAVFWTGSNSTKTYLFVVHEKSNKITSYEVCYLEQGGLAFTEVDEVSTYGNQTVPPATFASEMTLSPDNKFLIAANRNGTVFKAENSDPTNSTQVPSDSLVTFKPSADGKLSFVQLAKSGGWYPRHFSMNQNGSLIAVANQLSKNVDIYARNLETGIIEDSKAVARANNLGPGDLMFVQWVGQQ

SEQ ID NO: 58623 - protein, 303 aa, Glycine max
  peptide (1)..(303): Ceres Seq. ID no. 14308334
MLSLGDDGSLQKVSNTSVLGGAVSSASYNNKSALALAHYGPEPAISLFTIDGENKFSSLQNITFQAPEQIHQAVVDPTGQYMIFPSLGADTVHVYCIDPVSHLLTEHAPLKSKQGYGPRHAVFWTGSNSTKTYLFVVHEKSNKITSYEVCYLEQGGLAFTEVDEVSTYGNQTVPPATFASEMTLSPDNKFLIAANRNGTVFKAENSDPTNSTQVPSDSLVTFKPSADGKLSFVQLAKSGGWYPRHFSMNQNGSLIAVANQLSKNVDIYARNLETGIIEDSKAVARANNLGPGDLMFVQWVGQQ

SEQ ID NO: 58624 - DNA, 1710 bp, Glycine max
  misc_feature (1)..(1710): Ceres Seq. ID no. 13594068
aaatttggacagtgaggccattttggtcatggtgtgatcattttctctgctcttattcttaatgaggcttatatccaagtttggccggttgcatattgcacaaggcgtctataaaagtaacatcactgaaatcattgtcaaattgacactgcttttctctaaaaggacttcaaagttctgttagatatacagtgttattctgctttcgatcgctctattattcatttgctaagaccttagagaagacagaggatgggtaccctgcttccagatgaaaaatcagagaatccaaatgctttggaacaacttcaacaccaaaaagatgtggatgcaggcgctctctttgtcctcaaatccaaaggttcttggatgcattgtgggtaccacttgacaacttcgatcgtggcaccacctcttctaagtcttccttatgcattcaccttccttggatggacggctgggatcttaagcttagtgattggagctttggtcactttctattcatacaatttaatatctagggttcttgaacaccacgctcagatgggtatgcgtcagctacgctttagagacatggctcgcgatattttaggtccagggtggggtcgttattttgtcggcccaattcaattcgcagtctgttatggtgctgtagtagcttgtactctcttgggaggacaatgcatgaaggcaatttacttgctgtcaaatccaaacgggaccatgaagctttacgagtttgtaattatatttggatgcttcatgctgattttggctcaaatcccatctttccactctttgaggcacattaatctagtgtccttggttctgtgcttagcctatagtgccggtgctactattggttccatttacattggagactcatcaaaaggaccagaaaaggattattctttgaaaggtgattcagtgaatcgcttatttggaatcttcaatgcaattgctatcattgccacgacttatggaaatggaatcattccagaaattcaggcaacattagcaccacccgtaaaagggaagatgctcaagggactatgtgtttgttatcttgttcttatagttaccttctttagtgtatctgtatccggttattgggcatttggtaatgaatcagaaggcctcatcttaagcaacttcgtggacaatgggaagcctctggtgcccaagtggttcatttacatgaccaacattttcactataacacaattatctgcggttggtgtggtttatttgcaaccaacaaatgaagtgctagagcaaacatttggagacccaaaaagccccgagttctccaaacgcaatgtaatccctagagtgatatctcggtcattagctattgctatttcaaccactatagcagccatgcttccattttttggagacataaactctcttataggagcttttggctttatcccacttgacttcatcttgccaatggttttctacaatttgacatttaagccatctaagcgaagccctgttttctggttgaatgtgataattgttgtggctttctccgcattgggagctatagcagcagttgcagcagttaggcagatagttcttgatgctaaaaattattaattatttgctaatgtatgatcatgttggaccatccaatgaagttttgttgttctatgtatcatggttcatactctagtagtttaaaaccaatcattgagttatttc

SEQ ID NO: 58625 - protein, 450 aa, Glycine max
  peptide (1)..(450): Ceres Seq. ID no. 13594069
MGTLLPDEKSENPNALEQLQHQKDVDAGALFVLKSKGSWMHCGYHLTTSIVAPPLLSLPYAFTFLGWTAGILSLVIGALVTFYSYNLISRVLEHHAQMGMRQLRFRDMARDILGPGWGRYFVGPIQFAVCYGAVVACTLLGGQCMKAIYLLSNPNGTMKLYEFVIIFGCFMLILAQIPSFHSLRHINLVSLVLCLAYSAGATIGSIYIGDSSKGPEKDYSLKGDSVNRLFGIFNAIAIIATTYGNGIIPEIQATLAPPVKGKMLKGLCVCYLVLIVTFFSVSVSGYWAFGNESEGLILSNFVDNGKPLVPKWFIYMTNIFTITQLSAVGVVYLQPTNEVLEQTFGDPKSPEFSKRNVIPRVISRSLAIAISTTIAAMLPFFGDINSLIGAFGFIPLDFILPMVFYNLTFKPSKRSPVFWLNVIIVVAFSALGAIAAVAAVRQIVLDAKNY

SEQ ID NO: 58626 - protein, 411 aa, Glycine max
  peptide (1)..(411): Ceres Seq. ID no. 13594070
MHCGYHLTTSIVAPPLLSLPYAFTFLGWTAGILSLVIGALVTFYSYNLISRVLEHHAQMGMRQLRFRDMARDILGPGWGRYFVGPIQFAVCYGAVVACTLLGGQCMKAIYLLSNPNGTMKLYEFVIIFGCFMLILAQIPSFHSLRHINLVSLVLCLAYSAGATIGSIYIGDSSKGPEKDYSLKGDSVNRLFGIFNAIAIIATTYGNGIIPEIQATLAPPVKGKMLKGLCVCYLVLIVTFFSVSVSGYWAFGNESEGLILSNFVDNGKPLVPKWFIYMTNIFTITQLSAVGVVYLQPTNEVLEQTFGDPKSPEFSKRNVIPRVISRSLAIAISTTIAAMLPFFGDINSLIGAFGFIPLDFILPMVFYNLTFKPSKRSPVFWLNVIIVVAFSALGAIAAVAAVRQIVLDAKNY

SEQ ID NO: 58627 - protein, 353 aa, Glycine max
  peptide (1)..(353): Ceres Seq. ID no. 13594071
MGMRQLRFRDMARDILGPGWGRYFVGPIQFAVCYGAVVACTLLGGQCMKAIYLLSNPNGTMKLYEFVIIFGCFMLILAQIPSFHSLRHINLVSLVLCLAYSAGATIGSIYIGDSSKGPEKDYSLKGDSVNRLFGIFNAIAIIATTYGNGIIPEIQATLAPPVKGKMLKGLCVCYLVLIVTFFSVSVSGYWAFGNESEGLILSNFVDNGKPLVPKWFIYMTNIFTITQLSAVGVVYLQPTNEVLEQTFGDPKSPEFSKRNVIPRVISRSLAIAISTTIAAMLPFFGDINSLIGAFGFIPLDFILPMVFYNLTFKPSKRSPVFWLNVIIVVAFSALGAIAAVAAVRQIVLDAKNY

SEQ ID NO: 58628 - DNA, 1191 bp, Glycine max
  misc_feature (1)..(1191): Ceres Seq. ID no. 15225313
accggggccccnnncgagtcagctacgtaggccccccccccccactttttctttggcagcttagccttcctattttggaaaccctcttcactgctctcccaccttttttgtgtgtatgtgtatgagcttctcttctactctattcactgcactcttattaataaatatcagtgcttggaaagcagaagagaagatccatagctaagatagatctcgagatgggtcgtggcaagattgagataaagttgattgagaaccccaccaacaggcaagtcacctactccaagcgaaggaatggtatcttcaagaaagctcatgaactcagtgttctctgtgatgccaaggtttcactcatcatgttctctaaaaacaacaagatgcatgaatacattagccctggcctcacgacaaaaaagatcattgatcagtatcagaagactttgggggatattgatctgtggcattctcactatgagaaaatgcttgaaaacttgaagaagctgaaagatattaacaataagctcaggagacagatcaggcataggataggtgagggcttggacatggacgacatgagcttccagcaactgcgcactcttgaagaagatatggtttcatccatagggaaaatacgcgaacgaaagtttcacgtgatcaaaactcggactgatacctgtaggaaaaaggttaaaagcctgaagcagatgaatggaaatctgctgcttgaacttgaaaagtgtgtgatccatccacaatttcttttgcacgatgaaggagacgaggaatcagcagcagcagcagcagcagcagcagttgcactggccaacggtgcctccaccctgtatgcattctgtcatcagcaccattctcatctgaaccttttctcccaccattctaatggagaagagcaaccctttaaaactgatcatgaccttcgccttgcttgatccagtgcaacaattaactagcaataatgtaaattaactagctagccagcactaagcacttgttatttatgctttaatttgtattaattggacctgttaaacccaactttgcttgcaacctctctagtttctatccaggtagagaattagctaagcttatatagtgtttggcaagagcgtgctatgaaaaacagaaagactgtactttatttgttattataagtttacattgagtgattatgtt

SEQ ID NO: 58629 - protein, 242 aa, Glycine max
  peptide (1)..(242): Ceres Seq. ID no. 15225314
MGRGKIEIKLIENPTNRQVTYSKRRNGIFKKAHELSVLCDAKVSLIMFSKNNKMHEYISPGLTTKKIIDQYQKTLGDIDLWHSHYEKMLENLKKLKDINNKLRRQIRHRIGEGLDMDDMSFQQLRTLEEDMVSSIGKIRERKFHVIKTRTDTCRKKVKSLKQMNGNLLLELEKCVIHPQFLLHDEGDEESAAAAAAAAVALANGASTLYAFCHQHHSHLNLFSHHSNGEEQPFKTDHDLRLA

SEQ ID NO: 58630 - protein, 196 aa, Glycine max
  peptide (1)..(196): Ceres Seq. ID no. 15225315
MFSKNNKMHEYISPGLTTKKIIDQYQKTLGDIDLWHSHYEKMLENLKKLKDINNKLRRQIRHRIGEGLDMDDMSFQQLRTLEEDMVSSIGKIRERKFHVIKTRTDTCRKKVKSLKQMNGNLLLELEKCVIHPQFLLHDEGDEESAAAAAAAAVALANGASTLYAFCHQHHSHLNLFSHHSNGEEQPFKTDHDLRLA

SEQ ID NO: 58631 - protein, 189 aa, Glycine max
  peptide (1)..(189): Ceres Seq. ID no. 15225316
MHEYISPGLTTKKIIDQYQKTLGDIDLWHSHYEKMLENLKKLKDINNKLRRQIRHRIGEGLDMDDMSFQQLRTLEEDMVSSIGKIRERKFHVIKTRTDTCRKKVKSLKQMNGNLLLELEKCVIHPQFLLHDEGDEESAAAAAAAAVALANGASTLYAFCHQHHSHLNLFSHHSNGEEQPFKTDHDLRLA

SEQ ID NO: 58632 - DNA, 1761 bp, Glycine max
  misc_feature (1)..(1761): Ceres Seq. ID no. 14312300
gagcttgagagacaaatgtggcacataagagaacagattgggagagaaaaaagtacacgacccgagaaagcaaaagggcatgcacgtcatcgtggaaagaaagaaaactcttctcttcttcccagagaaagaaagaaacacatttcccttccaaggaaagaaaataaaaacgtaacatcattggaatcaaaatcaggatgatgggtagttgcccttgtttcgggttgtggagctggaagaccaaagggaagaccgtcaaggctcaggaggaacaaaacaagaatcgcaaatctctcgatgtctctgaaacttcttcaggacttggaccagaagaaaacccaacagagagtgacagttctcataaggctcagatatttaccttccgagagcttgcaacagcaacaaaaaattttagggatgaaacctttattgggcaaggtggatttggcactgtttataaaggaacaatcggaaaaataaatcaggttgtagctgttaaaagacttgatactactgttgtccaaggggagaaagaatttctggtggaagttctcatgctttcccttctacgccattccaaccttgttaatatgattggttactgtgctgaaggggatcaacgtcttcttgtgtatgagtacatggctttaggatctttagaatctcatcttcatgatgtttcacctgatgaagaaccactcgattggaataccagaatgatgatagcttttggggcagcaaaaggactaaattatctgcaccatgaagcaaagccctctgttatatacagggatctgaaatcatccaacatactattggatgaaggtttccatccaaaactttctgattttgggcttgcaaaatttggtccaaccggagaacaatcgtatgttgccactagggtcatgggaacacaaggttactgtgcccctgaatatgccactagtggaaaattaacgatgagatctgacatttacagttttggggttgtgttattggaactaattactggacgcagagcatatgatgataatggtggccctgaaaagcatcttgtagaatgggcacgcccaatgtttagagacaaaaagagttatccaagatttgcagatccgcggcttaaaggttgctacccaggaacagctctctcgaatgccattgaattggcagccatgtgtcttcgtgaagagccacgtcaacggcctaatgcaggtcatatagtggaagctctcaaattcttgtcatccaaaccatataccccgaaagtatccattacagtcaacacaacaggtatggagagtggagattctccaaaagaaacaccagcgattttgcctcaagaatcagaaagagagcgagctgttgcagaggccaagctgtggggtgagacatggaggcagagacgacaaagtgagcaaagtagtcctgaaggaagcaaatagggggtaccagaaagaaaaccttcaaagcagattagaagtggctagtatctaaaaaggtatagggaaagtaaagaaacttcaaaagataatgtgttcaagatttaaatgtagctaataaaattagttggccagctaaatttaaaaagtgtcgtttaggcacttgtgaatttgaggctcaactttacatgctttgacatgagtttttagattttatggttgctcttgctttgctgcattgaaaaatatgatacattactactacttctatgttctaactctaactgctggagcctggaagcaaacacaaattttttaacag

SEQ ID NO: 58633 - protein, 414 aa, Glycine max
  peptide (1)..(414): Ceres Seq. ID no. 14312301
MMGSCPCFGLWSWKTKGKTVKAQEEQNKNRKSLDVSETSSGLGPEENPTESDSSHKAQIFTFRELATATKNFRDETFIGQGGFGTVYKGTIGKINQVVAVKRLDTTVVQGEKEFLVEVLMLSLLRHSNLVNMIGYCAEGDQRLLVYEYMALGSLESHLHDVSPDEEPLDWNTRMMIAFGAAKGLNYLHHEAKPSVIYRDLKSSNILLDEGFHPKLSDFGLAKFGPTGEQSYVATRVMGTQGYCAPEYATSGKLTMRSDIYSFGVVLLELITGRRAYDDNGGPEKHLVEWARPMFRDKKSYPRFADPRLKGCYPGTALSNAIELAAMCLREEPRQRPNAGHIVEALKFLSSKPYTPKVSITVNTTGMESGDSPKETPAILPQESERERAVAEAKLWGETWRQRRQSEQSSPEGSK

SEQ ID NO: 58634 - protein, 413 aa, Glycine max
  peptide (1)..(413): Ceres Seq. ID no. 14312302
MGSCPCFGLWSWKTKGKTVKAQEEQNKNRKSLDVSETSSGLGPEENPTESDSSHKAQIFTFRELATATKNFRDETFIGQGGFGTVYKGTIGKINQVVAVKRLDTTVVQGEKEFLVEVLMLSLLRHSNLVNMIGYCAEGDQRLLVYEYMALGSLESHLHDVSPDEEPLDWNTRMMIAFGAAKGLNYLHHEAKPSVIYRDLKSSNILLDEGFHPKLSDFGLAKFGPTGEQSYVATRVMGTQGYCAPEYATSGKLTMRSDIYSFGVVLLELITGRRAYDDNGGPEKHLVEWARPMFRDKKSYPRFADPRLKGCYPGTALSNAIELAAMCLREEPRQRPNAGHIVEALKFLSSKPYTPKVSITVNTTGMESGDSPKETPAILPQESERERAVAEAKLWGETWRQRRQSEQSSPEGSK

SEQ ID NO: 58635 - protein, 295 aa, Glycine max
  peptide (1)..(295): Ceres Seq. ID no. 14312303
MLSLLRHSNLVNMIGYCAEGDQRLLVYEYMALGSLESHLHDVSPDEEPLDWNTRMMIAFGAAKGLNYLHHEAKPSVIYRDLKSSNILLDEGFHPKLSDFGLAKFGPTGEQSYVATRVMGTQGYCAPEYATSGKLTMRSDIYSFGVVLLELITGRRAYDDNGGPEKHLVEWARPMFRDKKSYPRFADPRLKGCYPGTALSNAIELAAMCLREEPRQRPNAGHIVEALKFLSSKPYTPKVSITVNTTGMESGDSPKETPAILPQESERERAVAEAKLWGETWRQRRQSEQSSPEGSK

SEQ ID NO: 58636 - DNA, 1688 bp, Glycine max
  misc_feature (1)..(1688): Ceres Seq. ID no. 14308091
gaaacaaagtagagagcaaaagaatggtgggaacagaggcagcagaaaaaatgagtgtcaatgaagaaaaagatttgattagcactcttcctgattcagttcttgtctctatcatttctctccttccctgcaacgaaggcgtgagaacctgtgttctttccaaccgatggaaaaccatgtggaaacatgttcctcaccttagcttggatcagagcaaaatgttgaagcttttgatccgagcttatcttcgcgggctataccttagcacgcgtcttgaaatggcttataatcgtcgtaggggagatcaagaaaaagattttgaagacttggatgaaattgctaaagcagaggtgttgattgattcagtgttggattcacacgttgtttctttggaaagttgtactattcggcacctgccagaaagttgtgctagtggcaaagctgttatgtggatcgagaaactccttaagcaaaataaggtgaagaagctttcaatggagcgagatgacactgattatttgggctctgaggaaagtttgccacgggttctgagatatcatggaaggactctagacttgccttttaagattttctcaggctttgaggcacttgagttgaagaactattttctcaagacttcgccctcgagtaatgattcttgccaggttcttacaactttagcctttaggaacatgagtgttaagaaggatgcttgggaagggattttgtcttgttgcctgtgtcttgaaaatttaacacttgaaaatttaacacatgataactgcaagttgatgagagaggttactatcaatagtccaagactcaaatttctcagaatttgtagaatgcagatgaatgggtttaaggtttctgctgtgaaccttgaggtctttgagattgatactgttgtttgtatgccgaaaagactacttacttttgaaatcccaaaggttcatctgcttcgatctcgctctgatttgaaaattagagggcaatatatttgttgggttgggagcaaactgttgcagtcgagaaatattctacacactagcagccagagtcatcaaggaacaacttcgagctttgctggaatatttgagaacctggctactctatgtattgattttgatttgaaaacagtaaaaaatgccataaccctcttttcagctcttaaggcatgcccaaagttgcaaaatcttgaaattaatagcgagattaatgacaacgcagtggattactatgatcaacatgatgaggatgatgcaatggaatactaccgtagaaaggagccatgtgagtgcatcgatcaacaactaaagacccttagcataatgggatttgcaggaaaaaaactgaggtggaattccttaaatatgtaataacaaatggtgaagtaatgaagaagattacaatttggtttgttgatgattgctcatggattcatgccgctgaaactggatgtttgctatcatttcagacagcctctccaaacttgtccatcattctcaatcctgggccattttacatggcaaatgtgggtgggaactttgaaacatggctctcaactctaagggagtaggaaatttaccggtgaccatggccaaactatgtgtttcaaattctattttagtcttgaactttgaatatttctagtattacgtttataacactaaagacagattagtggc

SEQ ID NO: 58637 - protein, 458 aa, Glycine max
  peptide (1)..(458): Ceres Seq. ID no. 14308092
NKVESKRMVGTEAAEKMSVNEEKDLISTLPDSVLVSIISLLPCNEGVRTCVLSNRWKTMWKHVPHLSLDQSKMLKLLIRAYLRGLYLSTRLEMAYNRRRGDQEKDFEDLDEIAKAEVLIDSVLDSHVVSLESCTIRHLPESCASGKAVMWIEKLLKQNKVKKLSMERDDTDYLGSEESLPRVLRYHGRTLDLPFKIFSGFEALELKNYFLKTSPSSNDSCQVLTTLAFRNMSVKKDAWEGILSCCLCLENLTLENLTHDNCKLMREVTINSPRLKFLRICRMQMNGFKVSAVNLEVFEIDTVVCMPKRLLTFEIPKVHLLRSRSDLKIRGQYICWVGSKLLQSRNILHTSSQSHQGTTSSFAGIFENLATLCIDFDLKTVKNAITLFSALKACPKLQNLEINSEINDNAVDYYDQHDEDDAMEYYRRKEPCECIDQQLKTLSIMGFAGKKLRWNSLNM

SEQ ID NO: 58638 - protein, 451 aa, Glycine max
  peptide (1)..(451): Ceres Seq. ID no. 14308093
MVGTEAAEKMSVNEEKDLISTLPDSVLVSIISLLPCNEGVRTCVLSNRWKTMWKHVPHLSLDQSKMLKLLIRAYLRGLYLSTRLEMAYNRRRGDQEKDFEDLDEIAKAEVLIDSVLDSHVVSLESCTIRHLPESCASGKAVMWIEKLLKQNKVKKLSMERDDTDYLGSEESLPRVLRYHGRTLDLPFKIFSGFEALELKNYFLKTSPSSNDSCQVLTTLAFRNMSVKKDAWEGILSCCLCLENLTLENLTHDNCKLMREVTINSPRLKFLRICRMQMNGFKVSAVNLEVFEIDTVVCMPKRLLTFEIPKVHLLRSRSDLKIRGQYICWVGSKLLQSRNILHTSSQSHQGTTSSFAGIFENLATLCIDFDLKTVKNAITLFSALKACPKLQNLEINSEINDNAVDYYDQHDEDDAMEYYRRKEPCECIDQQLKTLSIMGFAGKKLRWNSLNM

SEQ ID NO: 58639 - protein, 442 aa, Glycine max
  peptide (1)..(442): Ceres Seq. ID no. 14308094
MSVNEEKDLISTLPDSVLVSIISLLPCNEGVRTCVLSNRWKTMWKHVPHLSLDQSKMLKLLIRAYLRGLYLSTRLEMAYNRRRGDQEKDFEDLDEIAKAEVLIDSVLDSHVVSLESCTIRHLPESCASGKAVMWIEKLLKQNKVKKLSMERDDTDYLGSEESLPRVLRYHGRTLDLPFKIFSGFEALELKNYFLKTSPSSNDSCQVLTTLAFRNMSVKKDAWEGILSCCLCLENLTLENLTHDNCKLMREVTINSPRLKFLRICRMQMNGFKVSAVNLEVFEIDTVVCMPKRLLTFEIPKVHLLRSRSDLKIRGQYICWVGSKLLQSRNILHTSSQSHQGTTSSFAGIFENLATLCIDFDLKTVKNAITLFSALKACPKLQNLEINSEINDNAVDYYDQHDEDDAMEYYRRKEPCECIDQQLKTLSIMGFAGKKLRWNSLNM

SEQ ID NO: 58640 - DNA, 1387 bp, Glycine max
  misc_feature (1)..(1387): Ceres Seq. ID no. 15176219
gaataatttatctccattaacatcccaagcagtcccaagaaagaacagggcaaaaacagaatagaaacagagatgggttgcaatagctccaaggctgaaccaccgttggaaaactccaatcatcatcatcatcatcatcatcatgcagagttccaaaaacccaaaactctcaaacaagaagtagtgctgcagattccaggatgcaaagttcatctgatggacgaaggcgaagccatagaactggcacaaggtcacttcacaatcatgaagatcatggacaagaacgtgccactagcaaccaccataaaagttggaaacagtgttcagtggcctctaacgaaagatgagccagtggtgaaggtggatgctcttcactacctgttctctctgcctgtaaaagatggtggtgagcctctaagctatggtgtcacctttccagaacagtgctatgggaacatggggatgttagattcttttctgaaggatcaatcttgcttttctggtttggaaaggaataagaagagtgatcttaattgggagaagtttgctccaagggttgaagattacaatcattttctggctagggcaattgcaggagggactggccagattgttaagggtatcttcatgtgcagcaatgcttacaccaaccaggtccaaaaaggaggggaaacgatcctaaatactgctgcagaaaagaacaatggtagcgtggtcacagaaagtatgaaccacaggagtgatgccacaaagaataatgcaacgaacgaaaacctcaaacgagtgagaaagctgacaaatatgacagaaaagttaaccaaatctttgcttgatggtgttggaataatgagtggatcaatgatggctcctgtgctgaaatcccaaccaggacaggcattcctaaagatgctccctggagaggtgctgttggcttcccttgatgcagtcaatagagtttttgaagcagctgaagctgctgaaaaacaaaccttttcagccacctcccaagctgcaaccagaatggtttctaacaggtttggggaagaagcaggggaggctactgagcatgtgtttgcaactgcaggacattctgttaacactgcttggaatgtctctaagatacggaaggccatcaatccagcctcttcagcaaatgctgcaggagcactgagaaattctgccaagaatagaaatgttatatattaaattccaatcatgttgctttatgtttgacaatggtgaaggcataaaattttgcctatatatattgctaaacctttttggctgttatatgtaagtattaatgtaggtattgttcataccttagaagaaacaaactatataaagtgtacacatgaaaaagctaagatagcattattatgctttc

SEQ ID NO: 58641 - protein, 377 aa, Glycine max
  peptide (1)..(377): Ceres Seq. ID no. 15176220
MGCNSSKAEPPLENSNHHHHHHHHAEFQKPKTLKQEVVLQIPGCKVHLMDEGEAIELAQGHFTIMKIMDKNVPLATTIKVGNSVQWPLTKDEPVVKVDALHYLFSLPVKDGGEPLSYGVTFPEQCYGNMGMLDSFLKDQSCFSGLERNKKSDLNWEKFAPRVEDYNHFLARAIAGGTGQIVKGIFMCSNAYTNQVQKGGETILNTAAEKNNGSVVTESMNHRSDATKNNATNENLKRVRKLTNMTEKLTKSLLDGVGIMSGSMMAPVLKSQPGQAFLKMLPGEVLLASLDAVNRVFEAAEAAEKQTFSATSQAATRMVSNRFGEEAGEATEHVFATAGHSVNTAWNVSKIRKAINPASSANAAGALRNSAKNRNVIY

SEQ ID NO: 58642 - protein, 329 aa, Glycine max
  peptide (1)..(329): Ceres Seq. ID no. 15176221
MDEGEAIELAQGHFTIMKIMDKNVPLATTIKVGNSVQWPLTKDEPVVKVDALHYLFSLPVKDGGEPLSYGVTFPEQCYGNMGMLDSFLKDQSCFSGLERNKKSDLNWEKFAPRVEDYNHFLARAIAGGTGQIVKGIFMCSNAYTNQVQKGGETILNTAAEKNNGSVVTESMNHRSDATKNNATNENLKRVRKLTNMTEKLTKSLLDGVGIMSGSMMAPVLKSQPGQAFLKMLPGEVLLASLDAVNRVFEAAEAAEKQTFSATSQAATRMVSNRFGEEAGEATEHVFATAGHSVNTAWNVSKIRKAINPASSANAAGALRNSAKNRNVIY

SEQ ID NO: 58643 - protein, 313 aa, Glycine max
  peptide (1)..(313): Ceres Seq. ID no. 15176222
MKIMDKNVPLATTIKVGNSVQWPLTKDEPVVKVDALHYLFSLPVKDGGEPLSYGVTFPEQCYGNMGMLDSFLKDQSCFSGLERNKKSDLNWEKFAPRVEDYNHFLARAIAGGTGQIVKGIFMCSNAYTNQVQKGGETILNTAAEKNNGSVVTESMNHRSDATKNNATNENLKRVRKLTNMTEKLTKSLLDGVGIMSGSMMAPVLKSQPGQAFLKMLPGEVLLASLDAVNRVFEAAEAAEKQTFSATSQAATRMVSNRFGEEAGEATEHVFATAGHSVNTAWNVSKIRKAINPASSANAAGALRNSAKNRNVIY

SEQ ID NO: 58644 - DNA, 1402 bp, Glycine max
  misc_feature (1)..(1402): Ceres Seq. ID no. 13638136
gatagattatttctcttctcttccctttcttaggttaaaagttggaactgagtgattacccaactaatgttatgatcagttggaagcgttggcaagaaagaatatgtaatagtggtgttgtttgttcattttggtcaaagaaatagtatctgggtacccaggatattgtagttgtaagatgggttatctcaattcagttttgtcatcttcaagccaggttcatgttgcagatgatgcaattgtgagcggcgggggtctaagtcacaatggaaaattcagctacgggtatgctagctctcctggcaagagatcttcaatggaagatttttatgagacaagaattgatggtgttgaaggtgaaattgttggccttttcggagtttttgatggtcatggtggtgctcgtgctgctgagtatgtcaagaaaaacctgtttagtaatttgatcagtcacccaaaattcatttctgacaccaaatcagcaataactgatgcatacaatcatactgacactgagttgctgaaatcagaaaatagccataacagagatgcaggatcaactgcttccactgctattttagttggtgaccgcttgcttgttgcaaatgttggggattccagagctgttatatgcaggggtggtaatgccattgctgtttctcgagatcacaaaccagaccaaactgatgagaggcaaaggattgaagaagcaggaggctttgttatgtgggcaggaacttggagagttggaggtgttcttgctgtttctcgtgcatttggtgatagactcctgaagcagtatgttgttgctgatccagaaattcaggaagaaaaagttgacagctcccttgagtttcttattctggccagtgacgggctatgggatgttgtctctaatgaggaagctgttgctatgataaagccaattgaggatgcagaggaggcagcaaagaggctgatgcaagaagcatatcagagaggtagtgctgacaatatcacatgtgttgttgttcgtttcttgatgaaccaaggtggatccaaagagttagtagcttatcctcataatagtagctctgcgggtaagaatccttcagtagaaggtttgtgtgatatataggtataggtgagttgtggatccaaaagatgctgagacttggtaaaaatcggtttatagttgggttcctgataagcaatctagtagttgtgttgtactacgtcatgcaagaatttatggtcctcttgcataaaactattcattatttgttagctaggaaatgtatgtaaggagtgtgaccagagttctcattgcacctgctctgcatgtaaacatggttcttttattagtccatttaatttccttagggttattagtttattcagtactatttgtctattgtgaatt

SEQ ID NO: 58645 - protein, 312 aa, Glycine max
  peptide (1)..(312): Ceres Seq. ID no. 13638137
MGYLNSVLSSSSQVHVADDAIVSGGGLSHNGKFSYGYASSPGKRSSMEDFYETRIDGVEGEIVGLFGVFDGHGGARAAEYVKKNLFSNLISHPKFISDTKSAITDAYNHTDTELLKSENSHNRDAGSTASTAILVGDRLLVANVGDSRAVICRGGNAIAVSRDHKPDQTDERQRIEEAGGFVMWAGTWRVGGVLAVSRAFGDRLLKQYVVADPEIQEEKVDSSLEFLILASDGLWDVVSNEEAVAMIKPIEDAEEAAKRLMQEAYQRGSADNITCVVVRFLMNQGGSKELVAYPHNSSSAGKNPSVEGLCDI

SEQ ID NO: 58646 - protein, 266 aa, Glycine max
  peptide (1)..(266): Ceres Seq. ID no. 13638138
MEDFYETRIDGVEGEIVGLFGVFDGHGGARAAEYVKKNLFSNLISHPKFISDTKSAITDAYNHTDTELLKSENSHNRDAGSTASTAILVGDRLLVANVGDSRAVICRGGNAIAVSRDHKPDQTDERQRIEEAGGFVMWAGTWRVGGVLAVSRAFGDRLLKQYVVADPEIQEEKVDSSLEFLILASDGLWDVVSNEEAVAMIKPIEDAEEAAKRLMQEAYQRGSADNITCVVVRFLMNQGGSKELVAYPHNSSSAGKNPSVEGLCDI

SEQ ID NO: 58647 - DNA, 529 bp, Glycine max
  misc_feature (1)..(529): Ceres Seq. ID no. 13644527
tccttcgttcgcattttaggcattgaaaactaattgaaggagttgcagtccagcgttgatcagaatcagagcatggacgggcatgattcagaagacccaaagcaaagcactgctgatatgacagcttttgtgcaaaatcttcttcagcagatgcaacttaggttccagacaatgtctgactccatcatttctaagattgatgagatgggagaccgtataaatgagttggagcaaagcatcaatgatttaagatcagagatgggagtggagagcactccatcacctgtggcccctgctaagccaaaggaagaagagtcaaacaaagaagagggttctgcttgagtaatgttacgtgttcaactgccttgtcttttatttttgggtctcgtgtgattcattcaggattttgttactgtatatctagtgaactctctttgctagctaaaacatactgttcaaactatgtaaaaatcacagcactgttggtttattgtgtttttccaattgaagatgggctagattgggtgcc

SEQ ID NO: 58648 - protein, 89 aa, Glycine max
  peptide (1)..(89): Ceres Seq. ID no. 13644528
MDGHDSEDPKQSTADMTAFVQNLLQQMQLRFQTMSDSIISKIDEMGDRINELEQSINDLRSEMGVESTPSPVAPAKPKEEESNKEEGSA

SEQ ID NO: 58649 - protein, 74 aa, Glycine max
  peptide (1)..(74): Ceres Seq. ID no. 13644529
MTAFVQNLLQQMQLRFQTMSDSIISKIDEMGDRINELEQSINDLRSEMGVESTPSPVAPAKPKEEESNKEEGSA

SEQ ID NO: 58650 - protein, 63 aa, Glycine max
  peptide (1)..(63): Ceres Seq. ID no. 13644530
MQLRFQTMSDSIISKIDEMGDRINELEQSINDLRSEMGVESTPSPVAPAKPKEEESNKEEGSA

SEQ ID NO: 58651 - DNA, 1585 bp, Glycine max
  misc_feature (1)..(1585): Ceres Seq. ID no. 14308099
ccccccgagaacagagtgtgataatagtaagacagagcacctactcactcgtaaatggcgaggaagaagatcagagagtaccactccaagaggcttctcaaggagcatctcaaacgtctcgcctctatcgacctccaaatcctctcagctcaggtgacagaatctacggatttcactgagctgacagaccagcatccatggctttcgtcaaccagattggtcgtcaagccagacatgctgttcgggaagcgcggcaagagtggcttagttgctctcaatttagacatagctcaagtcgccgagttcgtcaaagcacgcctcggcgttgaggttgagatgggaggttgcaaggcgcctataaccacttttattgtcgaaccgtttgttcctcacgaccaagagttttatctgtctattgtttctgaaaggcttggctccactatcagcttctccgaatgtggcggcattgaaattgaagagaattgggataaggtcaaaactatattccttccgacggaaaaaccattgactccggaggcatgtgcgccattgattgctatacttcctttggagattagggggacaattggcgatttcataatgggtgtgtttgctgtcttcaaagatctggacttcagttttttagagatgaatccatttacactggtgaatgaaaagccatatccactggatatgagaggggaattggatgacactgccgcattcaagaacttcaacaagtggggtaatatagaatttccattgccttttggaagaattctgagccctacagaaagcttcattcattccttggatgataagacaagtgcatcattgaaatttactatattgaatccgaaaggacgcatatggacaatggtagcaggaggtggtgcaagtgtaatttatgctgatacggttggagatttaggctatgcatcagagcttggaaactatgctgagtatagtggagctccgaatgaggaggaggtgttgcagtatgcaagagttgtaattgattgtgctactgaagaccccgatggccgtaagagagcccttcttattggaggtggcatagcaaacttcactgatgttgctgccacattcaacgggattattcgagccctgaaagagaaggaatcaaagcttaaagcagcgcaaatgcacatatatgtcagaagaggtggtccaaactaccagactggtttggcaaagatgcgtgcattgggggaggagttgggagtaccaattcaggtttatggaccggaggccacgatgacgggtatctgcaaacaagctattgattgcatcatgtccgaagcataaagaagattaatttttgtctcatcatgtttcatttgtgaaactaatttggtggtgttttgatggatatattgatataagtccataatctgaaccaaagcaaagagtaataaggtgaagatgatagatgttacaagcctgaaactgttaaattcttatcttttcttcctattgtgattttattgttatattttgactaaacattataaaaatccccaatagtatccgtgaaaaatgtaatcttagttggcgatttttcctc

SEQ ID NO: 58652 - protein, 423 aa, Glycine max
  peptide (1)..(423): Ceres Seq. ID no. 14308100
MARKKIREYHSKRLLKEHLKRLASIDLQILSAQVTESTDFTELTDQHPWLSSTRLVVKPDMLFGKRGKSGLVALNLDIAQVAEFVKARLGVEVEMGGCKAPITTFIVEPFVPHDQEFYLSIVSERLGSTISFSECGGIEIEENWDKVKTIFLPTEKPLTPEACAPLIAILPLEIRGTIGDFIMGVFAVFKDLDFSFLEMNPFTLVNEKPYPLDMRGELDDTAAFKNFNKWGNIEFPLPFGRILSPTESFIHSLDDKTSASLKFTILNPKGRIWTMVAGGGASVIYADTVGDLGYASELGNYAEYSGAPNEEEVLQYARVVIDCATEDPDGRKRALLIGGGIANFTDVAATFNGIIRALKEKESKLKAAQMHIYVRRGGPNYQTGLAKMRALGEELGVPIQVYGPEATMTGICKQAIDCIMSEA

SEQ ID NO: 58653 - protein, 363 aa, Glycine max
  peptide (1)..(363): Ceres Seq. ID no. 14308101
MLFGKRGKSGLVALNLDIAQVAEFVKARLGVEVEMGGCKAPITTFIVEPFVPHDQEFYLSIVSERLGSTISFSECGGIEIEENWDKVKTIFLPTEKPLTPEACAPLIAILPLEIRGTIGDFIMGVFAVFKDLDFSFLEMNPFTLVNEKPYPLDMRGELDDTAAFKNFNKWGNIEFPLPFGRILSPTESFIHSLDDKTSASLKFTILNPKGRIWTMVAGGGASVIYADTVGDLGYASELGNYAEYSGAPNEEEVLQYARVVIDCATEDPDGRKRALLIGGGIANFTDVAATFNGIIRALKEKESKLKAAQMHIYVRRGGPNYQTGLAKMRALGEELGVPIQVYGPEATMTGICKQAIDCIMSEA

SEQ ID NO: 58654 - protein, 329 aa, Glycine max
  peptide (1)..(329): Ceres Seq. ID no. 14308102
MGGCKAPITTFIVEPFVPHDQEFYLSIVSERLGSTISFSECGGIEIEENWDKVKTIFLPTEKPLTPEACAPLIAILPLEIRGTIGDFIMGVFAVFKDLDFSFLEMNPFTLVNEKPYPLDMRGELDDTAAFKNFNKWGNIEFPLPFGRILSPTESFIHSLDDKTSASLKFTILNPKGRIWTMVAGGGASVIYADTVGDLGYASELGNYAEYSGAPNEEEVLQYARVVIDCATEDPDGRKRALLIGGGIANFTDVAATFNGIIRALKEKESKLKAAQMHIYVRRGGPNYQTGLAKMRALGEELGVPIQVYGPEATMTGICKQAIDCIMSEA

SEQ ID NO: 58655 - DNA, 1622 bp, Glycine max
  misc_feature (1)..(1622): Ceres Seq. ID no. 15226087
accgggccccccctygagtcagctacgtaggccccccccccccccaaaacccacaaacacttgagtcagacaaaaagatggaaacctctaataacaaccatgatgctcctcctccacctctacttaaagacctgaaggtgaccatccacaatgcctccatgatttttccatccaaagagattgagagaaagtcccttttcttgtcaaacattgacaaggtcctcaactttgatgtggaaacggttcacttctttggtgcccacaaagattttcctcctcatgttgtgaatgagaggctcaagaatgccctagaggatgcccttgtggtttatgacttcttgggtggaagattgaagctcaactatgacaccaaaagattggagatggattgtaatccagagggagctggattcgtggtggcttccagcgagtacaatttggatcagataggggacttggattatccaaatccagcttttgcacaattggtacatcagaataaggattttcttaaagatggtgatgttccactctgtgttgcccaggtgacatccttcaagtgtggtggttttgcaattggcatatctactagccacaccacctttgatggcctcagcttcaaaaccttcctagacaacattgcttcaatagccgctaagaagcccttggttgtcacgccctgtcatgacaggcacctcctagccgcccgatccccaccacgtgtcaccttcccacaccctgagatgctcaagctaagtgaccagctcccaacatgccccgagtccaacatctttgaggcctccaccgaacaacttgatttcaaggtcttcaaactaacattaaacgacatcacaaaattgaaggaagaggctaggaattcttcaattagtggtggcctaagtactaaatgtgtcactggctttaacgttatcactgcctacatatggagatgcaaggcactttcgtgctacaatgatgagaaccgtaataggtcatcaactatactatatgctgtagatatacgttcaagattgaaccctccattgcctaaatcatacgcgggtaacgcagtgttaactgcttatgccacggcaaagtgtaaggagctagaagaatggccttttatgaagctagttgaaatggtgcgtgagggagcaactaggatgacaaatgagtatgcaagatctatcatagattggggagagataaacaatgggtttcccaatggggaggttttggtgtcttcatggtggagattagggtttgaggaagtggagtatccgtgggggaagccaaagtattgttgcccagtggtgtatcataagaaggatattattttgttgtttcctccggttggtggaggtgaaggggtgagtattattgtggctcttcctcctaaggaaatggaaaaattccatgggctcttcaacaagttcttgacttcacattgagggaaatgatgggtctttcttcctcctcctatggaaatggaaagattccatgcatgcttaagttcatgacttgagaattatgtctctccctctattgatatccttattaatatgacatctttagcttttcgctagttgttatgtaataaagtatgattctttytgggtttt

SEQ ID NO: 58656 - protein, 482 aa, Glycine max
  peptide (1)..(482): Ceres Seq. ID no. 15226088
  misc_feature (5)..(5): Xaa is any aa, unknown or other
RAPPXVSYVGPPPPQNPQTLESDKKMETSNNNHDAPPPPLLKDLKVTIHNASMIFPSKEIERKSLFLSNIDKVLNFDVETVHFFGAHKDFPPHVVNERLKNALEDALVVYDFLGGRLKLNYDTKRLEMDCNPEGAGFVVASSEYNLDQIGDLDYPNPAFAQLVHQNKDFLKDGDVPLCVAQVTSFKCGGFAIGISTSHTTFDGLSFKTFLDNIASIAAKKPLVVTPCHDRHLLAARSPPRVTFPHPEMLKLSDQLPTCPESNIFEASTEQLDFKVFKLTLNDITKLKEEARNSSISGGLSTKCVTGFNVITAYIWRCKALSCYNDENRNRSSTILYAVDIRSRLNPPLPKSYAGNAVLTAYATAKCKELEEWPFMKLVEMVREGATRMTNEYARSIIDWGEINNGFPNGEVLVSSWWRLGFEEVEYPWGKPKYCCPVVYHKKDIILLFPPVGGGEGVSIIVALPPKEMEKFHGLFNKFLTSH

SEQ ID NO: 58657 - protein, 457 aa, Glycine max
  peptide (1)..(457): Ceres Seq. ID no. 15226089
METSNNNHDAPPPPLLKDLKVTIHNASMIFPSKEIERKSLFLSNIDKVLNFDVETVHFFGAHKDFPPHVVNERLKNALEDALVVYDFLGGRLKLNYDTKRLEMDCNPEGAGFVVASSEYNLDQIGDLDYPNPAFAQLVHQNKDFLKDGDVPLCVAQVTSFKCGGFAIGISTSHTTFDGLSFKTFLDNIASIAAKKPLVVTPCHDRHLLAARSPPRVTFPHPEMLKLSDQLPTCPESNIFEASTEQLDFKVFKLTLNDITKLKEEARNSSISGGLSTKCVTGFNVITAYIWRCKALSCYNDENRNRSSTILYAVDIRSRLNPPLPKSYAGNAVLTAYATAKCKELEEWPFMKLVEMVREGATRMTNEYARSIIDWGEINNGFPNGEVLVSSWWRLGFEEVEYPWGKPKYCCPVVYHKKDIILLFPPVGGGEGVSIIVALPPKEMEKFHGLFNKFLTSH

SEQ ID NO: 58658 - protein, 430 aa, Glycine max
  peptide (1)..(430): Ceres Seq. ID no. 15226090
MIFPSKEIERKSLFLSNIDKVLNFDVETVHFFGAHKDFPPHVVNERLKNALEDALVVYDFLGGRLKLNYDTKRLEMDCNPEGAGFVVASSEYNLDQIGDLDYPNPAFAQLVHQNKDFLKDGDVPLCVAQVTSFKCGGFAIGISTSHTTFDGLSFKTFLDNIASIAAKKPLVVTPCHDRHLLAARSPPRVTFPHPEMLKLSDQLPTCPESNIFEASTEQLDFKVFKLTLNDITKLKEEARNSSISGGLSTKCVTGFNVITAYIWRCKALSCYNDENRNRSSTILYAVDIRSRLNPPLPKSYAGNAVLTAYATAKCKELEEWPFMKLVEMVREGATRMTNEYARSIIDWGEINNGFPNGEVLVSSWWRLGFEEVEYPWGKPKYCCPVVYHKKDIILLFPPVGGGEGVSIIVALPPKEMEKFHGLFNKFLTSH

SEQ ID NO: 58659 - DNA, 1798 bp, Glycine max
  misc_feature (1)..(1798): Ceres Seq. ID no. 14308232
aaagtctgctcttgcattacaaagactagttcaagctgctgtatggtttcttggggaaaatgcaaattatgctgcttctgaatatgcttgggaatctgctaccccgcctggtactgcattgatgatgttagatgctgataaaatggttgctgctgctagttctcgtaatcctactctagctggtgccttgacaaggctccagaggtgcgcattcaatggcagctgggagattcgaattattgctgctcaagctcttacaacaatggcaattagatctggggaacctttcaggttacagatttatgagtttctgcacactttggcgcaaggtggtattcagtcacagttctctgatatgcatcttagtaatggagaagatcaaggagcaagtggtacaggccttggagttttattaagtcctatgataaaggttctggatgagatgtatagagcacaagatgatttgatcaaggaaatacgcaatcatgacaatgctaagaaagaatggactgatgatgaactgaagaaactatatgaaacccatgaaaggctgctagatcttgtttcattgttttgttatgttccaagaacaaagtatctacctttgggcccaataagtgccaaactcattgacatctatcgtacacgccacaatattagttcatctactggtttgagtgatccagctgttgccactggtatatctgatcttgtctatgaatcccaaccaccacctgctgagcctgatacacttgatgatgacctagtaaatgcttgggcagcaaaccttggtgatgatggcttatggggaaacaatgcaccagcaatgaatagggtaaatgaatttctggcaggtgctggaacagacgccccagaagttgatgaagagaatatgatctctaggccttcagttagctatgatgatatgtgggcaaaaacacttctagaatcttctgagctagaggaagatgatgcaaagtcattgggatcatcatctccagattcaacaggatcagttgaaacttcgatatcatcccactttggaggaatgagctacccttcgctgtttagttcccgaccacaaactacggataaggcaccagcaagccgaggctctatgtatgagggttatggttctccgataagagaagagcctccgtcatactcatcctctgtcatgcaaagacacgagtcatttgagaacccccttgcagggaatggattgcacagttttgggtctcaagatgatgagcgagcttcatctggaaatcctcaacatggaagtgcactttatgacttcacagcaggaggagacgatgaattgagtttaaccgcaggagaagaagtcgacattgagtacgaagtagatggctggttttatgttaagaagaaacgccctggtagggatggcaagatggctggactggttcctgttttatatgttagtcaatcttgaatcatgtacgtaagctattgtaacttccgattcttgcaaaaaggctttttttgctttattttatccagtgttgctttcattcaaagtttccatgttcccatgtagcatgccattctggctgttctccttcaaagtatcttgtatcctggtccctacctaattcgtctagttgtatgctatcaaagtatcatttaccatgctaattggttgcgagtgtctagtcattcatcatagtaggcctttcattctattatatttatattttacatacagctattggtgtacgagtgtttgtttttatacaaggaatttaatatatcaagtgaaagtttcacgtttttc

SEQ ID NO: 58660 - protein, 484 aa, Glycine max
  peptide (1)..(484): Ceres Seq. ID no. 14308233
KSALALQRLVQAAVWFLGENANYAASEYAWESATPPGTALMMLDADKMVAAASSRNPTLAGALTRLQRCAFNGSWEIRIIAAQALTTMAIRSGEPFRLQIYEFLHTLAQGGIQSQFSDMHLSNGEDQGASGTGLGVLLSPMIKVLDEMYRAQDDLIKEIRNHDNAKKEWTDDELKKLYETHERLLDLVSLFCYVPRTKYLPLGPISAKLIDIYRTRHNISSSTGLSDPAVATGISDLVYESQPPPAEPDTLDDDLVNAWAANLGDDGLWGNNAPAMNRVNEFLAGAGTDAPEVDEENMISRPSVSYDDMWAKTLLESSELEEDDAKSLGSSSPDSTGSVETSISSHFGGMSYPSLFSSRPQTTDKAPASRGSMYEGYGSPIREEPPSYSSSVMQRHESFENPLAGNGLHSFGSQDDERASSGNPQHGSALYDFTAGGDDELSLTAGEEVDIEYEVDGWFYVKKKRPGRDGKMAGLVPVLYVSQS

SEQ ID NO: 58661 - protein, 444 aa, Glycine max
  peptide (1)..(444): Ceres Seq. ID no. 14308234
MMLDADKMVAAASSRNPTLAGALTRLQRCAFNGSWEIRIIAAQALTTMAIRSGEPFRLQIYEFLHTLAQGGIQSQFSDMHLSNGEDQGASGTGLGVLLSPMIKVLDEMYRAQDDLIKEIRNHDNAKKEWTDDELKKLYETHERLLDLVSLFCYVPRTKYLPLGPISAKLIDIYRTRHNISSSTGLSDPAVATGISDLVYESQPPPAEPDTLDDDLVNAWAANLGDDGLWGNNAPAMNRVNEFLAGAGTDAPEVDEENMISRPSVSYDDMWAKTLLESSELEEDDAKSLGSSSPDSTGSVETSISSHFGGMSYPSLFSSRPQTTDKAPASRGSMYEGYGSPIREEPPSYSSSVMQRHESFENPLAGNGLHSFGSQDDERASSGNPQHGSALYDFTAGGDDELSLTAGEEVDIEYEVDGWFYVKKKRPGRDGKMAGLVPVLYVSQS

SEQ ID NO: 58662 - protein, 443 aa, Glycine max
  peptide (1)..(443): Ceres Seq. ID no. 14308235
MLDADKMVAAASSRNPTLAGALTRLQRCAFNGSWEIRIIAAQALTTMAIRSGEPFRLQIYEFLHTLAQGGIQSQFSDMHLSNGEDQGASGTGLGVLLSPMIKVLDEMYRAQDDLIKEIRNHDNAKKEWTDDELKKLYETHERLLDLVSLFCYVPRTKYLPLGPISAKLIDIYRTRHNISSSTGLSDPAVATGISDLVYESQPPPAEPDTLDDDLVNAWAANLGDDGLWGNNAPAMNRVNEFLAGAGTDAPEVDEENMISRPSVSYDDMWAKTLLESSELEEDDAKSLGSSSPDSTGSVETSISSHFGGMSYPSLFSSRPQTTDKAPASRGSMYEGYGSPIREEPPSYSSSVMQRHESFENPLAGNGLHSFGSQDDERASSGNPQHGSALYDFTAGGDDELSLTAGEEVDIEYEVDGWFYVKKKRPGRDGKMAGLVPVLYVSQS

SEQ ID NO: 58663 - DNA, 1321 bp, Glycine max
  misc_feature (1)..(1321): Ceres Seq. ID no. 14308698
aacgcgcattttagggacaaaattactggtaacatgtcaaaaaatgagattagagagtgctcattgatgacagttggatcaagttactgtggtagcaatcacatcccccaagatccagatgcaagcagggcatcaagcaatggtgtctggactactactttatccgccgagcctgaagctgttagagaccatgtgccgagaacaagtcctcagaatgaaaaagggaaatcggagatgcttgaaccaactacaacttcatcatccggtggctcaggtagtagtcttggaaaaaattgttcgctatctacgagaaaccagggccaaaaaagaaaaggaatagatgtggaagaatctgaggagcaaagtgaggacacagaacttaaatcagcacttggaaacaagtcatctcaacgtgcagggttggctcgaaggaaccgcgctgctgaagtgcataatctatctgaaaggagaaggagagaccggatcaatgagaagatgaaggcattgcaacaactcatacctcacagtagcaagacagacaaagcatcaatgttggaagaggcaatcgaatacttgaaatcacttcagttacaacttcagctaatgtggatgggatctggcatggcaccaattatgtttccaggaattcagcactatatgtcacaaatgggtatgggaatggctacaccgcctttccctcctattcacaatccgatgcaattaccgagactgccgcttgatcagtctgtatctgcgtctcagacaccaaaccagacattaatgagccaaaatcctattttgggtgcctttaattaccacaatcagatgcaaaatccagctctttcagagcaatatgcgcgttacatgggctatcatcttatgcaaaatgcctctcagccaatgaatgtattcagatatggtccccagggggtacggcatagtcaaacaatgattacacccagcaacagcagtggaaacatgagtggagcagcaaatattgatgaggctgtgagtggcaaaatgggttaattagtttcaaagcatgcttttgagtacctatggcgtaactaacaagataattgcaagatgatagaagcccttgtaaggcttgtatgctttcacaatatgtctgcctgttcatacagtggctgatctacagttatgtgagggtctagggtcagcacttgtacttccttatttttttaaaaattaattaaatttgtaaataaaattttatacttttatattttatttcatctatatttatataattgaacccactgattttattttttataatttacatccatcgatttaaggt

SEQ ID NO: 58664 - protein, 342 aa, Glycine max
  peptide (1)..(342): Ceres Seq. ID no. 14308699
NAHFRDKITGNMSKNEIRECSLMTVGSSYCGSNHIPQDPDASRASSNGVWTTTLSAEPEAVRDHVPRTSPQNEKGKSEMLEPTTTSSSGGSGSSLGKNCSLSTRNQGQKRKGIDVEESEEQSEDTELKSALGNKSSQRAGLARRNRAAEVHNLSERRRRDRINEKMKALQQLIPHSSKTDKASMLEEAIEYLKSLQLQLQLMWMGSGMAPIMFPGIQHYMSQMGMGMATPPFPPIHNPMQLPRLPLDQSVSASQTPNQTLMSQNPILGAFNYHNQMQNPALSEQYARYMGYHLMQNASQPMNVFRYGPQGVRHSQTMITPSNSSGNMSGAANIDEAVSGKMG

SEQ ID NO: 58665 - protein, 331 aa, Glycine max
  peptide (1)..(331): Ceres Seq. ID no. 14308700
MSKNEIRECSLMTVGSSYCGSNHIPQDPDASRASSNGVWTTTLSAEPEAVRDHVPRTSPQNEKGKSEMLEPTTTSSSGGSGSSLGKNCSLSTRNQGQKRKGIDVEESEEQSEDTELKSALGNKSSQRAGLARRNRAAEVHNLSERRRRDRINEKMKALQQLIPHSSKTDKASMLEEAIEYLKSLQLQLQLMWMGSGMAPIMFPGIQHYMSQMGMGMATPPFPPIHNPMQLPRLPLDQSVSASQTPNQTLMSQNPILGAFNYHNQMQNPALSEQYARYMGYHLMQNASQPMNVFRYGPQGVRHSQTMITPSNSSGNMSGAANIDEAVSGKMG

SEQ ID NO: 58666 - protein, 320 aa, Glycine max
  peptide (1)..(320): Ceres Seq. ID no. 14308701
MTVGSSYCGSNHIPQDPDASRASSNGVWTTTLSAEPEAVRDHVPRTSPQNEKGKSEMLEPTTTSSSGGSGSSLGKNCSLSTRNQGQKRKGIDVEESEEQSEDTELKSALGNKSSQRAGLARRNRAAEVHNLSERRRRDRINEKMKALQQLIPHSSKTDKASMLEEAIEYLKSLQLQLQLMWMGSGMAPIMFPGIQHYMSQMGMGMATPPFPPIHNPMQLPRLPLDQSVSASQTPNQTLMSQNPILGAFNYHNQMQNPALSEQYARYMGYHLMQNASQPMNVFRYGPQGVRHSQTMITPSNSSGNMSGAANIDEAVSGKMG

SEQ ID NO: 58667 - DNA, 1699 bp, Glycine max
  misc_feature (1)..(1699): Ceres Seq. ID no. 15171012
gcacatttgggaacaagccttacagtgatgtgtccctctaaagacatttttaaggaagcaactaaacagatggactctgaggatggactaggagaggattggttatctgagtattcaggtgatgaggactatgaccctgaagaaaatgacttcacaagcagcagcctggatagtggtgaagaaagtatatctgatcagtccaattgttcaggaagtccgctttattctccaaacgatgatattccaggctttatatcagcagatttcactgatgcggaaggattctaccacaccaattcaaatttaggaattgattctgatgatgatgatgttgccgagatgcttacctaccaaaggccaaagagagaggaaatgtttggaaagctgactgagaatgaaaagcagagtgaagatgaagattggggtactaataataggagaaagaaaagaagagtggattcagctggtgttggagttaagtctgccgagggttccttagatgtaaaatcgaatgagaaagcccaaccgcagaggagaaaactcttcagaattccacctgaggcagttcaggtactgcgcaaatcttttgctgaaagtgagcttccatcccgggaggtgaaagagaatctctcaacagaattgggtatttcttttgaaaagattgacaagtggttcaaaaatacaaggtgtgctgctctcagagatcggaaggctgaaggaaatagtcgtgttgctggtcccagcaaaagatcgaaacagagtgcagggaaatctggaagtttaggcaagattgattcagtggacaattcatatcttcttcccatgcctgaaatcatcagtgtacctacacatccacaagggattcctgagaggaagcccgaatcaactagtagaactgtgaggaggcgggtacacgataaaggagctcccttgtgtccgcccgcgcccgccgaagtcaaggagagcacatcacctacaaccaagcctggcttgaatcctagccatgtagctgatcgcatcatcaacaccgagcatagagctgcttctcgggaggatccagtggccttctcggatgaccctttcttcgatgcgatcctatcatatcccaccatcaacaccaacgacagagctgtttctcgggaggatccggtggccttctcggacgatcctttcctggacgtgatgctagcaaaccgtgacatctataccgaggagagagccgcttctcacgaggacgtgaggcggccttccagcgaccagcctttcttggatgtgatccagaacgtgtgcgggctcgagcataggctgcagagactcaagggggacatgctatcatcagcagcagcaccaggcggcgctggaaccgcggagcgtgacttgcagaaccaactagtggttctcgtgccgactgccgagctgaaggacaaatcacagcctagcatctgaaattctgatactccatttgcgcgttgtcgataggagttattaaaacatatagaagaaatagtgtagagaaggagaagaaaagaaaagtagtggctccagtctagggttctagcggacaaggggcctcaacagtggtcgttactgtgtgtcacattaaagtgcgtcgtcggtgttactagtatacaagggcagttgttactggtcttaatgggtttgagttatataccgtttggggttcaaaatgttttggatc

SEQ ID NO: 58668 - protein, 481 aa, Glycine max
  peptide (1)..(481): Ceres Seq. ID no. 15171013
AHLGTSLTVMCPSKDIFKEATKQMDSEDGLGEDWLSEYSGDEDYDPEENDFTSSSLDSGEESISDQSNCSGSPLYSPNDDIPGFISADFTDAEGFYHTNSNLGIDSDDDDVAEMLTYQRPKREEMFGKLTENEKQSEDEDWGTNNRRKKRRVDSAGVGVKSAEGSLDVKSNEKAQPQRRKLFRIPPEAVQVLRKSFAESELPSREVKENLSTELGISFEKIDKWFKNTRCAALRDRKAEGNSRVAGPSKRSKQSAGKSGSLGKIDSVDNSYLLPMPEIISVPTHPQGIPERKPESTSRTVRRRVHDKGAPLCPPAPAEVKESTSPTTKPGLNPSHVADRIINTEHRAASREDPVAFSDDPFFDAILSYPTINTNDRAVSREDPVAFSDDPFLDVMLANRDIYTEERAASHEDVRRPSSDQPFLDVIQNVCGLEHRLQRLKGDMLSSAAAPGGAGTAERDLQNQLVVLVPTAELKDKSQPSI

SEQ ID NO: 58669 - protein, 472 aa, Glycine max
  peptide (1)..(472): Ceres Seq. ID no. 15171014
MCPSKDIFKEATKQMDSEDGLGEDWLSEYSGDEDYDPEENDFTSSSLDSGEESISDQSNCSGSPLYSPNDDIPGFISADFTDAEGFYHTNSNLGIDSDDDDVAEMLTYQRPKREEMFGKLTENEKQSEDEDWGTNNRRKKRRVDSAGVGVKSAEGSLDVKSNEKAQPQRRKLFRIPPEAVQVLRKSFAESELPSREVKENLSTELGISFEKIDKWFKNTRCAALRDRKAEGNSRVAGPSKRSKQSAGKSGSLGKIDSVDNSYLLPMPEIISVPTHPQGIPERKPESTSRTVRRRVHDKGAPLCPPAPAEVKESTSPTTKPGLNPSHVADRIINTEHRAASREDPVAFSDDPFFDAILSYPTINTNDRAVSREDPVAFSDDPFLDVMLANRDIYTEERAASHEDVRRPSSDQPFLDVIQNVCGLEHRLQRLKGDMLSSAAAPGGAGTAERDLQNQLVVLVPTAELKDKSQPSI

SEQ ID NO: 58670 - protein, 458 aa, Glycine max
  peptide (1)..(458): Ceres Seq. ID no. 15171015
MDSEDGLGEDWLSEYSGDEDYDPEENDFTSSSLDSGEESISDQSNCSGSPLYSPNDDIPGFISADFTDAEGFYHTNSNLGIDSDDDDVAEMLTYQRPKREEMFGKLTENEKQSEDEDWGTNNRRKKRRVDSAGVGVKSAEGSLDVKSNEKAQPQRRKLFRIPPEAVQVLRKSFAESELPSREVKENLSTELGISFEKIDKWFKNTRCAALRDRKAEGNSRVAGPSKRSKQSAGKSGSLGKIDSVDNSYLLPMPEIISVPTHPQGIPERKPESTSRTVRRRVHDKGAPLCPPAPAEVKESTSPTTKPGLNPSHVADRIINTEHRAASREDPVAFSDDPFFDAILSYPTINTNDRAVSREDPVAFSDDPFLDVMLANRDIYTEERAASHEDVRRPSSDQPFLDVIQNVCGLEHRLQRLKGDMLSSAAAPGGAGTAERDLQNQLVVLVPTAELKDKSQPSI

SEQ ID NO: 58671 - DNA, 2330 bp, Glycine max
  misc_feature (1)..(2330): Ceres Seq. ID no. 14315434
tcacactctttcttcctttcttcttcttcttcttcttcctgtcttcacctaaccaaatgggcgcctccaccacctgatccacctctgtttcttcttcctttcatccgttcatacgggggttagatgatggagtcctgtgattgtatagatacgcagtatccgccggatgaacttcttgtgaagtatcagtatatctcggatgtgctaattgctcttgcgtatttttcgattccggtggagctcatctattttgttcagaagtctgctttctttccgtatagatgggtgcttatgcagtttggtgcctttattgttctctgtggagcaactcatttcataaacctgtggacattctctccgcactctaagtctgttgctgttgtcatgacgattgccaaagtttcgtgtgctattgtgtcatgtgcgacggcactgatgcttgtacacattattcccgatctgttgagtgtcaagaggcgcgaatcgatcctcaagaacaaggctgaagagcttgacagagagatgggacttattcttactcaggaagagacgggaagacatgttagaatgttgactcatgaaattaggagcacacttgacaggcatacaattttaaagactactcttgtggagctggggaggactttgggcttggaggagtgtgcattatggatgccttcgagaagtggtctgaatctgcaactttcccatactttaacctatcatgtgcaagttgggtctacggtgcaaacaaacaattctattgtcaatgaagttttcaacagccctcaagctatgcggataccacccacctgtccattggccaggatcagacctcttgtgggaagatatgtgccccctgaagttgttgctgttcgggtgccgcttttgaatctgtcaaattttcaaattaacgattggcctgatatttcagcaaagagctatgcaatcatggttctcatcctccctactgacagtgttagaaaatggcgagaccatgagttggaacttgttgatgttgttgcagatcaggtagcagttgccctttcacatgctgctattttggaggagtctatgcgtgcccgtgatcaactcatggagcagaatgttgctttagatttagcccggcgagaggcagagatggcaattcatgctcgcaatgattttcttgctgtcatgaatcatgaaatgaggacaccaatgcatgcaattatagcattgtcatcacttctcttggagactgaactgacgccagagcaaagggttatgatagagacagtgttgaagagtagtaatgttttggcaacactcattaatgatgttctagatctttctcgacttgaagatggtagcctcgaattagaaatgggaaaattcaacctccatggagttttgggagagattgttgaactgataaaaccaatagcatccgtgaaaaagttacctatcaccttaattctgtctcctgatctgcctactcatgccattggtgatgaaaagcggcttacacaaactcttttgaatgtcgtgggtaatgctgtcaaattcactaaggagggctatgtttctgtaagagtatcagttgcaaaaccagaatcttcacaggattggcgacctccagagttttatccagcatctagtgatggccatttctacattcgagtccaggttaaggactctggatgtgggattctcccacaagatattccgcatctctttaccaagtttgcccagtctcggagtggaccagctcgacctagcagtggtgcaggtcttgggcttgccatttgtaaaagatttgtaaacctcatgggaggccacatatggattgagagtgagggccttgacaaaggaagcacagctacatttatagtcaaacttgggatttgtggcaatccagatccatccgatcatcaagctgcaaacagaagccaagcatatagtggaagtggtggcctcgctagatttaaacccttcatcacagatgaaaacgacactggtttttctactagacgcaatcaaagaagtttctaatatccaagacaccaaaattgcatacctctcaatcacagtcgacaagatggagtaaacctcctactttcattttgcatgtgctaaattgtataatttgcagtttgcggctgtagaataggattactatgtcaggcatatttctaacaaacaggttttatgcgaactcctgttgtattaactagaatacaatacaacaaaacaaagttgagagacgatctgttacttaatttgacttgtagtatatattgtcagtggcttttgccgtttagcgttcataaaaatgacagtattggcac

SEQ ID NO: 58672 - protein, 636 aa, Glycine max
  peptide (1)..(636): Ceres Seq. ID no. 14315435
MMESCDCIDTQYPPDELLVKYQYISDVLIALAYFSIPVELIYFVQKSAFFPYRWVLMQFGAFIVLCGATHFINLWTFSPHSKSVAVVMTIAKVSCAIVSCATALMLVHIIPDLLSVKRRESILKNKAEELDREMGLILTQEETGRHVRMLTHEIRSTLDRHTILKTTLVELGRTLGLEECALWMPSRSGLNLQLSHTLTYHVQVGSTVQTNNSIVNEVFNSPQAMRIPPTCPLARIRPLVGRYVPPEVVAVRVPLLNLSNFQINDWPDISAKSYAIMVLILPTDSVRKWRDHELELVDVVADQVAVALSHAAILEESMRARDQLMEQNVALDLARREAEMAIHARNDFLAVMNHEMRTPMHAIIALSSLLLETELTPEQRVMIETVLKSSNVLATLINDVLDLSRLEDGSLELEMGKFNLHGVLGEIVELIKPIASVKKLPITLILSPDLPTHAIGDEKRLTQTLLNVVGNAVKFTKEGYVSVRVSVAKPESSQDWRPPEFYPASSDGHFYIRVQVKDSGCGILPQDIPHLFTKFAQSRSGPARPSSGAGLGLAICKRFVNLMGGHIWIESEGLDKGSTATFIVKLGICGNPDPSDHQAANRSQAYSGSGGLARFKPFITDENDTGFSTRRNQRSF

SEQ ID NO: 58673 - protein, 635 aa, Glycine max
  peptide (1)..(635): Ceres Seq. ID no. 14315436
MESCDCIDTQYPPDELLVKYQYISDVLIALAYFSIPVELIYFVQKSAFFPYRWVLMQFGAFIVLCGATHFINLWTFSPHSKSVAVVMTIAKVSCAIVSCATALMLVHIIPDLLSVKRRESILKNKAEELDREMGLILTQEETGRHVRMLTHEIRSTLDRHTILKTTLVELGRTLGLEECALWMPSRSGLNLQLSHTLTYHVQVGSTVQTNNSIVNEVFNSPQAMRIPPTCPLARIRPLVGRYVPPEVVAVRVPLLNLSNFQINDWPDISAKSYAIMVLILPTDSVRKWRDHELELVDVVADQVAVALSHAAILEESMRARDQLMEQNVALDLARREAEMAIHARNDFLAVMNHEMRTPMHAIIALSSLLLETELTPEQRVMIETVLKSSNVLATLINDVLDLSRLEDGSLELEMGKFNLHGVLGEIVELIKPIASVKKLPITLILSPDLPTHAIGDEKRLTQTLLNVVGNAVKFTKEGYVSVRVSVAKPESSQDWRPPEFYPASSDGHFYIRVQVKDSGCGILPQDIPHLFTKFAQSRSGPARPSSGAGLGLAICKRFVNLMGGHIWIESEGLDKGSTATFIVKLGICGNPDPSDHQAANRSQAYSGSGGLARFKPFITDENDTGFSTRRNQRSF

SEQ ID NO: 58674 - protein, 580 aa, Glycine max
  peptide (1)..(580): Ceres Seq. ID no. 14315437
MQFGAFIVLCGATHFINLWTFSPHSKSVAVVMTIAKVSCAIVSCATALMLVHIIPDLLSVKRRESILKNKAEELDREMGLILTQEETGRHVRMLTHEIRSTLDRHTILKTTLVELGRTLGLEECALWMPSRSGLNLQLSHTLTYHVQVGSTVQTNNSIVNEVFNSPQAMRIPPTCPLARIRPLVGRYVPPEVVAVRVPLLNLSNFQINDWPDISAKSYAIMVLILPTDSVRKWRDHELELVDVVADQVAVALSHAAILEESMRARDQLMEQNVALDLARREAEMAIHARNDFLAVMNHEMRTPMHAIIALSSLLLETELTPEQRVMIETVLKSSNVLATLINDVLDLSRLEDGSLELEMGKFNLHGVLGEIVELIKPIASVKKLPITLILSPDLPTHAIGDEKRLTQTLLNVVGNAVKFTKEGYVSVRVSVAKPESSQDWRPPEFYPASSDGHFYIRVQVKDSGCGILPQDIPHLFTKFAQSRSGPARPSSGAGLGLAICKRFVNLMGGHIWIESEGLDKGSTATFIVKLGICGNPDPSDHQAANRSQAYSGSGGLARFKPFITDENDTGFSTRRNQRSF

SEQ ID NO: 58675 - DNA, 1471 bp, Glycine max
  misc_feature (1)..(1471): Ceres Seq. ID no. 15169110
gaaatcatataaagaaacatctaaccaaacaagaagggtccagcaattattcttttctcattttaagaaataattgagtttggatatattgcaattttaaatcagtttcattcagtgcctttttggtgttaatagtttctaaatttgaacaattaaaaagattgtcatgctatcatgtaatcgaatacaattaggcttcatcttcatgctcatattcttgtaccttgaatatgagcaggaagatgaagcctaaatgttaatattcttatgtgaatttcaatattgattgcatatttgcttgaaccttgaatattgtttcaaagtaatgaactttatcaccctcttactaaaggttcagaagggttatcaaaagatttagaagtttctgagcatttggaagacaatcttgaccaagagtggtcacagatttcacagatgcacaagagtatagcttctttcagagacaagtcaatcaacaaatggcagcggatgacacaagtgactactggtgctgctgccattaagggaaaatttcatgcttttaatcaggtcaggttctttaactggtattgggaattttcttatgtgataggtgagtatttaatcctaattttgttgccccatcacacaggatattagcaatcaagttgctgcttatatgagagatcctaatagaatgatcaatcagatgcggctgagaagatcagctgttaatatatttggatctgtaattcattctcttaatctttagttgttttaaattgtgctgcatattccatataaggctgaatgttaggagtgtgttaaaagctgatttatttacctttgtcattgactgccacttgtcttcaggttccagaggttgacgataaacataaagaagctgaaacacgtactgatggtgatcctgaacttctggatgactctgaattttatcagcaattattgaaagaattttttgagacagttgatccttcatcgtctgagaaagcattttatgctttgaagagaatgcaaccaaagaaaagaaaaattgttgatcgtcgtgcctcaaaaagtcggaagataaggtataatgttcacgaaaagatagtaaattttatggcaccactacctgccaatattcctcctatggctccgaagttgtttgagaatctgtttggattgaagacagaaagattatcatcatctgctgcagcctcgtaatcatggttggccgacagcaatatttggcctcacagttttgcccttactttacatatgttgtacactaatttgtcttctacatgatgttgattattgaggaatttgatattttttcctcacaagacaattttgctgtaaatttattcagatgacctcatttctccttaggtgtttgttcaacgaggagtgatacaggttcatgtatgatggtaaccgatgccctagtgcaatggtgctagtataatagattatagttatggattag

SEQ ID NO: 58676 - protein, 67 aa, Glycine max
  peptide (1)..(67): Ceres Seq. ID no. 15169111
MHKSIASFRDKSINKWQRMTQVTTGAAAIKGKFHAFNQVRFFNWYWEFSYVIGEYLILILLPHHTGY

SEQ ID NO: 58677 - protein, 64 aa, Glycine max
  peptide (1)..(64): Ceres Seq. ID no. 15169112
MQPKKRKIVDRRASKSRKIRYNVHEKIVNFMAPLPANIPPMAPKLFENLFGLKTERLSSSAAAS

SEQ ID NO: 58678 - protein, 49 aa, Glycine max
  peptide (1)..(49): Ceres Seq. ID no. 15169113
MTQVTTGAAAIKGKFHAFNQVRFFNWYWEFSYVIGEYLILILLPHHTGY

SEQ ID NO: 58679 - DNA, 1891 bp, Glycine max
  misc_feature (1)..(1891): Ceres Seq. ID no. 13595747
gagagctagaaagtagagacacacaatccaaaagagtcttattgaagggtgagggtcaccttggaaatccatccatgccatggctcccactcttacatccaattcatcttttttaagcaccagtcctcattcaagggtgagcctccggaatccaaggctgagagtctttgccaagaagtctggatcattcccatcatttggactaggcaagcccaaagatgattcttcttctgctgaagaaaaagataactcatccaattccaacccctttcgtttggactttggaaagatacccgatgtaacgtctttgatcccagttccaagcaacacttctgcgccaggcttttcttttggaaacacaaggcgcaaggacccttcaacagtgtttgttgccggcgcaacggggcaggctggtattcgcattgcacaaacgttgttaagggaaggtttcagtgtacgggctggagtccccgaacttggttctgcccaagaacttgctcgtctcgctactcaatacaagattatatcaaatgaacaggcaaagcgtctgaacgctgtgcaatcaagctttgacaatgcagacacaatagccaaagcaataggcaatgsccggcaaggtggttgtcaccattggtccgacagagaacggtccaaccgcagaggtatctgcatcagatgccttgcaagtggttcaggcagcacagctggcaggagtaggccatgtggccattgtctacgacaagagcagcgctggggcctcaacctacaatgtactggatggcctctcatccttcttcaacaacctcttctccaggtctcaaccgttgaccatacaagagttcttgcagaaagtcattgaaacggatgtcaagtacaccttcatcaagacaagtttgactgatgatttctcaccggagagttcctacaatgtggttgtcttgggcgaaggaagcgccagtgcaaacgactataaagtagcaaagtccaagatcgcatcgttggtggctgaatgttcttctccaacacaagaggtagcaagaaaaacaaggttgtgaaaagtgcactcggatcccagtgcccccttgaaagcgtgtagatgaacttttcaagccctattcctgaggatggaagaaaggaaaagcctatgctgaaatgcaggnaaaaagcaaaaggcagaggaagaagcaagagtggcagctgaaaaggcccgtgaagcttctgaatcagcaaagaagttggaagaagaggtgaaaaggctttcacagcaagaaacacgggctgcaagtctggctcaagaggcccaagagaaggcagaggctggcggggcttcagttgaaaacctcttgaacaaggcaaaagactttggtgcagggttttcctgggaaaagttgagctcacagattactacttcaatccaaaagcctgatgaggatgagaaaccaaaggtgcagctagccactgtaaggggacaggccaaggctcggaatctcgcgcctaacaaagcagtggtcaaacaaacacctcagagaagtgcagctaaaccaaaggtggaaaaaccaaagcagacagagacaccaaaggaggtgaggaatgtatttggtggcctgttcaagcaagagactatctatgttgatgatgactagtggaagcggaacatattatcttgcacggcataaaactatgttgtttgagtctgtgttaacgtagataatttggttgcatgtgtatggtcttgtaaagttctatgtttgaagcagaatatttatgtagttgtactggttcagaaccctattttcgggggaaaacaataaaagggttttcccttatcttctatcctctcctctcttgstaataattaataatatctttggtcacggtyttgccttgcttc

SEQ ID NO: 58680 - protein, 259 aa, Glycine max
  peptide (1)..(259): Ceres Seq. ID no. 15221654
  misc_feature (177)..(177): Xaa is any aa, unknown or other
MAPTLTSNSSFLSTSPHSRVSLRNPRLRVFAKKSGSFPSFGLGKPKDDSSSAEEKDNSSNSNPFRLDFGKIPDVTSLIPVPSNTSAPGFSFGNTRRKDPSTVFVAGATGQAGIRIAQTLLREGFSVRAGVPELGSAQELARLATQYKIISNEQAKRLNAVQSSFDNADTIAKAIGNXRQGGCHHWSDRERSNRRGICIRCLASGSGSTAGRSRPCGHCLRQEQRWGLNLQCTGWPLILLQQPLLQVSTVDHTRVLAESH

SEQ ID NO: 58681 - protein, 149 aa, Glycine max
  peptide (1)..(149): Ceres Seq. ID no. 15221655
  misc_feature (2)..(2): Xaa is any aa, unknown or other
MXGKVVVTIGPTENGPTAEVSASDALQVVQAAQLAGVGHVAIVYDKSSAGASTYNVLDGLSSFFNNLFSRSQPLTIQEFLQKVIETDVKYTFIKTSLTDDFSPESSYNVVVLGEGSASANDYKVAKSKIASLVAECSSPTQEVARKTRL

SEQ ID NO: 58682 - DNA, 1457 bp, Glycine max
  misc_feature (1)..(1457): Ceres Seq. ID no. 13577044
gaggtcagtcaatcattcattcctattccttctttctcttccaattccaaatcacaacccttcgttttccctctctagaatcttcttctccattcaattcctactccttttttcctctctgtccctctctctctccctctctcatggcttccgatctcgaagcaaaagccaaagaggccttcgtcgaagaccacttcgaactcgccgtggaccttctctctcaggccattcatctcgaacccaacaaagccgaattctacgccgaccgcgcccaagccaacatcaaactcaacaacttcactgaggctgtggctgatgctaacaaagcaattgaattgaatccttctctaccaaaagcatatttgcggaaaggtactgcttgcatgaagcttgaggaatatgaaactgcaaaggctgctctggaggtgggtgcatcattgtctccagacaactcaaggtttgctactttgatcaaagaatgtgataagctcattgcagaatcttataccccacctattatagaggaaaaggccacaacagaagatgttactccaaaagatgttcagcaacaagatgatcttctagagaagccaacagttacagtgactaaacctaaatataggcatgaattctaccagaaacatgatcaggtggttgtgaccatatttgcaaagaaaatcccaaaggaaagcattactgttgacttcggtgaacaaatactaagtgttagtattaatgtcacaggagaagacacatatgtttttcaacctcgcttatttggaaagatcataccttccaattgtcaatatgaagttttgtccaccaaaattgaaattcgtcttgcaaaagcagaacctattcactggacatctctagaattcaccagagacatcgttgttcaacagagggttaatgcttcttcagttactggaagtcaaagaccttcttacccatcctcaaaacaaacaagagattgggacaagattgaagctcaagtcaagaaagaggagaaagatgaaaagcttgatggcgatgctgcattgaacaaatttttccgcgaaatatatcaagatgcagatgaggatacaagaagagcaatgaaaaagtcatttgttgagtctaatgggacagttctgtctacaaactggaaagaagtgggaacaaagaaggtagagggaagtcctcctgatggcatggagttgaagaaatgggaatattaagacattttctggatcagtgttgcatatatttttatgtgggattattatacttcgtttactttttttttggttagttaactactgaactgaagatactattttctttattttttttttaatgttcatgaggtgttgtgtccgtcttcgctagaacctgaattcatggttgttggttgaggacaaggctcttcactttggtgaatataattcatggttgttgacaaaaaaaaaaaaaaa

SEQ ID NO: 58683 - protein, 405 aa, Glycine max
  peptide (1)..(405): Ceres Seq. ID no. 13577045
GQSIIHSYSFFLFQFQITTLRFPSLESSSPFNSYSFFPLCPSLSPSLMASDLEAKAKEAFVEDHFELAVDLLSQAIHLEPNKAEFYADRAQANIKLNNFTEAVADANKAIELNPSLPKAYLRKGTACMKLEEYETAKAALEVGASLSPDNSRFATLIKECDKLIAESYTPPIIEEKATTEDVTPKDVQQQDDLLEKPTVTVTKPKYRHEFYQKHDQVVVTIFAKKIPKESITVDFGEQILSVSINVTGEDTYVFQPRLFGKIIPSNCQYEVLSTKIEIRLAKAEPIHWTSLEFTRDIVVQQRVNASSVTGSQRPSYPSSKQTRDWDKIEAQVKKEEKDEKLDGDAALNKFFREIYQDADEDTRRAMKKSFVESNGTVLSTNWKEVGTKKVEGSPPDGMELKKWEY

SEQ ID NO: 58684 - protein, 358 aa, Glycine max
  peptide (1)..(358): Ceres Seq. ID no. 13577046
MASDLEAKAKEAFVEDHFELAVDLLSQAIHLEPNKAEFYADRAQANIKLNNFTEAVADANKAIELNPSLPKAYLRKGTACMKLEEYETAKAALEVGASLSPDNSRFATLIKECDKLIAESYTPPIIEEKATTEDVTPKDVQQQDDLLEKPTVTVTKPKYRHEFYQKHDQVVVTIFAKKIPKESITVDFGEQILSVSINVTGEDTYVFQPRLFGKIIPSNCQYEVLSTKIEIRLAKAEPIHWTSLEFTRDIVVQQRVNASSVTGSQRPSYPSSKQTRDWDKIEAQVKKEEKDEKLDGDAALNKFFREIYQDADEDTRRAMKKSFVESNGTVLSTNWKEVGTKKVEGSPPDGMELKKWEY

SEQ ID NO: 58685 - protein, 278 aa, Glycine max
  peptide (1)..(278): Ceres Seq. ID no. 13577047
MKLEEYETAKAALEVGASLSPDNSRFATLIKECDKLIAESYTPPIIEEKATTEDVTPKDVQQQDDLLEKPTVTVTKPKYRHEFYQKHDQVVVTIFAKKIPKESITVDFGEQILSVSINVTGEDTYVFQPRLFGKIIPSNCQYEVLSTKIEIRLAKAEPIHWTSLEFTRDIVVQQRVNASSVTGSQRPSYPSSKQTRDWDKIEAQVKKEEKDEKLDGDAALNKFFREIYQDADEDTRRAMKKSFVESNGTVLSTNWKEVGTKKVEGSPPDGMELKKWEY

SEQ ID NO: 58686 - DNA, 655 bp, Glycine max
  misc_feature (1)..(655): Ceres Seq. ID no. 14312594
acaaacgtgaagacctcactaaagaggttctgattgatgaatggttccatacaggggatattggagagtggcaacctaatggaagcatgaaaattattgatcggaagaagaatatatttaagctttcacaaggagaatatgttgctgtcgaaaacctggagaatatttacggtcaagtttcttctattgaatctatatgggtttatggaaacagttttgaggccttccttgtggctgttgttaaccccagtaagcaagcacttgaacattgggcccaagaaaatggtatatccatggacttcaattctctctgtgaagatgctcgagcaaaaagttacataattgaagagctctcaaagattgcgaaggaaaagaagttgaaaggttttgagtttataaaagcagttcaccttgactcaattccatttgacatggaacgtgaccttatcactccaacatacaagaagaagaggccacagttgcttaaatactatcagaatgccattgacaacatgtataagagtggaagtaaacccagtgcctgagacctgatttgggagataatttattttctgtatgtgatggtgtttgtctccgttcaattgtttccttttggtgactgtatatacgctgagtagttatatagggatacgtc

SEQ ID NO: 58687 - protein, 180 aa, Glycine max
  peptide (1)..(180): Ceres Seq. ID no. 14312595
KREDLTKEVLIDEWFHTGDIGEWQPNGSMKIIDRKKNIFKLSQGEYVAVENLENIYGQVSSIESIWVYGNSFEAFLVAVVNPSKQALEHWAQENGISMDFNSLCEDARAKSYIIEELSKIAKEKKLKGFEFIKAVHLDSIPFDMERDLITPTYKKKRPQLLKYYQNAIDNMYKSGSKPSA

SEQ ID NO: 58688 - protein, 152 aa, Glycine max
  peptide (1)..(152): Ceres Seq. ID no. 14312596
MKIIDRKKNIFKLSQGEYVAVENLENIYGQVSSIESIWVYGNSFEAFLVAVVNPSKQALEHWAQENGISMDFNSLCEDARAKSYIIEELSKIAKEKKLKGFEFIKAVHLDSIPFDMERDLITPTYKKKRPQLLKYYQNAIDNMYKSGSKPSA

SEQ ID NO: 58689 - DNA, 1000 bp, Glycine max
  misc_feature (1)..(1000): Ceres Seq. ID no. 15226793
aatcatcaccatcaatggcttccatgggctctctgaagatgatttcgtccctcaaactctcccgttcaagttgttctatctctccccttcaaacccaaaagcaagtaggttcaagtctctttcaatccttcccaaccaaaactttaaaattctcagctacccctcaagtatctacatccagaagaagtaccaacaagaccactaccactgcattcttcttcaataaccaaaagcagcatcaagattcctcacagccagccaaagttcaagaactctttgtctacgagatcaacgaacgcgaccgaggaagtcctgcataccttaggctaagccagaagccagttaactctctaggagacttagtgccattcagcaacaagatatactctggagacttgcaaaagagactagggataactgcaggcttgtgtgtgctcatccagcatgagcctgagaaaaagggtgatagatatgaggccatttacagcttctactttggaaactatggccacatatcagtgcaaggagcctatctcacattccaagacacatatctggcagttacaggaggctctggaatctttgaaggtgcttctggacaagtgaagcttcaccaacttgtgttccctttcaagctgttctacaccttctatttgaagggtgttcctgatttgcctcctgaactgcttgggaaacctgttgaaccttcaccaagtgttgagccttctcctgctgctatggctaccgagcctcatgcctgtttgccaaacttcaccaactgataatgattatgatgatgcaattgagccttttttgtttttcaggaaattttagttttgaacccaaaataaagtctaggtgttgcatattgactgtataccaaaattcgccaactgatgatgatgcaattgagtccttttcttttgcagaaaattttattttggacccaaaataaaatctgggtgttgcagatttactatatcaaaaaaaaaaaaaaaaa

SEQ ID NO: 58690 - protein, 259 aa, Glycine max
  peptide (1)..(259): Ceres Seq. ID no. 15226794
SSPSMASMGSLKMISSLKLSRSSCSISPLQTQKQVGSSLFQSFPTKTLKFSATPQVSTSRRSTNKTTTTAFFFNNQKQHQDSSQPAKVQELFVYEINERDRGSPAYLRLSQKPVNSLGDLVPFSNKIYSGDLQKRLGITAGLCVLIQHEPEKKGDRYEAIYSFYFGNYGHISVQGAYLTFQDTYLAVTGGSGIFEGASGQVKLHQLVFPFKLFYTFYLKGVPDLPPELLGKPVEPSPSVEPSPAAMATEPHACLPNFTN

SEQ ID NO: 58691 - protein, 255 aa, Glycine max
  peptide (1)..(255): Ceres Seq. ID no. 15226795
MASMGSLKMISSLKLSRSSCSISPLQTQKQVGSSLFQSFPTKTLKFSATPQVSTSRRSTNKTTTTAFFFNNQKQHQDSSQPAKVQELFVYEINERDRGSPAYLRLSQKPVNSLGDLVPFSNKIYSGDLQKRLGITAGLCVLIQHEPEKKGDRYEAIYSFYFGNYGHISVQGAYLTFQDTYLAVTGGSGIFEGASGQVKLHQLVFPFKLFYTFYLKGVPDLPPELLGKPVEPSPSVEPSPAAMATEPHACLPNFTN

SEQ ID NO: 58692 - protein, 252 aa, Glycine max
  peptide (1)..(252): Ceres Seq. ID no. 15226796
MGSLKMISSLKLSRSSCSISPLQTQKQVGSSLFQSFPTKTLKFSATPQVSTSRRSTNKTTTTAFFFNNQKQHQDSSQPAKVQELFVYEINERDRGSPAYLRLSQKPVNSLGDLVPFSNKIYSGDLQKRLGITAGLCVLIQHEPEKKGDRYEAIYSFYFGNYGHISVQGAYLTFQDTYLAVTGGSGIFEGASGQVKLHQLVFPFKLFYTFYLKGVPDLPPELLGKPVEPSPSVEPSPAAMATEPHACLPNFTN

SEQ ID NO: 58693 - DNA, 1897 bp, Glycine max
  misc_feature (1)..(1897): Ceres Seq. ID no. 15225226
gaagaaatgacacactattgatgaattaaatagaaatttatgatgctcgcgtctgtataggattggtaatttggtattagtagtggtagtaacagttgtagatgtttttttaaatttgttttcattatcttgtgtggcttctattttgcattattgtccctgctactaatgttttctctcttgcagaaaagccaaggacagagagtgcaatttcaactgtgggttctcttccccacccaactagtacacgatttattgcttatgaagagcttaaagaagcaacaaacaattttgaaccagcgagtgttcttggagaaggagggtttggtagagtttttaaaggtgtcttaaatgatggtactcatgtagcaattaagaggcttacaaatggagggcaacagggtgacaaagagtttttggttgaggttgagatgcttagccggttgcatcatcgtaaccttgtaaaactagtgggatactttagtaatcgtgactcatcacaaaatgtactttgctatgagcttgtccctaatggaagtttggaggcttggcttcatggtcccttgggaatcaattgtcctttggattgggacaccagaatgaagattgcgcttgatgctgcaaggggactttcatacctgcatgaagactcacagccctgtgtaatacatagagacttcaaggcatccaacatattgcttgagaacaattttcatgctaaggttgcagattttggtcttgctaagcaagcacctgaaggcagatctaattatttgtctactcgtgtcatggggacatttgggtacgttgctcctgaatatgccatgactggacacctacttgttaaaagtgacgtttatagctatggtgttgtcttgctggaactgcttactggcaggaagcctgtggatatgtcacagccaactggacaagagaatcttgttacttgggttagttccataccttgtgagacaatgttatttatgtcaagttcagagcaacttcccatgttttctatatttatactaggaaatatgaaagatttaatttaaatccatcctttgaaacttttacattgagtaggtagttagtaagttcatttttcctttcaggctaggccaatccttagagataaggaccggttggaagagattgctgatccaagacttggtggaaagtatccaaaggaagattttgtacgtgtttgcactattgctgcagcctgtgttgctctagaagcaaaccaacgacccacaatgggtgaagtggtacagtcacttaaaatggtgcagcgcgtcacagaataccaagattctgtgttagcctcatccaatgcacgacccaacctacgacagtcctctagcacttttgaatttgatggaacatcttcaatgttctcttcaggtccttactctggtctaagtgcctttgacaatgacaacatttctaggactgtggttttctctgaagatctttgtgaaggacgatgaaaactgagaaaacttagccattcataatgttttctttctttcccatttttgtgagcactttgcaagctttcaaccaaaatgtttttttaacctcatgaagcataaggcacataatttttccaaatagatttaagcattttgttggtgagtggaagggtaatatgattgtaataattgcttgtataaatagaacaaaattcgttagcagattagttatttaaaaagatgagttgggtaattgcttgtataaatagaacaaaatttgccaaaccggctcactagttttatttatcctttgacttgaacaaaggaagacatcacttgtattcttcgattgtgttaattgatttctttgagctgcttttgtcaaaaaaaaaaaaaaaaaaaaaaaaaaaaaaaaaaaaaaa

SEQ ID NO: 58694 - protein, 206 aa, Glycine max
  peptide (1)..(206): Ceres Seq. ID no. 15225227
MLSRLHHRNLVKLVGYFSNRDSSQNVLCYELVPNGSLEAWLHGPLGINCPLDWDTRMKIALDAARGLSYLHEDSQPCVIHRDFKASNILLENNFHAKVADFGLAKQAPEGRSNYLSTRVMGTFGYVAPEYAMTGHLLVKSDVYSYGVVLLELLTGRKPVDMSQPTGQENLVTWVSSIPCETMLFMSSSEQLPMFSIFILGNMKDLI

SEQ ID NO: 58695 - protein, 150 aa, Glycine max
  peptide (1)..(150): Ceres Seq. ID no. 15225228
MKIALDAARGLSYLHEDSQPCVIHRDFKASNILLENNFHAKVADFGLAKQAPEGRSNYLSTRVMGTFGYVAPEYAMTGHLLVKSDVYSYGVVLLELLTGRKPVDMSQPTGQENLVTWVSSIPCETMLFMSSSEQLPMFSIFILGNMKDLI

SEQ ID NO: 58696 - DNA, 1498 bp, Glycine max
  misc_feature (1)..(1498): Ceres Seq. ID no. 14310807
atctagtatatatcttacccttagacacaacaaattccacataacaatttcatctagcaatgttaaaaaaccaaccacaaccagattggcctgagcccattgtccgggttcagtccttatccgaaaactgcatagattcaatccctgaaaggtacatcaagccttctactgatagaccatccataagaagttctaattttgatgatgccaatattccaatcatcgaccttggtggtctgtttggtgctgaccaacgtgtctcagactcaattcttaggcaaatctcagaggcttgcaaagagtggggcttcttccaagtcactaaccatggtgttagccctgatttgatggacaaggctagggaaacttggcgtcaattctttcacatgcccatggaggtgaagcagcaatatgccaactcgccaaaaacctatgaagggtacggaagcagacttggaattgagaaaggtgctattcttgattggagtgattactattttcttcactatcttcccttgccactcaaggactataacaaatggcctgcctcgcctccctcttgcaggaaagtgtttgatgagtatgggagagagttagtgaagctatgtgggaggttgatgaaggctttgtcaataaaccttggattagatgaaaaaattcttcaaaatggttttgggggagaagacataggggcatgtctaagagtgaatttttaccctaaatgtccacggccagagttgacgttgggtttgtcatcacactcagaccctggaggaatgactatgttgcttccagatgatcaagttcctggtcttcaagttcgaaaatgtgataattggattaccgtgaagcctgcacgccatgcttttatcgtcaatatcggagaccaaattcaggttctaagcaatgcaatttacaagagtgtggagcacagagtgatagtaaattcagataaagagagagtttctctggcatttttctacaaccccaaaagtgatatacccattgagccaataaaagagctggtaacaccggaaaagccctcactctacccagcaatgaccttcgatgaatacagactcttcattagaatgagaggacctcgaggcaaatctcaagttgaatctttaaagtctcccagatgatcaattctgctcataggcttttattgcttgcattctatgtccatttcaaatagtaagtcactatatatgacgtgtttggtttcacgtctttacagcgtgcgtgcgtgtttagtttcacgtcttggatgtgattttttttacatcttagatgttattttaagaagttaatagttatatatagttttcatgtctgaaatgtgattccttacttctcaagagtttacaagcacgctataccttattggtgtataattaattgtaaatcttgtaactagatcgggatttgtttgcacattgagccacagagtaaggatatgtaagagagattggatatatagatatgatattgtttt

SEQ ID NO: 58697 - protein, 361 aa, Glycine max
  peptide (1)..(361): Ceres Seq. ID no. 14310808
MLKNQPQPDWPEPIVRVQSLSENCIDSIPERYIKPSTDRPSIRSSNFDDANIPIIDLGGLFGADQRVSDSILRQISEACKEWGFFQVTNHGVSPDLMDKARETWRQFFHMPMEVKQQYANSPKTYEGYGSRLGIEKGAILDWSDYYFLHYLPLPLKDYNKWPASPPSCRKVFDEYGRELVKLCGRLMKALSINLGLDEKILQNGFGGEDIGACLRVNFYPKCPRPELTLGLSSHSDPGGMTMLLPDDQVPGLQVRKCDNWITVKPARHAFIVNIGDQIQVLSNAIYKSVEHRVIVNSDKERVSLAFFYNPKSDIPIEPIKELVTPEKPSLYPAMTFDEYRLFIRMRGPRGKSQVESLKSPR

SEQ ID NO: 58698 - protein, 265 aa, Glycine max
  peptide (1)..(265): Ceres Seq. ID no. 14310809
MDKARETWRQFFHMPMEVKQQYANSPKTYEGYGSRLGIEKGAILDWSDYYFLHYLPLPLKDYNKWPASPPSCRKVFDEYGRELVKLCGRLMKALSINLGLDEKILQNGFGGEDIGACLRVNFYPKCPRPELTLGLSSHSDPGGMTMLLPDDQVPGLQVRKCDNWITVKPARHAFIVNIGDQIQVLSNAIYKSVEHRVIVNSDKERVSLAFFYNPKSDIPIEPIKELVTPEKPSLYPAMTFDEYRLFIRMRGPRGKSQVESLKSPR

SEQ ID NO: 58699 - protein, 252 aa, Glycine max
  peptide (1)..(252): Ceres Seq. ID no. 14310810
MPMEVKQQYANSPKTYEGYGSRLGIEKGAILDWSDYYFLHYLPLPLKDYNKWPASPPSCRKVFDEYGRELVKLCGRLMKALSINLGLDEKILQNGFGGEDIGACLRVNFYPKCPRPELTLGLSSHSDPGGMTMLLPDDQVPGLQVRKCDNWITVKPARHAFIVNIGDQIQVLSNAIYKSVEHRVIVNSDKERVSLAFFYNPKSDIPIEPIKELVTPEKPSLYPAMTFDEYRLFIRMRGPRGKSQVESLKSPR

SEQ ID NO: 58700 - DNA, 1281 bp, Glycine max
  misc_feature (1)..(1281): Ceres Seq. ID no. 15176949
ggcagcaaagtgaataatggcttcactttccaccttcctcacactcactctcttcttcctctcacacgttaacgccaaagaaatcgtcatcaccgaagagggttacaccgtgaccaccgtattcgacggccacaagcctcacatcttccctttcaccgttctccagcgacccttttcctccgatctcatccttctcgattccgtcaacagcactttctacacggcgcaattccccattactgaagaaagcgttttcacgaggctttctggcgatgggtctgtggggtattctgatggggacgtgggttctgctcggttcgccaaacccagaagctttgcttttgatatgagagggaatgtgtatgttgctgataagtccaaccgtgcaataaggaaaattagtgccaagggtgtgaccacgattgctgggggagagttctcagaaaagtcaagaacaaaggatgggcctgcacttaatgcatcattttcaaatgattttgacctgactttcattcctgggctgtgtgctttgctcgtgtcagatcacatgcatagattggtccgccagattaatttgatggaggaggattgcacccttggttctaaacctggactaggtgcagttatgacttggactcttggattaggactttcatgcttacttggcttagtaattggaattgtggtgcgtccttacatcatccctaatacagaaaggcaccaacccttgccacttcaccgagacatggaagcgttacctaaccagtctggggaagctagcacagacgctcttcttcggcgccaaaagcgcaattgctagctgcagttgctcctctgtttacaaaatcctgatgagcttttggagattgagtctctctcatcttgtttgcatgtctagaattagaatcaacatagtttctccaaggccacatctggaatcagtgtctttgctagatttagatgcctgcaatagcggtgaggtaacaaagtcaggtaagtattatgaccaattgaaggatttgatgagttttgatgaagattcaaacaatggcaaggcaacctttaacaaaggaaatgatagcataggaaggaggaatgtgtgctatgaaggtgatgtcatgatgaaggctaacatgggctttgtagagacacctaaagataacaataacattgttcgtcaagaatcttctgtgtgtaaaatgggtattgtgaagcgtagatgaagttatttgtaagacatgaactatgttatgaaactagcatgcatatattttgtcaccg

SEQ ID NO: 58701 - protein, 267 aa, Glycine max
  peptide (1)..(267): Ceres Seq. ID no. 15176950
MASLSTFLTLTLFFLSHVNAKEIVITEEGYTVTTVFDGHKPHIFPFTVLQRPFSSDLILLDSVNSTFYTAQFPITEESVFTRLSGDGSVGYSDGDVGSARFAKPRSFAFDMRGNVYVADKSNRAIRKISAKGVTTIAGGEFSEKSRTKDGPALNASFSNDFDLTFIPGLCALLVSDHMHRLVRQINLMEEDCTLGSKPGLGAVMTWTLGLGLSCLLGLVIGIVVRPYIIPNTERHQPLPLHRDMEALPNQSGEASTDALLRRQKRNC

SEQ ID NO: 58702 - protein, 157 aa, Glycine max
  peptide (1)..(157): Ceres Seq. ID no. 15176951
MRGNVYVADKSNRAIRKISAKGVTTIAGGEFSEKSRTKDGPALNASFSNDFDLTFIPGLCALLVSDHMHRLVRQINLMEEDCTLGSKPGLGAVMTWTLGLGLSCLLGLVIGIVVRPYIIPNTERHQPLPLHRDMEALPNQSGEASTDALLRRQKRNC

SEQ ID NO: 58703 - DNA, 1275 bp, Glycine max
  misc_feature (1)..(1275): Ceres Seq. ID no. 14313575
aaacttatcctaacaggcaatcgaacaactgcttaacatatattacgaatgacaaacttgctcaaagtaattgttagctatgtactacgattgtgtagccttaataactacatcacttgaaatatcattgtttttcctcaaagcccacctagcgggggcaagactttgtcattgatatcgatctttttcatcaattttttaaaatagcattttctacttatctaaaattccattctatgatcaggtgctgataacctaattcctgtggagttggcactgaagatagtcagtaagataagatcgaaggagagattcacagtttatattgtcatcccaatgtggcctgaaggttccccttcttctacttcagtgcaagagatactcttttggcagggacaaacaatgaaaatgatgtatgaaatcatagctctggagttaaaatctatgcagcttgatagtcatccacaagattacctcaatttttactgtcttggaaaccgagagcagttgacaactgaagtttcaagttcaagtaattcaccttcagataatggcgaaacggtttcagcctcacaaaagttccgacggtttatgatttatgtacatgccaaaggaatgattgtggatgatgaatatgtaattcttgggtctgccaatataaatcaacgatctttggctggatccagagatactgagatagcaatgggtgcacatcaaccgcatcatacatggagtcagaaaaagaggcatccacatggtcaggtatatgggtatagaatgtctttgtgggcagaacacatggaaaccatagaagcttgcttcaaggagcctgaaagcttggagtgtgtgaaaagtgtgaacaagattgctgaagacaactggaagaagtacacagctgatgactatactccattgcaagggcacataatgaagtatcccgtgtgtgtaaatgcctatgggaaggtaaagtccttaactggatttgagtctttcccagatgttggtggcaaggtgcttggctcccggtctacccttcctgacgctctaactacatagcataccctcttaatttctacgtgaaaataagtaccaaagtctcagagaagaagagagagggatcaattggattttgctggcgtgcttggtgtaaactgttaaaaagaggccttgcccctgcatttttttaaaccatttacacggtggtatagtatgcaacaggctgcgtatatagtaaattattattaatcagtggactgtatgtcacagccacattgt

SEQ ID NO: 58704 - protein, 239 aa, Glycine max
  peptide (1)..(239): Ceres Seq. ID no. 14313576
MWPEGSPSSTSVQEILFWQGQTMKMMYEIIALELKSMQLDSHPQDYLNFYCLGNREQLTTEVSSSSNSPSDNGETVSASQKFRRFMIYVHAKGMIVDDEYVILGSANINQRSLAGSRDTEIAMGAHQPHHTWSQKKRHPHGQVYGYRMSLWAEHMETIEACFKEPESLECVKSVNKIAEDNWKKYTADDYTPLQGHIMKYPVCVNAYGKVKSLTGFESFPDVGGKVLGSRSTLPDALTT

SEQ ID NO: 58705 - protein, 217 aa, Glycine max
  peptide (1)..(217): Ceres Seq. ID no. 14313577
MKMMYEIIALELKSMQLDSHPQDYLNFYCLGNREQLTTEVSSSSNSPSDNGETVSASQKFRRFMIYVHAKGMIVDDEYVILGSANINQRSLAGSRDTEIAMGAHQPHHTWSQKKRHPHGQVYGYRMSLWAEHMETIEACFKEPESLECVKSVNKIAEDNWKKYTADDYTPLQGHIMKYPVCVNAYGKVKSLTGFESFPDVGGKVLGSRSTLPDALTT

SEQ ID NO: 58706 - protein, 215 aa, Glycine max
  peptide (1)..(215): Ceres Seq. ID no. 14313578
MMYEIIALELKSMQLDSHPQDYLNFYCLGNREQLTTEVSSSSNSPSDNGETVSASQKFRRFMIYVHAKGMIVDDEYVILGSANINQRSLAGSRDTEIAMGAHQPHHTWSQKKRHPHGQVYGYRMSLWAEHMETIEACFKEPESLECVKSVNKIAEDNWKKYTADDYTPLQGHIMKYPVCVNAYGKVKSLTGFESFPDVGGKVLGSRSTLPDALTT

SEQ ID NO: 58707 - DNA, 2647 bp, Glycine max
  misc_feature (1)..(2647): Ceres Seq. ID no. 15226720
cagctacgtaggccccccccccgaattcaacattgcccagaatggaaagccatggtgtccaaatatgtctccgccataccagaatgtcaccacaatatatagcaggttaggcaccagtggaaaaaaattgaatattcacttgagaaaacaaaggattcaagcctacctcccatcataaatgccattgaaatttacagagtaataaacttccagcaatcagatacacaccaaggagatgttgacgcgattgcaaccatcaagtcagtttatgggatgacaagagattggcaaggtgatccatgctcccctgtagcctacttgtggaatggtttgaattgtacttaccgcggaaatgagaacccgagaatcacaactttgaatttatcttcaagcgaattgtcaggaatgatagatccttccatttcatatctcaccatgttggagaagttggatttatcaaacaataacttaaatggtgaagttcctgattttctatctagattacagcacttgaagatcataaatttagataacaacaacctcacgggttcaattccatcagaactagttaaaaaatctaaggaaggtttcctatcactaagtgtgggccaaaatctgtatctatgtgaatctggtcaatgcaacgagaagaaaaagaaaaagaacattgttactcccttgttagcgtcagttagtggggttttgatccttgtggtggctgtggcagctatatcgtggactcttaaaaagagaaagccgaaagaaaagaatcaaagtgagatgtcagctcaatgcacagaacaagatgattcattacatcaattcaaaaaacaaatatactcacactctgatgtccttagaatcacgaacaatttcaatacaattgttggtaaaggtgggttcggaacagtttatctgggttatatcgatggcactccagttgcagtgaaaatgctttctacctcttcagttcatggttatcaacaatttcaggcagaagttaaacttctaatgagagttcatcatgcgaatctcacctcccttgttggttattgtaatgaaggagacaataagggtctcatatatgagtacatggctaatggaaacttacatgaacatctgtctggtaaacacatcaaatcaaaattcctgacctgggaagacagacttcgtatagcagtggatgcagccttaggattggagtaccttcaaactggttgcaagcctcctataatccacagagacgtaaaatctacaaacatcttgttggatgaaaagttacaagcaaagttatctgattttggtctatccaaaattatcccaattgatgggggaactcatgtgtcaactgttgttgctggtactccaggttatctagatcctgagtactacatatccaatagattaacacagaaaagtgacatttatggctttggagttgttcttctagaaataatcacttgtcaaccagtaatagcatggaatgaagaaaggactcacataattcaatgggttagatccctgattgggataggggatatcaagggcattgttgactcaaggttagaaggagattttgacattaactcagcttggaaagccgtagaaatagcaatggcgtgtgtttccttaaatcccagtgaaaggccaatcatgagggtaatagtgactgaactaaaggaaactttagcaaccgaattagctcgaactaaacacaacagtgctgattcaataaattcaatcgaaccggtcaccatgaatctggacactgaattcactccactggctagataaaagataagaataacaaaataatcttgtaataaataatgtgttcaaagatggagatgaactaggtaagaggtcttcctcttgtgcaattccagaatgagatcaagtcacataagaggaattgatgttacataataagaagttggtatatgctcttacttttgaacagtgatacttgtataactggtacacttgcactccgtttgaatctgtgtttgagagtggtgaatgtagtgtagtgtgcaaagttgcaaagagaataagagtaaataacaagaaatgaaaatcagtttttgtttttcaaawrwaaaaaaaaaaaaaaaaaaaaaaaaaaaaaaaaaaaaaaaaaaaaaaaaaaaaaaaaaaaaaaaaaaaaaaaaaaaaaaaaaaattwwaaaaaaaaaaaaaaaaaattttccggcccccgggggaacccctttttttaaaggggcccccccccgggggggaccccccttttttttcccttttagggggggtawttttcgggttggggaaaaatggggaaaaagtttttcccgggggaaatttttttcccccccaaattcccccaaaaataaaagccggaaaaaaaaaggggaaaacccggggggcccaaggggggggcyaacccccctttwttggggggggsccccgggccctttttcaaggggaaaaactkggggggccatttttttwaawaawccccccmccccggggaaaaaggggttttgcaattggggccttttcccttttccccgcaaaaaaaacccggggctcgggggtttggttgggggaaagggaattcttttcctcaaaggggggaaaaaggttttccccaaaaaccggggaaaacccc

SEQ ID NO: 58708 - protein, 506 aa, Glycine max
  peptide (1)..(506): Ceres Seq. ID no. 15226721
MTRDWQGDPCSPVAYLWNGLNCTYRGNENPRITTLNLSSSELSGMIDPSISYLTMLEKLDLSNNNLNGEVPDFLSRLQHLKIINLDNNNLTGSIPSELVKKSKEGFLSLSVGQNLYLCESGQCNEKKKKKNIVTPLLASVSGVLILVVAVAAISWTLKKRKPKEKNQSEMSAQCTEQDDSLHQFKKQIYSHSDVLRITNNFNTIVGKGGFGTVYLGYIDGTPVAVKMLSTSSVHGYQQFQAEVKLLMRVHHANLTSLVGYCNEGDNKGLIYEYMANGNLHEHLSGKHIKSKFLTWEDRLRIAVDAALGLEYLQTGCKPPIIHRDVKSTNILLDEKLQAKLSDFGLSKIIPIDGGTHVSTVVAGTPGYLDPEYYISNRLTQKSDIYGFGVVLLEIITCQPVIAWNEERTHIIQWVRSLIGIGDIKGIVDSRLEGDFDINSAWKAVEIAMACVSLNPSERPIMRVIVTELKETLATELARTKHNSADSINSIEPVTMNLDTEFTPLAR

SEQ ID NO: 58709 - protein, 462 aa, Glycine max
  peptide (1)..(462): Ceres Seq. ID no. 15226722
MIDPSISYLTMLEKLDLSNNNLNGEVPDFLSRLQHLKIINLDNNNLTGSIPSELVKKSKEGFLSLSVGQNLYLCESGQCNEKKKKKNIVTPLLASVSGVLILVVAVAAISWTLKKRKPKEKNQSEMSAQCTEQDDSLHQFKKQIYSHSDVLRITNNFNTIVGKGGFGTVYLGYIDGTPVAVKMLSTSSVHGYQQFQAEVKLLMRVHHANLTSLVGYCNEGDNKGLIYEYMANGNLHEHLSGKHIKSKFLTWEDRLRIAVDAALGLEYLQTGCKPPIIHRDVKSTNILLDEKLQAKLSDFGLSKIIPIDGGTHVSTVVAGTPGYLDPEYYISNRLTQKSDIYGFGVVLLEIITCQPVIAWNEERTHIIQWVRSLIGIGDIKGIVDSRLEGDFDINSAWKAVEIAMACVSLNPSERPIMRVIVTELKETLATELARTKHNSADSINSIEPVTMNLDTEFTPLAR

SEQ ID NO: 58710 - protein, 452 aa, Glycine max
  peptide (1)..(452): Ceres Seq. ID no. 15226723
MLEKLDLSNNNLNGEVPDFLSRLQHLKIINLDNNNLTGSIPSELVKKSKEGFLSLSVGQNLYLCESGQCNEKKKKKNIVTPLLASVSGVLILVVAVAAISWTLKKRKPKEKNQSEMSAQCTEQDDSLHQFKKQIYSHSDVLRITNNFNTIVGKGGFGTVYLGYIDGTPVAVKMLSTSSVHGYQQFQAEVKLLMRVHHANLTSLVGYCNEGDNKGLIYEYMANGNLHEHLSGKHIKSKFLTWEDRLRIAVDAALGLEYLQTGCKPPIIHRDVKSTNILLDEKLQAKLSDFGLSKIIPIDGGTHVSTVVAGTPGYLDPEYYISNRLTQKSDIYGFGVVLLEIITCQPVIAWNEERTHIIQWVRSLIGIGDIKGIVDSRLEGDFDINSAWKAVEIAMACVSLNPSERPIMRVIVTELKETLATELARTKHNSADSINSIEPVTMNLDTEFTPLAR

SEQ ID NO: 58711 - DNA, 1421 bp, Glycine max
  misc_feature (1)..(1421): Ceres Seq. ID no. 15226750
gaaacccaaccgtatccttcattcttctcctaaatcctaatccttcttcactttcagttctcagcatgggaagttctggaacaaccgactatggagcatacacataccaaaaccttgagagggaaccttactggccctctgaaaagctcagaatttccatcactggggctggtggtttcattgcctcacacattgctcgccgcctcaagaccgagggacattacatcattgcttctgattggaagaagaatgagcacatgactgaggacatgttctgccatgaattccatcttgttgaccttagggtcatggataactgcttgacagttaccaagggtgtggaccatgttttcaatcttgctgctgatatgggtgggatgggttttatccagtccaaccactcagtcattatgtacaacaacaccatgattagcttcaacatgattgaggctgccaggatcaatggtgttaagaggtttttttatgcctctagtgcttgtatctatcctgaattcaaacagttggagacaaatgtgagtttgaaggagtctgatgcctggcctgctgagccacaagatgcatatgggctggagaagcttgcaacagaagagttatgcaagcattataacaaggattttggaattgagtgccggattgggagattccataacatatatggtccttatgggacatggaagggtggaagggagaaggctcctgctgctttttgtcgcaagacacttacttccaaagatcgatttgagatgtggggagatggattgcaaacaagatccttcaccttcattgatgagtgtgttgaaggtgtactgagattgactaaatcagacttccgggagccagtgaatattggaagtgatgaaatggtcagtatgaatgagatggcagagattgttcttagctttgaggataagaatataccaatataccatattcctggcccagaaggtgttcggggccgtaattcagacaatacattaatcaaagagaaacttggctgggctccaactatgaagttgaaggatgggctgagaattacatacttttggatcaaagagcagcttgagaaagagaaggcagaaggtgttgatttatcaggctatggatcatccaaagtggttcagactcaagccccagttcaacttggctcgctacgtgctgcagatggcaaagaataaagctgctagtgcaagggatgttcggcagttgcagcagatggcaaagaataagagtgaacaatgcatttccaagtgaagggcaggcttttatgttgctattttgtagagatctatggttacagattagctattgaagttagttttggaacttgttcatgtatttgtaacggatggtgttatgttcttgttttgtttgaggtaataataataactgctgcttaaggt

SEQ ID NO: 58712 - protein, 397 aa, Glycine max
  peptide (1)..(397): Ceres Seq. ID no. 15226751
NPTVSFILLLNPNPSSLSVLSMGSSGTTDYGAYTYQNLEREPYWPSEKLRISITGAGGFIASHIARRLKTEGHYIIASDWKKNEHMTEDMFCHEFHLVDLRVMDNCLTVTKGVDHVFNLAADMGGMGFIQSNHSVIMYNNTMISFNMIEAARINGVKRFFYASSACIYPEFKQLETNVSLKESDAWPAEPQDAYGLEKLATEELCKHYNKDFGIECRIGRFHNIYGPYGTWKGGREKAPAAFCRKTLTSKDRFEMWGDGLQTRSFTFIDECVEGVLRLTKSDFREPVNIGSDEMVSMNEMAEIVLSFEDKNIPIYHIPGPEGVRGRNSDNTLIKEKLGWAPTMKLKDGLRITYFWIKEQLEKEKAEGVDLSGYGSSKVVQTQAPVQLGSLRAADGKE

SEQ ID NO: 58713 - protein, 376 aa, Glycine max
  peptide (1)..(376): Ceres Seq. ID no. 15226752
MGSSGTTDYGAYTYQNLEREPYWPSEKLRISITGAGGFIASHIARRLKTEGHYIIASDWKKNEHMTEDMFCHEFHLVDLRVMDNCLTVTKGVDHVFNLAADMGGMGFIQSNHSVIMYNNTMISFNMIEAARINGVKRFFYASSACIYPEFKQLETNVSLKESDAWPAEPQDAYGLEKLATEELCKHYNKDFGIECRIGRFHNIYGPYGTWKGGREKAPAAFCRKTLTSKDRFEMWGDGLQTRSFTFIDECVEGVLRLTKSDFREPVNIGSDEMVSMNEMAEIVLSFEDKNIPIYHIPGPEGVRGRNSDNTLIKEKLGWAPTMKLKDGLRITYFWIKEQLEKEKAEGVDLSGYGSSKVVQTQAPVQLGSLRAADGKE

SEQ ID NO: 58714 - protein, 312 aa, Glycine max
  peptide (1)..(312): Ceres Seq. ID no. 15226753
MTEDMFCHEFHLVDLRVMDNCLTVTKGVDHVFNLAADMGGMGFIQSNHSVIMYNNTMISFNMIEAARINGVKRFFYASSACIYPEFKQLETNVSLKESDAWPAEPQDAYGLEKLATEELCKHYNKDFGIECRIGRFHNIYGPYGTWKGGREKAPAAFCRKTLTSKDRFEMWGDGLQTRSFTFIDECVEGVLRLTKSDFREPVNIGSDEMVSMNEMAEIVLSFEDKNIPIYHIPGPEGVRGRNSDNTLIKEKLGWAPTMKLKDGLRITYFWIKEQLEKEKAEGVDLSGYGSSKVVQTQAPVQLGSLRAADGKE

SEQ ID NO: 58715 - DNA, 1950 bp, Glycine max
  misc_feature (1)..(1950): Ceres Seq. ID no. 15169037
aaaaaaagttgaaaaccctcacacagaaagagtggtttgtgcggtggtgaagaagcgttcggaatagaagaagaagatgtcgtcggtttacgttctagagcctccgacgaaggggaaggtggtggtgaacactacgcgcggtcctttggacattgagctgtggccgaaagaggctccgaaggccgcgaggaacttcgttcagctctgcctcgaaaactattacggcaacaccatcttccaccgcatcatcaaggacttcctcgtccaaagcggcgaccccaccggcaccggcaccggtggtgaaagcatttatggtggtgtttttgctgatgagtttcattcacgtctgaaattcaagcacagaggaatagttgcaatggccaatgccggaactctgaattccaatggaagtcagtttttcatcactctcgaccgctgtgattggcttgatcgcaagcataccatttttggaaaagtgacgggagatacaatgtataatcttttgaggctgggtgaacttgaaactgataagaatgaccggcctttagatccgccgaagatattatcagttgaggtgttatggaatccatttgaagatattgttccaagaacacttcaaaaacttcagattgaagctaaagctgatacaaaaaataaagaatcagggaaaaaaggcgtaaaaaaattgaacttgctttcatttggggaagaagctgaagaagaggaaaaggaattggcatcggtgaagcaaaagattaagagcagtcacgatgtcttgaacgatcctcgtcttctaaaggaagatactcttaataatgaactgagttcatcaagaagagatatgcaattatctgtaagggatgcacttaactcaaagaaagacgagcctcagaaagattcagatgctggtagcacggcatgtcttgatttcagtgatgatgatgaagcagattttgatgcaagaatgcgcatgcaaatactcaaaaagaggaaggagttgggtgatctccctcccaagccaaagttgcgaaatgcaggaaggtccagtccagagaaccatgatacgtcgtctgcagccaggtccaatgctgtaagtgttgatgaggatcaaccaaaggtggaaaaattgtccttgaagaaaaagggagttggatctgaagcaagagctgaacgaatgtctaatgcagatgcagatttgcaactattgaatcaagctgagagaggaagacaattgcagaagcagaagaaacgcagacttcaagggcgtgaagatgaagttctggctaaacttgaaaaatttaagaattctttatcagcaaaggcgacacccccaactgatgaatctgaagacgttagtaatgaggaattgtcagactggaaaggtgttagtttaaagtttgccccacagactggcaaggaccgcatgtctcgcaatgaagacccaaacgactatgttgtgcatgaccctcttctggagaaggggaaagagaagttcaataggatgatagccaaacaaaagagacgagaacgagagtgggctgggagttcccttacttgaccttacatgtgccaacatggctgtgtaaatatacaaagctgattggttttcaaggctagcacatcactgtgctgctgggaaagtaaacttgccctaataggaacccaggagaaaaatgttgcatggaggagtttagcaaacatggttggcaagtacattgatattggtgagtgagatgtggggttactcatgaaaggacctactttgaattgttcgtatttttggtccaatgtcaaaagatgtattgtgtagattttaacacaccaagttgttgtgttttatatatttaggattcaagagaatattgtattattgtggaactaacgatttcggcagatgaagtcgttactcagaattatgctagttgagatgggttttacgttgcactattt

SEQ ID NO: 58716 - protein, 493 aa, Glycine max
  peptide (1)..(493): Ceres Seq. ID no. 15169038
MSSVYVLEPPTKGKVVVNTTRGPLDIELWPKEAPKAARNFVQLCLENYYGNTIFHRIIKDFLVQSGDPTGTGTGGESIYGGVFADEFHSRLKFKHRGIVAMANAGTLNSNGSQFFITLDRCDWLDRKHTIFGKVTGDTMYNLLRLGELETDKNDRPLDPPKILSVEVLWNPFEDIVPRTLQKLQIEAKADTKNKESGKKGVKKLNLLSFGEEAEEEEKELASVKQKIKSSHDVLNDPRLLKEDTLNNELSSSRRDMQLSVRDALNSKKDEPQKDSDAGSTACLDFSDDDEADFDARMRMQILKKRKELGDLPPKPKLRNAGRSSPENHDTSSAARSNAVSVDEDQPKVEKLSLKKKGVGSEARAERMSNADADLQLLNQAERGRQLQKQKKRRLQGREDEVLAKLEKFKNSLSAKATPPTDESEDVSNEELSDWKGVSLKFAPQTGKDRMSRNEDPNDYVVHDPLLEKGKEKFNRMIAKQKRREREWAGSSLT

SEQ ID NO: 58717 - protein, 393 aa, Glycine max
  peptide (1)..(393): Ceres Seq. ID no. 15169039
MANAGTLNSNGSQFFITLDRCDWLDRKHTIFGKVTGDTMYNLLRLGELETDKNDRPLDPPKILSVEVLWNPFEDIVPRTLQKLQIEAKADTKNKESGKKGVKKLNLLSFGEEAEEEEKELASVKQKIKSSHDVLNDPRLLKEDTLNNELSSSRRDMQLSVRDALNSKKDEPQKDSDAGSTACLDFSDDDEADFDARMRMQILKKRKELGDLPPKPKLRNAGRSSPENHDTSSAARSNAVSVDEDQPKVEKLSLKKKGVGSEARAERMSNADADLQLLNQAERGRQLQKQKKRRLQGREDEVLAKLEKFKNSLSAKATPPTDESEDVSNEELSDWKGVSLKFAPQTGKDRMSRNEDPNDYVVHDPLLEKGKEKFNRMIAKQKRREREWAGSSLT

SEQ ID NO: 58718 - protein, 355 aa, Glycine max
  peptide (1)..(355): Ceres Seq. ID no. 15169040
MYNLLRLGELETDKNDRPLDPPKILSVEVLWNPFEDIVPRTLQKLQIEAKADTKNKESGKKGVKKLNLLSFGEEAEEEEKELASVKQKIKSSHDVLNDPRLLKEDTLNNELSSSRRDMQLSVRDALNSKKDEPQKDSDAGSTACLDFSDDDEADFDARMRMQILKKRKELGDLPPKPKLRNAGRSSPENHDTSSAARSNAVSVDEDQPKVEKLSLKKKGVGSEARAERMSNADADLQLLNQAERGRQLQKQKKRRLQGREDEVLAKLEKFKNSLSAKATPPTDESEDVSNEELSDWKGVSLKFAPQTGKDRMSRNEDPNDYVVHDPLLEKGKEKFNRMIAKQKRREREWAGSSLT

SEQ ID NO: 58719 - DNA, 2107 bp, Glycine max
  misc_feature (1)..(2107): Ceres Seq. ID no. 15172491
gatgcatcacttttcttacctacaaatgaaaaagagaataatacaagagaaaataatgttgctaagattaaagttgtggtacgcaaaagaccattaaataagaaggaacttgctaagaaggaggatgatattgtaactgtatatgacaatgcatatttgacagtccatgaacccaaactaaaggttgatttgacagcttatgtggagaagcatgagttttgttttgatgctgttcttgacgagaatgttaccaatgatgaagtatatcgagttaccgtagaaccaattattcccacaatttttgagaaaaccaaagctacttgttttgcttatggtcagacaggaagtggcaaaacatacacaatgcaaccgttgccgctcagagctgcagaagaccttgttagacaattgcatcgaccagtatatcgaaatcagagatttaaattgtggcttagttactttgagatatatggtggaaaactttttgatcttcttagtgatagaaagaaactctgcatgagagaagatggacggcagcaagtgtgtattgtaggactgcaagaatttgaagtttctgatgtacaaattgtcaaagaattcattgaaaaggggaatgcagcaagaagtacagggtcaaccggtgcaaatgaggagtcctccagatcacatgctatcttacaactggttgtaaagaggcacaatgaggtaaaagagagcaggcggaacaataatgatgtaaatgaggcaaaaagtgggaaggttgtggggaagatttcttttattgatcttgctggaagtgaaagaggtgctgatactactgacaatgatcgtcagacaaggattgaaggtgctgaaatcaacaagagccttttggctttgaaggagtgcattcgtgctttggacaatgaccagatccatattccttttcgtggaagcaagcttacagaagtgctccgggactcctttgttggaaattcaaaaactgttatgatctcttgtatatccccaaatgctgggtcatgtgaacacacacttaataccttgagatatgcagaccgagttaaaagtctatccaagagtggaaatcctagaaaggaccaggccccaaatcctataccaccaccagcaattaaagaggtttcatccacatcttcacttccaggtagtgttggtgcagaggattttaataatggtcaacgtcaagaggtaaaaacaatggacatgagcaggaaagttgtcgaaaaggaaagttctttgtacagctccgctgctgatgttgacaaacaatcaagtttttcttctagttgtcaattcaatgggcgagaggaaaaaagctcagcttctgccccaatggacagggaaaagtttgaagtaaagaattcttacggtggtgattctaccagtcagaagatgaactcttattccctaaatgttacagatgagaaagtgcaaagggtgtctcctccacgcagaaaagggactaaggaggagaaatctgaaagatctgtaaattgggtaaaacgggatgtcgatggttatgatcattccaccacaagctccaaacagcagagcacaggaaattataacattaccactggatcggggcagtctgaaacagaatcctcttctaatgtgaatatcagcgcaatacttgaggaggaagaagcattaattgctgctcataggaaggaaattgaagacacaatggagattgttcgtgaagaaatgaaactactggcagaagtggaccagccgggaagtcttattgacaactacgtgacccagttgagtttcgtgctttctcgcaaagcagctagtctcgtcagtctccaagcacgccttgcaagattccaacatcgactaaaagaacaagagatactaagtagaaaaagagtgccccgttaagagactcggtttctcttgttcagtgatgacgtgtatgttcttgatgtcatttctcagtgtttgttagcgatatagttttaaaggtttttgttcattttataaaaaaaaatggatcttttgttgggtattcaaattaaatttactcaaatgtatatttgtcccttctgtgatattattatgcccaccttattattgcctttgc

SEQ ID NO: 58720 - protein, 634 aa, Glycine max
  peptide (1)..(634): Ceres Seq. ID no. 15172492
DASLFLPTNEKENNTRENNVAKIKVVVRKRPLNKKELAKKEDDIVTVYDNAYLTVHEPKLKVDLTAYVEKHEFCFDAVLDENVTNDEVYRVTVEPIIPTIFEKTKATCFAYGQTGSGKTYTMQPLPLRAAEDLVRQLHRPVYRNQRFKLWLSYFEIYGGKLFDLLSDRKKLCMREDGRQQVCIVGLQEFEVSDVQIVKEFIEKGNAARSTGSTGANEESSRSHAILQLVVKRHNEVKESRRNNNDVNEAKSGKVVGKISFIDLAGSERGADTTDNDRQTRIEGAEINKSLLALKECIRALDNDQIHIPFRGSKLTEVLRDSFVGNSKTVMISCISPNAGSCEHTLNTLRYADRVKSLSKSGNPRKDQAPNPIPPPAIKEVSSTSSLPGSVGAEDFNNGQRQEVKTMDMSRKVVEKESSLYSSAADVDKQSSFSSSCQFNGREEKSSASAPMDREKFEVKNSYGGDSTSQKMNSYSLNVTDEKVQRVSPPRRKGTKEEKSERSVNWVKRDVDGYDHSTTSSKQQSTGNYNITTGSGQSETESSSNVNISAILEEEEALIAAHRKEIEDTMEIVREEMKLLAEVDQPGSLIDNYVTQLSFVLSRKAASLVSLQARLARFQHRLKEQEILSRKRVPR

SEQ ID NO: 58721 - protein, 513 aa, Glycine max
  peptide (1)..(513): Ceres Seq. ID no. 15172493
MQPLPLRAAEDLVRQLHRPVYRNQRFKLWLSYFEIYGGKLFDLLSDRKKLCMREDGRQQVCIVGLQEFEVSDVQIVKEFIEKGNAARSTGSTGANEESSRSHAILQLVVKRHNEVKESRRNNNDVNEAKSGKVVGKISFIDLAGSERGADTTDNDRQTRIEGAEINKSLLALKECIRALDNDQIHIPFRGSKLTEVLRDSFVGNSKTVMISCISPNAGSCEHTLNTLRYADRVKSLSKSGNPRKDQAPNPIPPPAIKEVSSTSSLPGSVGAEDFNNGQRQEVKTMDMSRKVVEKESSLYSSAADVDKQSSFSSSCQFNGREEKSSASAPMDREKFEVKNSYGGDSTSQKMNSYSLNVTDEKVQRVSPPRRKGTKEEKSERSVNWVKRDVDGYDHSTTSSKQQSTGNYNITTGSGQSETESSSNVNISAILEEEEALIAAHRKEIEDTMEIVREEMKLLAEVDQPGSLIDNYVTQLSFVLSRKAASLVSLQARLARFQHRLKEQEILSRKRVPR

SEQ ID NO: 58722 - protein, 462 aa, Glycine max
  peptide (1)..(462): Ceres Seq. ID no. 15172494
MREDGRQQVCIVGLQEFEVSDVQIVKEFIEKGNAARSTGSTGANEESSRSHAILQLVVKRHNEVKESRRNNNDVNEAKSGKVVGKISFIDLAGSERGADTTDNDRQTRIEGAEINKSLLALKECIRALDNDQIHIPFRGSKLTEVLRDSFVGNSKTVMISCISPNAGSCEHTLNTLRYADRVKSLSKSGNPRKDQAPNPIPPPAIKEVSSTSSLPGSVGAEDFNNGQRQEVKTMDMSRKVVEKESSLYSSAADVDKQSSFSSSCQFNGREEKSSASAPMDREKFEVKNSYGGDSTSQKMNSYSLNVTDEKVQRVSPPRRKGTKEEKSERSVNWVKRDVDGYDHSTTSSKQQSTGNYNITTGSGQSETESSSNVNISAILEEEEALIAAHRKEIEDTMEIVREEMKLLAEVDQPGSLIDNYVTQLSFVLSRKAASLVSLQARLARFQHRLKEQEILSRKRVPR

SEQ ID NO: 58723 - DNA, 1228 bp, Glycine max
  misc_feature (1)..(1228): Ceres Seq. ID no. 14308683
gttttatggcagaaataggtgcacggcaggcatgggtttcagcttttgtgactcaatcacccaccataaccattattatcagtacatagtactagttaatctcagtcatgcctattcctaggtttatgctcttttcatcccagcatcgctccactgctgcggccctcgctcttcttcgaaggtgcgttccctctacgacaactcaatctgttaggtattcaaaatcaacaagtcacggtaaaacaaaacattatcttcatcctgtattccaaccagaatccagctccgcctcccaggtttctcgctcatggggtgcctatgttgttccagctgctgttcttggatttgctgggcttgcagctttttttcactataatgatgagagaagagcggttcccaaaggtcatcagggtggtggcctcagaaatgttgccaatggacccataattgggggtccatttacactaattaatacagagaaacaagcaattacagaacgtaattttcttgggaattgggtcctcctctactttggttatacctcatcccccgatcttgggccagagcaagtccaaattatggccaacgcaattgatatattagaatcaaaacagaatctcaagattctaccagtatttgtttccattgatcctcaacgtgatactccctcacaacttcgtgcttaccttaaagagtttgattcaagaatcataggattaactggacctgttgcagctattaggcagatggctcaagaatatcgtgtttactttaaaaaggtagaagaggatggcaatgattatcttgttgactgttcccacaacatgtatttgctgaatcctaaattggaggttacgagatgctttggagtcgagtatagtgcagaggagttgtcagaagcgatagtgaaagagctgaacagaaacccctcttgaatggttacgagatgctttggagtcgagtatagtgcggaggagatgtttctgtttttcgttttcttttaattagatcacagaataatttacatgtgatgaattaagttttactttagacgattggatttagctttgctttattttcaactagacttgcagaaaaatgtagtggcaatctgagcttcattttaagtttcgcgggcatttagttcttggctaacatcttagatggatgttttatacctgaatgttttcacattcaccttcatctaacaagcactttggttttagtt

SEQ ID NO: 58724 - protein, 275 aa, Glycine max
  peptide (1)..(275): Ceres Seq. ID no. 14308684
MPIPRFMLFSSQHRSTAAALALLRRCVPSTTTQSVRYSKSTSHGKTKHYLHPVFQPESSSASQVSRSWGAYVVPAAVLGFAGLAAFFHYNDERRAVPKGHQGGGLRNVANGPIIGGPFTLINTEKQAITERNFLGNWVLLYFGYTSSPDLGPEQVQIMANAIDILESKQNLKILPVFVSIDPQRDTPSQLRAYLKEFDSRIIGLTGPVAAIRQMAQEYRVYFKKVEEDGNDYLVDCSHNMYLLNPKLEVTRCFGVEYSAEELSEAIVKELNRNPS

SEQ ID NO: 58725 - protein, 269 aa, Glycine max
  peptide (1)..(269): Ceres Seq. ID no. 14308685
MLFSSQHRSTAAALALLRRCVPSTTTQSVRYSKSTSHGKTKHYLHPVFQPESSSASQVSRSWGAYVVPAAVLGFAGLAAFFHYNDERRAVPKGHQGGGLRNVANGPIIGGPFTLINTEKQAITERNFLGNWVLLYFGYTSSPDLGPEQVQIMANAIDILESKQNLKILPVFVSIDPQRDTPSQLRAYLKEFDSRIIGLTGPVAAIRQMAQEYRVYFKKVEEDGNDYLVDCSHNMYLLNPKLEVTRCFGVEYSAEELSEAIVKELNRNPS

SEQ ID NO: 58726 - DNA, 1344 bp, Glycine max
  misc_feature (1)..(1344): Ceres Seq. ID no. 14308727
aaaccaaaccaaaccaaacctctctttctcagtttctctctcttagggttttctcctcccccattgacccaccgtccatcgcaaaggaagtcgcgcccaatttccatggtttgtagattaaatcttaaagcagtaagtcatcatggataaatcagagcagactcagcagcaacatcagcatgggatgggcgttgccacaggtgctagccaaatggcctattcttctcactacccgactgctcccatggtggcttctggcacgcctgctgtagctgttccttccccaactcaggctccagctgccttctctagttctgctcaccagcttgcataccagcaagcacagcatttccaccaccaacagcagcaacaccaacaacagcagcttcaaatgttctggtcaaaccaaatgcaagaaattgagcaaacaattgactttaaaaaccacagtcttcctcttgctcggataaaaaagataatgaaagctgatgaagatgtccggatgatttctgcagaagctccagtcatatttgcaaaagcatgtgaaatgttcatattagagttgacgttgagatcttggatccacacagaagagaacaagaggagaactctacaaaagaatgatatagcagctgctatttcgagaaacgatgtttttgatttcttggttgatattatcccaagagatgagttgaaagaggaaggacttggaataaccaaggctactattccattggtgaattctccagctgatatgccatattactatgtccctccacagcatcctgttgtaggacctcctgggatgatcatgggcaagcccgttggtgctgagcaagcaacgctgtattctacacagcagcctcgacctcccatggcgttcatgccatggccccatacacaaccccagcaacagcagccaccccaacatcaacaaacagactcatgatgacaatgcaattcaattaggtcggaaagtagcatgcaccttatgattattacaaatttacttaatgcctttaagtcagctgtagtttagtgttttgcattgaaaaatgccaaagattgtttgaggtttcttgcactcatttatgattgtatgagctcttatgctgagttacttttggttgtgtttatttgaggtactggtgtggtagttaaattagtttgtagctgtccataagtaaacagcgtagctgcttaattaggaggtctgaaatgatgaaatagtttgtattgttattgcagaaggtaggttttattcagtatttcattctattgcaatggctgaatttaatgctcatccgcttagtaccaaaaaaaaaaaaaaaaaagaattcgaga

SEQ ID NO: 58727 - protein, 268 aa, Glycine max
  peptide (1)..(268): Ceres Seq. ID no. 14308728
MDKSEQTQQQHQHGMGVATGASQMAYSSHYPTAPMVASGTPAVAVPSPTQAPAAFSSSAHQLAYQQAQHFHHQQQQHQQQQLQMFWSNQMQEIEQTIDFKNHSLPLARIKKIMKADEDVRMISAEAPVIFAKACEMFILELTLRSWIHTEENKRRTLQKNDIAAAISRNDVFDFLVDIIPRDELKEEGLGITKATIPLVNSPADMPYYYVPPQHPVVGPPGMIMGKPVGAEQATLYSTQQPRPPMAFMPWPHTQPQQQQPPQHQQTDS

SEQ ID NO: 58728 - protein, 254 aa, Glycine max
  peptide (1)..(254): Ceres Seq. ID no. 14308729
MGVATGASQMAYSSHYPTAPMVASGTPAVAVPSPTQAPAAFSSSAHQLAYQQAQHFHHQQQQHQQQQLQMFWSNQMQEIEQTIDFKNHSLPLARIKKIMKADEDVRMISAEAPVIFAKACEMFILELTLRSWIHTEENKRRTLQKNDIAAAISRNDVFDFLVDIIPRDELKEEGLGITKATIPLVNSPADMPYYYVPPQHPVVGPPGMIMGKPVGAEQATLYSTQQPRPPMAFMPWPHTQPQQQQPPQHQQTDS

SEQ ID NO: 58729 - protein, 245 aa, Glycine max
  peptide (1)..(245): Ceres Seq. ID no. 14308730
MAYSSHYPTAPMVASGTPAVAVPSPTQAPAAFSSSAHQLAYQQAQHFHHQQQQHQQQQLQMFWSNQMQEIEQTIDFKNHSLPLARIKKIMKADEDVRMISAEAPVIFAKACEMFILELTLRSWIHTEENKRRTLQKNDIAAAISRNDVFDFLVDIIPRDELKEEGLGITKATIPLVNSPADMPYYYVPPQHPVVGPPGMIMGKPVGAEQATLYSTQQPRPPMAFMPWPHTQPQQQQPPQHQQTDS

SEQ ID NO: 58730 - DNA, 1958 bp, Glycine max
  misc_feature (1)..(1958): Ceres Seq. ID no. 15226288
rvcgggscccccctcgagtcagctacgtaggcccccccccccaggagtttctgcatgtggaaattcagagtcaagcttaccacttcccagtcaaaaccattctgagcaacaagtttttcatgatgagtggccagcaactgaacaaccaattgctagaaatgcacaggaactaaacatgtctgcttcttctaatgccaatgggccatttgagcatcctagcttgcatgtaaatgcaattggtttacacaggaactgtgaattagacacagccccagtttcatggggggatgttgcttgtgataatgatgcttttgaaaaaaatgaatctgcttctatatctagagaacatactgttttgagcagcaacactggactacgatcccattccaactctaacttaaggaatactatttcctctgatcattgtagttcttatgggcatggtgaagacgtgtcatcagccgcttcaattttccagcggctaagtataggagaatccaaacagaaagtgccaacatttgaagatgatcctgcagtggttattccaattcatttacaagccttaggtgctgactgttcacatttgagttttggtacatataatggcagcagtactgcatcttctgtccttcttaattctaatcatctttcaaaaagtgacttggaagagaagtctgcagctgtagatgattcttcggctcagttcctggatgcaagttatgatttccagagagataagcagcatggatttgatgttcttaaaggagcagcaggtgataaaaacagtgacatcctttcatctgataagcaatggtttgtgaagcatattgttcctgaggaaacttttgagaatgaacacatcatcaaggcatctgtatcagatcctagattgcaaaaatcacactgggagaatacttcactgccattgaagcagccaggggtgcagagtggaaaccatttgaattttccaagaggattgtatgctgactcaaattcaatacctggtgatgtgttggcgttgctcatgtcacaatctcaaactgcaagacacagtaacacagtttcatccataagcaatcctgccttctccatgtctaaggtcatggagccaggtgcctttcctctacctatgagatctgcacttccccgggatcctacagtgcattcctcatcacactttcatcaattgcctgacacaaaaggatatttttccctgccccagaataggtcatacaatacaaccataaattctcagttaccattttcaggcaatactgtatacaatcaatctccagcagacatgaagtacaaccttctacaaaatagaaatgaattccttacaaatagattgcctcctgccactgccagagatgcatttggctatggaaatcttggctcttccatttatagttctggaagctttctgtctaatccatctcctggtcatatgatgccttcaagtaactttaatgagattttaccttctcagtataatggtggacgtaacataaactctattcaacagcatggtagcttttctcattgggattacggagccgagccaagatctttgtttatcccgaagagaacccagtcacagtatgctactcctggatatgctgaccttcatcattctgagacacgggttttggaaaaatatcagcagccaggtgattttcaagatttgccatccaagcagttgcatccattttggcaacgcgacaaccttcatcattctgagacacgggttttggaagaacatcagcagccaggtgattttcaagatttgccgtccaagcagttgcatccattttggcagcacgataactaatactatacatcctgcttgttttttcttcccttttttgtatacagaattattttagtaggtttaggtgaattatggtgttattttcattcagatgcttgagcgttaattcaattgtagatcttttttg

SEQ ID NO: 58731 - protein, 609 aa, Glycine max
  peptide (1)..(609): Ceres Seq. ID no. 15226289
  misc_feature (1)..(1): Xaa is any aa, unknown or other
  misc_feature (2)..(2): Xaa is any aa, unknown or other
XXPPSSQLRRPPPPGVSACGNSESSLPLPSQNHSEQQVFHDEWPATEQPIARNAQELNMSASSNANGPFEHPSLHVNAIGLHRNCELDTAPVSWGDVACDNDAFEKNESASISREHTVLSSNTGLRSHSNSNLRNTISSDHCSSYGHGEDVSSAASIFQRLSIGESKQKVPTFEDDPAVVIPIHLQALGADCSHLSFGTYNGSSTASSVLLNSNHLSKSDLEEKSAAVDDSSAQFLDASYDFQRDKQHGFDVLKGAAGDKNSDILSSDKQWFVKHIVPEETFENEHIIKASVSDPRLQKSHWENTSLPLKQPGVQSGNHLNFPRGLYADSNSIPGDVLALLMSQSQTARHSNTVSSISNPAFSMSKVMEPGAFPLPMRSALPRDPTVHSSSHFHQLPDTKGYFSLPQNRSYNTTINSQLPFSGNTVYNQSPADMKYNLLQNRNEFLTNRLPPATARDAFGYGNLGSSIYSSGSFLSNPSPGHMMPSSNFNEILPSQYNGGRNINSIQQHGSFSHWDYGAEPRSLFIPKRTQSQYATPGYADLHHSETRVLEKYQQPGDFQDLPSKQLHPFWQRDNLHHSETRVLEEHQQPGDFQDLPSKQLHPFWQHDN

SEQ ID NO: 58732 - protein, 551 aa, Glycine max
  peptide (1)..(551): Ceres Seq. ID no. 15226290
MSASSNANGPFEHPSLHVNAIGLHRNCELDTAPVSWGDVACDNDAFEKNESASISREHTVLSSNTGLRSHSNSNLRNTISSDHCSSYGHGEDVSSAASIFQRLSIGESKQKVPTFEDDPAVVIPIHLQALGADCSHLSFGTYNGSSTASSVLLNSNHLSKSDLEEKSAAVDDSSAQFLDASYDFQRDKQHGFDVLKGAAGDKNSDILSSDKQWFVKHIVPEETFENEHIIKASVSDPRLQKSHWENTSLPLKQPGVQSGNHLNFPRGLYADSNSIPGDVLALLMSQSQTARHSNTVSSISNPAFSMSKVMEPGAFPLPMRSALPRDPTVHSSSHFHQLPDTKGYFSLPQNRSYNTTINSQLPFSGNTVYNQSPADMKYNLLQNRNEFLTNRLPPATARDAFGYGNLGSSIYSSGSFLSNPSPGHMMPSSNFNEILPSQYNGGRNINSIQQHGSFSHWDYGAEPRSLFIPKRTQSQYATPGYADLHHSETRVLEKYQQPGDFQDLPSKQLHPFWQRDNLHHSETRVLEEHQQPGDFQDLPSKQLHPFWQHDN

SEQ ID NO: 58733 - DNA, 1104 bp, Glycine max
  misc_feature (1)..(1104): Ceres Seq. ID no. 15169184
gcttccctctctcatcctctctgccgcttccccgctctccccaaactactctgtgccccgtcagatcgacctggactttggcgacagctacttctcgacgggcggcacgggcgtgctgctacttctgcttcctctcccacgcttgctgagctgatggctacatcagagccagtacaagagagtttggtggtgcactactcacaacctagtaggccccgggtcctccttgctgcttcaggaagtgtagccgctataaaatttgaaagcctttgccgtagcttctctgagtgggcggatgtccgagctgtggccaccacgtcatccttgcacttcgttgatagatcatctctaccaagtggcatcgttctttacactgatgacgatgaatggtctacctggaagaagataggagatgaagtcttacacatcgagctgcggaaatgggcagacgttatggtgattgctccattgtcagcaaataccctggctaagatcgccggtgggttatgcgacaacctcttgacctgcatcgtgagagcgtgggactacagcaaaccgctctttgttgccccagccatgaacacgttaatgtggaacaacccattcacggagcggcatcttcacacaatcaaccaactgggcatagccttgatccccccagttaccaaaaggctggcctgtggcgattacgggaacggcgcaatggccgaaacctcgcagatccatacttccgtgaggctcgcgtgcaagacgcaaccgcacgatgcgagcagttcactcgcgggtcctgtcagtaataaccggccatctagctgatgcagcggttggccacttgattgtcaagcttaggaatttgttttatctgcagtgtgcatctggagtgttgtaccagattttttttcaactagagtttgtgtgtattgaattagggggaaaggttgttgtcacatgataacaataacttccaatgatgactctattcagtttgtaattgtctgtgggagtacaattatgcagctgtattgtctgctacaatattgtttgtttgtgtgtgtgggagtggggggtgctgttgccacagagatagattcctccctgcccagt

SEQ ID NO: 58734 - protein, 271 aa, Glycine max
  peptide (1)..(271): Ceres Seq. ID no. 15169185
ASLSHPLCRFPALPKLLCAPSDRPGLWRQLLLDGRHGRAATSASSPTLAELMATSEPVQESLVVHYSQPSRPRVLLAASGSVAAIKFESLCRSFSEWADVRAVATTSSLHFVDRSSLPSGIVLYTDDDEWSTWKKIGDEVLHIELRKWADVMVIAPLSANTLAKIAGGLCDNLLTCIVRAWDYSKPLFVAPAMNTLMWNNPFTERHLHTINQLGIALIPPVTKRLACGDYGNGAMAETSQIHTSVRLACKTQPHDASSSLAGPVSNNRPSS

SEQ ID NO: 58735 - protein, 220 aa, Glycine max
  peptide (1)..(220): Ceres Seq. ID no. 15169186
MATSEPVQESLVVHYSQPSRPRVLLAASGSVAAIKFESLCRSFSEWADVRAVATTSSLHFVDRSSLPSGIVLYTDDDEWSTWKKIGDEVLHIELRKWADVMVIAPLSANTLAKIAGGLCDNLLTCIVRAWDYSKPLFVAPAMNTLMWNNPFTERHLHTINQLGIALIPPVTKRLACGDYGNGAMAETSQIHTSVRLACKTQPHDASSSLAGPVSNNRPSS

SEQ ID NO: 58736 - DNA, 1891 bp, Glycine max
  misc_feature (1)..(1891): Ceres Seq. ID no. 14310520
aaaacaaaaaagaccatggtaatggtaaaccctctaaattattggggaagacaaaagaatgagaaagaaagctgccctttctctcgctactcctcctaccccaaacaaaactttcccattacaaattgtggaatgaagaaagaatggcaagacaagtgagtagtagtatagtagtaattgacccatcaaacaaacaagcataacccatgtaattgttattgtagatagatagagtgagtgagtgagcactgtgttgtgtatatagtagtgtgtaaactctccccaacagacagacacgccgccactcaattatttctgtccatttcttcttcccatattgttctcgtgtgttgtgtgtgtcagtgttttggtgtgtgtgtgtgtgtgtgtgtgagtgagagaaagagaaaaaaagaaaagaaaaagagtgtcttggggcggttttggtttgagtttaacactttcatttcgaagatgccgcgcccagggccaaggccttacgagtgcgtgagaagggcttggcacagcgagcgccaccaacccgtgagaggttccatcattcagcagattttcagggtcgtcaatgacgctcacagtcccgcaaccaagaagaacaaggaatggcaggagaagctccccgtggtggttctcaaggccgaagaaatcatgtactccaaagccaattccgaggcagagtacttgaatcctgacacgctctgggaccgcctcaatgatgccgttaacacaatcatacggagagatgagacaaccgagacaggaggcctcttgcccccatgtgttgaagctgcacttaacttgggatgcaaagccgtgagaacttccagaagtgatcggcacaataacccaaggacttacctttctccaaggattcaacagcctccttgtctgcctcctaaacctgttgcggggaatcccttgaactatgcaaaagtcacaactcctgctgtgtcaccaattcctgtgccagattctatccacccaaatagcaggctcatgggttcctctaagtaccctttctcagaaggtatcccttctggtcatcaccagccattgacaatggaagctagaccctcattgaacttgggttcagtttaccctttgtactatggttatgaagccagagaacctgaaccttggacgactgctacagataccacgtgttctgatacaatctttgttggcagaccagtcatttcagtccctgagccttcaggaattggtctatcggaaaacttctcctatggtacattccatcacgttgcaaacagaatgagaaaagagactgctgttggcactcaggaggcagcaccagatagggaatgtgacttgtctttgaggttgggtcaatgtctgcatccgtgttcaagcagcaaaagtagttcagcatatgaagtagatgatgttggtttaggagtttcaccggaaagctgcaagtttagccatttatccttgcagagaaatagagagttctgtttttatcctagagagacaggttatggcaccattgagtccacttctggtaaatgtaatgtagagggtgaagatctgaatttagaggcaactcttcggaagcgcaaagcacctttatgtggtaacaacgaggaagatgggcaattttgccggaatccaggggtcccatccaatcgttttactagtaggccaggttcgtagacagtttcttgttgtatcatagtatatgcatttgcatttctagatagatgaatgatccaaaatgttgtttaatcctcttatgtagactctttatgtgtagctctgcttgtgaaaaattttagaagctggcgttgagttgctaattgcattttctcccaatgtgaactgtatataaaatcttagtttgctttgcttaaag

SEQ ID NO: 58737 - protein, 405 aa, Glycine max
  peptide (1)..(405): Ceres Seq. ID no. 14310521
MPRPGPRPYECVRRAWHSERHQPVRGSIIQQIFRVVNDAHSPATKKNKEWQEKLPVVVLKAEEIMYSKANSEAEYLNPDTLWDRLNDAVNTIIRRDETTETGGLLPPCVEAALNLGCKAVRTSRSDRHNNPRTYLSPRIQQPPCLPPKPVAGNPLNYAKVTTPAVSPIPVPDSIHPNSRLMGSSKYPFSEGIPSGHHQPLTMEARPSLNLGSVYPLYYGYEAREPEPWTTATDTTCSDTIFVGRPVISVPEPSGIGLSENFSYGTFHHVANRMRKETAVGTQEAAPDRECDLSLRLGQCLHPCSSSKSSSAYEVDDVGLGVSPESCKFSHLSLQRNREFCFYPRETGYGTIESTSGKCNVEGEDLNLEATLRKRKAPLCGNNEEDGQFCRNPGVPSNRFTSRPGS

SEQ ID NO: 58738 - protein, 341 aa, Glycine max
  peptide (1)..(341): Ceres Seq. ID no. 14310522
MYSKANSEAEYLNPDTLWDRLNDAVNTIIRRDETTETGGLLPPCVEAALNLGCKAVRTSRSDRHNNPRTYLSPRIQQPPCLPPKPVAGNPLNYAKVTTPAVSPIPVPDSIHPNSRLMGSSKYPFSEGIPSGHHQPLTMEARPSLNLGSVYPLYYGYEAREPEPWTTATDTTCSDTIFVGRPVISVPEPSGIGLSENFSYGTFHHVANRMRKETAVGTQEAAPDRECDLSLRLGQCLHPCSSSKSSSAYEVDDVGLGVSPESCKFSHLSLQRNREFCFYPRETGYGTIESTSGKCNVEGEDLNLEATLRKRKAPLCGNNEEDGQFCRNPGVPSNRFTSRPGS

SEQ ID NO: 58739 - protein, 225 aa, Glycine max
  peptide (1)..(225): Ceres Seq. ID no. 14310523
MGSSKYPFSEGIPSGHHQPLTMEARPSLNLGSVYPLYYGYEAREPEPWTTATDTTCSDTIFVGRPVISVPEPSGIGLSENFSYGTFHHVANRMRKETAVGTQEAAPDRECDLSLRLGQCLHPCSSSKSSSAYEVDDVGLGVSPESCKFSHLSLQRNREFCFYPRETGYGTIESTSGKCNVEGEDLNLEATLRKRKAPLCGNNEEDGQFCRNPGVPSNRFTSRPGS

SEQ ID NO: 58740 - DNA, 1503 bp, Glycine max
  misc_feature (1)..(1503): Ceres Seq. ID no. 15178181
gagattaataataataagagagtaaggaagggcactccaagactttggtggagagcaagagctataagtgtgagaagtgattggaaattgttggaacccaccctatcaacaaggagaagctgttttcgttcgtcgccactaacactaatcgtttcttcaatgccttacgagaaggaactcgccgctgcaaagaaagcagtcactctcgctgctcgtctctgccagaaagttcagaaggctcttctgcaatccgatgtgcactcaaagtcagacaaaagtcctgtcacagtggctgattatggttcacaagcattggtcagctttatacttgagagagaacttccttctgaatcattttcattagtagctgaggaggattcaggtgatcttcgtaaggaaagtggccaggatactctgaatcgcattacagaacttgtcaatgatactcttgctagtgaaggatcaaatagcttttctactttaacaacagatgacgtgcttgtggccatcgacagtggtaaatctgaaggtggttcagttggacggcactgggttttggatccgatagatggtactaaagggtttgtaagaggagattaatatgctatagcattagctttgttacatgaaggcaaaattgtattgggtgtcttggcttgtccaaatcttccactggcatccattggctctaatcagcagcattcttcttcaaatgaagttggttgtctcttctttgctaaagttggtgatggaacatatatgcaagcactgggcggttctacacaaactagggtgcatgtctgtgatattgataatccagaggaagcatcatttttcgaatcttttgaagcagcacactccttgcatgacttatctagctcaatcgcagaaaaacttggtgtcaaagcaccaccagtcagaattgatagccaagcaaaatatggagctttgtcaagaggagatggggctatatatttgcgtttccctcacagaggataccgtgaaaaaatatgggatcatgctgctggcagcattgttgtgactgaagctggaggtattgccatggatgctgcggggaaccctttggacttttcaaaaggaaagtttcttgatgttgtatctggtattattgttacaaaccagaaattgatgccatcacttctgacagcagttaaagaagcactcaatgagaaagcatcatccttgtgatttccatttaagcgaatgattctacaaatgagcttgctaacgttgttgtcggctcgtgttatatggggccttcccctcaattgtgctatatttcattctgatgaagttaaacaaatgatgggacttcctctgatacttcctttgtagcagcagatttgtgctctggttttttgcagctgctattttcttctccttctatatacctgtccttttctctccttttctattaataaacagagatgagagatcttatataaacttgtttgataattaattcttctagattaacttgtc

SEQ ID NO: 58741 - protein, 199 aa, Glycine max
  peptide (1)..(199): Ceres Seq. ID no. 15178182
EINNNKRVRKGTPRLWWRARAISVRSDWKLLEPTLSTRRSCFRSSPLTLIVSSMPYEKELAAAKKAVTLAARLCQKVQKALLQSDVHSKSDKSPVTVADYGSQALVSFILERELPSESFSLVAEEDSGDLRKESGQDTLNRITELVNDTLASEGSNSFSTLTTDDVLVAIDSGKSEGGSVGRHWVLDPIDGTKGFVRGD

SEQ ID NO: 58742 - protein, 149 aa, Glycine max
  peptide (1)..(149): Ceres Seq. ID no. 15178183
MQALGGSTQTRVHVCDIDNPEEASFFESFEAAHSLHDLSSSIAEKLGVKAPPVRIDSQAKYGALSRGDGAIYLRFPHRGYREKIWDHAAGSIVVTEAGGIAMDAAGNPLDFSKGKFLDVVSGIIVTNQKLMPSLLTAVKEALNEKASSL

SEQ ID NO: 58743 - protein, 146 aa, Glycine max
  peptide (1)..(146): Ceres Seq. ID no. 15178184
MPYEKELAAAKKAVTLAARLCQKVQKALLQSDVHSKSDKSPVTVADYGSQALVSFILERELPSESFSLVAEEDSGDLRKESGQDTLNRITELVNDTLASEGSNSFSTLTTDDVLVAIDSGKSEGGSVGRHWVLDPIDGTKGFVRGD

SEQ ID NO: 58744 - DNA, 1508 bp, Glycine max
  misc_feature (1)..(1508): Ceres Seq. ID no. 14312293
gattccgcagcttgttactctcttctctctcaaaacaaaacttgaatccatccatactctacataccccttgcccttgctttgcttctttctttctcacaagcaccagcagcactcaaatcaatcaatcgtttttaatgcccttgcttctccctctttccgtgtgtatgtaaaatctttgtttttatcagaggtggtgcagaaagttgtatctcagatccctatatacaccgaaaacgatacaactgtgtgctgtgtacactgtgcactgtgcttctccctctctctctctctctctcacaaaatcataatcattttacatattacacctattaccgaatagagtggtcctcaacctcaacctaaaagcctcactttttttgttttccccgataaccctattcaacccaatcctcctttcccttttcctttgacaaaaggaaaggaagaaatgcaagaaccaagcttgggattgatgggtgaggtctccggcgatcaccaccgtcagctgaaggcggagataacgactcatccgctgtacgagcagcttctggcagcacacgtggcatgcctccgtgtggccaccccgatcgaccagcttccactcatcgatgctcagttatctcagtctcaccatcttctacgctcttatgtctcacacaacactcattctctctcccctcatcaccgccaagaacttgacaacttcctggcacaatatttgatagttctgtgtactttcaaagaacagcttcagcaacatgtaagagtccacgccgtcgaggctgtcatggcctgccgtgatatcgaaaatgccttacaagctctaactggagtgagtttgggagaaggaactggtgcaacaatgtcagatgatgaagatgatttacaaatggatatttctttagatcaatctagcgcggaagggcatgacatgatgggatttggtccattacttcctacagaatctgaaaggtcattgatggaaagagttcgccaggaactaaagattgagctgaaacagggtttcaagtcaagaattgaagatgtcagggaagaaatattaaggaaacgtagagctgggaaattaccaggtgacacaacttctgtgttaaagaactggtggcagcaacatgcaaagtggccttacccaactgaagatgacaaggcaaaacttgtggaggagacagggttgcagctgaagcaaattaataattggttcatcaaccaaaggaaacgcaactggcacagtaactctcaatcggttacctctttgaagtcgaagcgcaagaggtagacatattattttgtccctaactatgtggaacagctagcaagcaacacaactatatataaggacatgcttaatattgctgatagagtgtagtcccactaaggatgcaaaagatggtagatgcatgtgggttactgtaatattgtaagatagctgaaacaaattatagactggctgtaaatttgtggaatttaacgtatgcaaacttttctttt

SEQ ID NO: 58745 - protein, 281 aa, Glycine max
  peptide (1)..(281): Ceres Seq. ID no. 14312294
MQEPSLGLMGEVSGDHHRQLKAEITTHPLYEQLLAAHVACLRVATPIDQLPLIDAQLSQSHHLLRSYVSHNTHSLSPHHRQELDNFLAQYLIVLCTFKEQLQQHVRVHAVEAVMACRDIENALQALTGVSLGEGTGATMSDDEDDLQMDISLDQSSAEGHDMMGFGPLLPTESERSLMERVRQELKIELKQGFKSRIEDVREEILRKRRAGKLPGDTTSVLKNWWQQHAKWPYPTEDDKAKLVEETGLQLKQINNWFINQRKRNWHSNSQSVTSLKSKRKR

SEQ ID NO: 58746 - protein, 273 aa, Glycine max
  peptide (1)..(273): Ceres Seq. ID no. 14312295
MGEVSGDHHRQLKAEITTHPLYEQLLAAHVACLRVATPIDQLPLIDAQLSQSHHLLRSYVSHNTHSLSPHHRQELDNFLAQYLIVLCTFKEQLQQHVRVHAVEAVMACRDIENALQALTGVSLGEGTGATMSDDEDDLQMDISLDQSSAEGHDMMGFGPLLPTESERSLMERVRQELKIELKQGFKSRIEDVREEILRKRRAGKLPGDTTSVLKNWWQQHAKWPYPTEDDKAKLVEETGLQLKQINNWFINQRKRNWHSNSQSVTSLKSKRKR

SEQ ID NO: 58747 - protein, 168 aa, Glycine max
  peptide (1)..(168): Ceres Seq. ID no. 14312296
MACRDIENALQALTGVSLGEGTGATMSDDEDDLQMDISLDQSSAEGHDMMGFGPLLPTESERSLMERVRQELKIELKQGFKSRIEDVREEILRKRRAGKLPGDTTSVLKNWWQQHAKWPYPTEDDKAKLVEETGLQLKQINNWFINQRKRNWHSNSQSVTSLKSKRKR

SEQ ID NO: 58748 - DNA, 1339 bp, Glycine max
  misc_feature (1)..(1339): Ceres Seq. ID no. 15169142
aattttcatgtatgttagcaattaattttgattaatttatatcttgaattaattaattaatgttcactcattctggtcaatacagttagttaggtaattgtaaaacaatcatagaacatatcttttccatttttatctcatgaaaaatgagttaaaaataagattatatgaaatggaacatgtgcaaggttatgtttgtctaaaatgtctgaggatagaacaacattaactcaactggttgaatttctggtggtctcttcatttgtaagtagtgttatcttgtggcaacttgcctcttctgacgataaagttttatagtcttgagggttatagatgtcacaaatagctttcaataacctaaagtaaacatatgccatgtatgcagaattccaaaaacaattggtgtctcaattccaatgaaggcaactttcttcataacttacataatggtggatgggtgggctggatgtgctggtgagattttaaggttgaagccattgatattttatcacttgaaaaacttcttcttagtgaagactgaaaaggaccgtgaagaagcaatggatccagggacatttggtttcaatacaggcgaacctcaaatacaactgtatttcttacttggccttgtgtatgctgtagtcacaccatttctacttccatacatcatagtgttctttggcttggcatatgtcgtctaccgtcatcagattattaatgtctacaaccaagagtatgagagtgctgcagcattctggcctgatgtccatggacgtattatatttgcgttagtgatctcacagctgctgttaatggggttattgagtacaaaagaagctgctaactcaactccattgctcattactctcccaattctgacaatatcattccatctgtattgcaagggacgatatgaacctgctttcgttaagcatccattacaggaagcaatgatgaaggacacattggagcgtgcaagagagccaaacttcaatttgaaagagttccttcagaatgcatatatccatccggtgtttaagggtgatgatgacagtgacagtgatgtaatgagcgaaaactgggaggagcaagaacctgtacttgtacaaacaaagcgccagtcccggaaaaacacaccattgcctagcaaacatagcggttcattatcatcttgaatgccacttcttatgagcataaaactagagcaatagatagtttgaagttcactattggtggcactgctgcatgatatacccaaactctactctcttttttttctgtatataaatcagaatctagataatctttcaatgaagtatataacagaagtatgcaggtc

SEQ ID NO: 58749 - protein, 252 aa, Glycine max
  peptide (1)..(252): Ceres Seq. ID no. 15169143
MKATFFITYIMVDGWAGCAGEILRLKPLIFYHLKNFFLVKTEKDREEAMDPGTFGFNTGEPQIQLYFLLGLVYAVVTPFLLPYIIVFFGLAYVVYRHQIINVYNQEYESAAAFWPDVHGRIIFALVISQLLLMGLLSTKEAANSTPLLITLPILTISFHLYCKGRYEPAFVKHPLQEAMMKDTLERAREPNFNLKEFLQNAYIHPVFKGDDDSDSDVMSENWEEQEPVLVQTKRQSRKNTPLPSKHSGSLSS

SEQ ID NO: 58750 - protein, 242 aa, Glycine max
  peptide (1)..(242): Ceres Seq. ID no. 15169144
MVDGWAGCAGEILRLKPLIFYHLKNFFLVKTEKDREEAMDPGTFGFNTGEPQIQLYFLLGLVYAVVTPFLLPYIIVFFGLAYVVYRHQIINVYNQEYESAAAFWPDVHGRIIFALVISQLLLMGLLSTKEAANSTPLLITLPILTISFHLYCKGRYEPAFVKHPLQEAMMKDTLERAREPNFNLKEFLQNAYIHPVFKGDDDSDSDVMSENWEEQEPVLVQTKRQSRKNTPLPSKHSGSLSS

SEQ ID NO: 58751 - protein, 204 aa, Glycine max
  peptide (1)..(204): Ceres Seq. ID no. 15169145
MDPGTFGFNTGEPQIQLYFLLGLVYAVVTPFLLPYIIVFFGLAYVVYRHQIINVYNQEYESAAAFWPDVHGRIIFALVISQLLLMGLLSTKEAANSTPLLITLPILTISFHLYCKGRYEPAFVKHPLQEAMMKDTLERAREPNFNLKEFLQNAYIHPVFKGDDDSDSDVMSENWEEQEPVLVQTKRQSRKNTPLPSKHSGSLSS

SEQ ID NO: 58752 - DNA, 1129 bp, Glycine max
  misc_feature (1)..(1129): Ceres Seq. ID no. 14308766
gaatcgattactatactagtaataaattgtacaaaaaataaaaatataaataatataaatataaaaagaacaaacacaaattttatgtgattagtcgcggtatttaaaataaaaaatgaaagtagacaaataaaaaaggaaaggagatgtttgaataaaaataattccccttcaagttcttattttttgagaggacaggacaatatgaatgttttattatgctctatcaacacattaaaaagattatatgatatatctgctgtggaagtaggtcaacatttctattggcaaatagggagtttccaagtacatgcccaagtacttattacttcttgggttgtaattgctctcttattggtttcagccattctaattattcgaaatctgcaaaccattcccgctttcggtcagaatttctttgaatatgttcttgaattcattcgagacgtgagcaaaactcaaattggagaagaatatggtccgtgggttccttttattggaactttgtttctatttatttttgtttctaattggtcgggggctcttttaccttggaaaatcatacaattacctcacggggagttagctgcacccacaaatgatataaatactaccgttgctttagctttacttacatcaattgcatatttctatgcgggtctttcaaaaaaaggattagcttattttaataaatacatccaaccaaccccaatccttttaccgattaacatcttagaagatttcacaaaacccttatctcttagttttcgacttttcggaaatatattagctgatgaattagtagttgttgttcttgtttctttagtacctttagtagttcctatacctgtcatgttccttggattattcacaagcggtattcaagctctcatttttgctactttagctgcggcttatataggtgaatccatggaaggccatcattgaccagtttttatacaaaatagtccttttcgtttagcttgccgcacatatattgcggctcaatataatctacttagtaaacatctatatctatctacctatatctatatagatataggtagatagatatagatagatattcgattagcatatattagcatatattagtatatattggatattc

SEQ ID NO: 58753 - protein, 247 aa, Glycine max
  peptide (1)..(247): Ceres Seq. ID no. 14308767
MNVLLCSINTLKRLYDISAVEVGQHFYWQIGSFQVHAQVLITSWVVIALLLVSAILIIRNLQTIPAFGQNFFEYVLEFIRDVSKTQIGEEYGPWVPFIGTLFLFIFVSNWSGALLPWKIIQLPHGELAAPTNDINTTVALALLTSIAYFYAGLSKKGLAYFNKYIQPTPILLPINILEDFTKPLSLSFRLFGNILADELVVVVLVSLVPLVVPIPVMFLGLFTSGIQALIFATLAAAYIGESMEGHH

SEQ ID NO: 58754 - DNA, 1060 bp, Glycine max
  misc_feature (1)..(1060): Ceres Seq. ID no. 14308057
aaaaaactgagtgatgatggactacacctacgacaccaagcatcgcacaatggaacctcatgggataaggggtgtaatggacttggagcatcaaattcactacctggaaactgaggcttatagttctattttgaaggctttcattgctcaatctgatcttcttacttggggcaaagaggggcttatgactgagctgcgaaaggaactaaatgttacagatattgaacatggagaaatcctactgaaaataaattcagaccagttaattaagcagataagggagcagaggaaattggcatctcaagctaaggattatattaaacctagtgctcctgattgtgtttgtgcttcgatgggaaattcagtgataagaatgaaaactccttcctctgctgcattttatactcagaagaaaatgtcacactgccaagcttctctaatttccactcccattccttctccaatgcctccaaaatttaatgatgatccattgaatgctgagtttgcccacggaaatgtgcagcaatctatggaaatgttaaattgtaatgttcagttaccacctgttggaggaggaagaggactgaaaggaaagtatccattgcagaaggatttacacagatctcaccttgtcaagttaaagaaaagatctgatttaattcagcttcgtgcaacagatagggttatccacgatgttaagaagatgcttttcagtagagggaaacctgacccagttgatattgagagagcaaaaaggactcttacggaacaagaaatagctataactgaagcacttggtaaagtggctaatgtgttagagaggggtgatgcacctaatcagatgcaacgttatgaactctctaagaatactcctggaggacaagaaatgatgatacatgctaatttccgtgaactaattggtaatggtaggttgaataaacatggggttcattctgatctgtgcagttagggtgatgatttcatggcatagatatggagcttttaactctgatgaggctatacaacttatatagtgatattgctggattggtttagtgaa

SEQ ID NO: 58755 - protein, 318 aa, Glycine max
  peptide (1)..(318): Ceres Seq. ID no. 14308058
MMDYTYDTKHRTMEPHGIRGVMDLEHQIHYLETEAYSSILKAFIAQSDLLTWGKEGLMTELRKELNVTDIEHGEILLKINSDQLIKQIREQRKLASQAKDYIKPSAPDCVCASMGNSVIRMKTPSSAAFYTQKKMSHCQASLISTPIPSPMPPKFNDDPLNAEFAHGNVQQSMEMLNCNVQLPPVGGGRGLKGKYPLQKDLHRSHLVKLKKRSDLIQLRATDRVIHDVKKMLFSRGKPDPVDIERAKRTLTEQEIAITEALGKVANVLERGDAPNQMQRYELSKNTPGGQEMMIHANFRELIGNGRLNKHGVHSDLCS

SEQ ID NO: 58756 - protein, 317 aa, Glycine max
  peptide (1)..(317): Ceres Seq. ID no. 14308059
MDYTYDTKHRTMEPHGIRGVMDLEHQIHYLETEAYSSILKAFIAQSDLLTWGKEGLMTELRKELNVTDIEHGEILLKINSDQLIKQIREQRKLASQAKDYIKPSAPDCVCASMGNSVIRMKTPSSAAFYTQKKMSHCQASLISTPIPSPMPPKFNDDPLNAEFAHGNVQQSMEMLNCNVQLPPVGGGRGLKGKYPLQKDLHRSHLVKLKKRSDLIQLRATDRVIHDVKKMLFSRGKPDPVDIERAKRTLTEQEIAITEALGKVANVLERGDAPNQMQRYELSKNTPGGQEMMIHANFRELIGNGRLNKHGVHSDLCS

SEQ ID NO: 58757 - protein, 306 aa, Glycine max
  peptide (1)..(306): Ceres Seq. ID no. 14308060
MEPHGIRGVMDLEHQIHYLETEAYSSILKAFIAQSDLLTWGKEGLMTELRKELNVTDIEHGEILLKINSDQLIKQIREQRKLASQAKDYIKPSAPDCVCASMGNSVIRMKTPSSAAFYTQKKMSHCQASLISTPIPSPMPPKFNDDPLNAEFAHGNVQQSMEMLNCNVQLPPVGGGRGLKGKYPLQKDLHRSHLVKLKKRSDLIQLRATDRVIHDVKKMLFSRGKPDPVDIERAKRTLTEQEIAITEALGKVANVLERGDAPNQMQRYELSKNTPGGQEMMIHANFRELIGNGRLNKHGVHSDLCS

SEQ ID NO: 58758 - DNA, 1553 bp, Glycine max
  misc_feature (1)..(1553): Ceres Seq. ID no. 14308723
aaattttcaagtcccagcctatggactctgcttcattcgctcatcctttgatttcccacgtcatcactagctcaagcttgcatcgttcctacggtattcatcacagtgcaagactaggcctatggaagaacaaagtctggaactcagcttgttgtgctgctggagtagaagacttgtttgacgatagtaatttgaagagaaatgagaatggttccctcttagtgatgccgaaggtgatccagattgtccctctaaaggctactcttccattgaacgagcgcttaatgcattacgccaaggcaagtttgtgattgtggtagatgatgaaaacggcgatattgaaggaaatcttatcatggctgcatctcttactagtcccaaggatattgccttcatgattaagcacggatcagggatcgtttctgttggcatgaaagaggaggatcttcaaagactgaacctccctttaatgtcaccagagactgaagatgaggactcttctgctcccaccttcactatcacagtggatgtgaaatctggaacttctacgggtgtatcagctgctgatagagcgaaaactgttcttgctctgtcatctcctgagtccaaatcagaggatttcagaaaaccgggtcatgtgtttcctcttaagtacagaaatggtggggttcttagaagagcaggtcacactgaggcctcactggacttagttgcactggctggcttgcccccaatttctgttctttcggctcttgttgatgaaaatgatggctctatgcaatctttgctcaatttaagaaagttagcatcggaatacaccttaccaattgtctcaataactgatttgataaggtatcggagaaagagagaaaaattggttgaaagaacctcagtttctcgcctgcctactaaatggggcctatttcaagcatattgctacagctcaaagttggatggaactgaacatgtggctgttgtaaagggagatatgggagatggacaagatgtgctagtacgagtacattcagaatgtttaactggggatatatttggatcagctcggtgtgactgtggcaaccagttagatttggcaatgcggttaatagaagaagcaggtaggggagtagttgtgtatcttcgaggtcatgagggaagaggcattggccttggtcacaaacttaaagcgtataatttgcaggatcaaggtcatgacacggtccaagcaaacatagaactcggcttagctgttgatgctcgtgaatatgggattggtgcacagattttgagggatataggagttcgaacaatgcggcttatgacaaacaacccagcaaagtttgttggtcttaaaggatatggtttggcagtggtagggcgagttcctgtgttgacaccaatcacagaggaaaacaagagatacctggaaacaaaaaggaccaaaatgggtcatatttatggctctgatttacaaggatcattacctggattcaacggttctactgtaaataacggagactcactggagaacacatagtctacacaaaaacttacag

SEQ ID NO: 58759 - protein, 392 aa, Glycine max
  peptide (1)..(392): Ceres Seq. ID no. 14308724
MAASLTSPKDIAFMIKHGSGIVSVGMKEEDLQRLNLPLMSPETEDEDSSAPTFTITVDVKSGTSTGVSAADRAKTVLALSSPESKSEDFRKPGHVFPLKYRNGGVLRRAGHTEASLDLVALAGLPPISVLSALVDENDGSMQSLLNLRKLASEYTLPIVSITDLIRYRRKREKLVERTSVSRLPTKWGLFQAYCYSSKLDGTEHVAVVKGDMGDGQDVLVRVHSECLTGDIFGSARCDCGNQLDLAMRLIEEAGRGVVVYLRGHEGRGIGLGHKLKAYNLQDQGHDTVQANIELGLAVDAREYGIGAQILRDIGVRTMRLMTNNPAKFVGLKGYGLAVVGRVPVLTPITEENKRYLETKRTKMGHIYGSDLQGSLPGFNGSTVNNGDSLENT

SEQ ID NO: 58760 - protein, 379 aa, Glycine max
  peptide (1)..(379): Ceres Seq. ID no. 14308725
MIKHGSGIVSVGMKEEDLQRLNLPLMSPETEDEDSSAPTFTITVDVKSGTSTGVSAADRAKTVLALSSPESKSEDFRKPGHVFPLKYRNGGVLRRAGHTEASLDLVALAGLPPISVLSALVDENDGSMQSLLNLRKLASEYTLPIVSITDLIRYRRKREKLVERTSVSRLPTKWGLFQAYCYSSKLDGTEHVAVVKGDMGDGQDVLVRVHSECLTGDIFGSARCDCGNQLDLAMRLIEEAGRGVVVYLRGHEGRGIGLGHKLKAYNLQDQGHDTVQANIELGLAVDAREYGIGAQILRDIGVRTMRLMTNNPAKFVGLKGYGLAVVGRVPVLTPITEENKRYLETKRTKMGHIYGSDLQGSLPGFNGSTVNNGDSLENT

SEQ ID NO: 58761 - protein, 367 aa, Glycine max
  peptide (1)..(367): Ceres Seq. ID no. 14308726
MKEEDLQRLNLPLMSPETEDEDSSAPTFTITVDVKSGTSTGVSAADRAKTVLALSSPESKSEDFRKPGHVFPLKYRNGGVLRRAGHTEASLDLVALAGLPPISVLSALVDENDGSMQSLLNLRKLASEYTLPIVSITDLIRYRRKREKLVERTSVSRLPTKWGLFQAYCYSSKLDGTEHVAVVKGDMGDGQDVLVRVHSECLTGDIFGSARCDCGNQLDLAMRLIEEAGRGVVVYLRGHEGRGIGLGHKLKAYNLQDQGHDTVQANIELGLAVDAREYGIGAQILRDIGVRTMRLMTNNPAKFVGLKGYGLAVVGRVPVLTPITEENKRYLETKRTKMGHIYGSDLQGSLPGFNGSTVNNGDSLENT

SEQ ID NO: 58762 - DNA, 1215 bp, Glycine max
  misc_feature (1)..(1215): Ceres Seq. ID no. 15169278
ggagtgcaataattctgattctaccgtcatcaactaggagaagaagcttcattttctgcaaaatggatccctctgcgccattgctatttaaccacctcaagggtgcagacccgttcttcctgctggcgggtcctaatgtgattgaatcggaggagcacattctccggatggctaagaacatcaagagtgttgcatctgaagttggaataccattggttttcaagtcaagctttgacaaagctaaccgaacatcatcaaaatcatttcgtggcccggggatggctgagggattgaagatactcgagaaggtaaaaatagcttatgacattcctatagtgacagatgtgcatgagaccatccagtgtgaagcagttggcagagttgcagatatcattcagattccagcattcttgtgtcgccaaacagatcttctagttgcagcagccaaaactgggaaaattatcaacattaagaagggccagttctgtgctccttctgtgatgacaaattcagctgaaaaggttcggttagctggaaatcctaatgtgatggtttgtgagagaggaacaatgtttggatacaatgatttgattgttgatccacgtaacttggagtggatgagagaagccaattgtcccattgtagctgatataactcactcactacaacagcctgctggaaagatgttggatgggggaggtgttgcaagtggaggtcttcgagaactaataccttgcattgcaaggacagcagttgccgttggagtggatgggatcttcatggaggtgcatgatgatccactgaatgcacctgttgatggcccaacacagtggcctttgcgccactttaaggagctacttgaagagcttgtagccattgctagggtaagcaaagggaagcaacggttcaacattgatctcacaccatttcgtgaataaaaaaaatggtgatggttttcagttattctgaatgtaatttctttaccattggtcttttaagattgttcaagggtgaatgcaaaactgtctcctctcacaagttccttataaggagagtttatcttaaaaatattatttgatgatcaatgcatgttacaatgaagtggtaacactataccaactcaagtttgtcacatatcctgtgtagccttaatcatgtcagttactaaagttgaggcaattaattgaatattaagatataggtagattaattatt

SEQ ID NO: 58763 - protein, 311 aa, Glycine max
  peptide (1)..(311): Ceres Seq. ID no. 15169279
SAIILILPSSTRRRSFIFCKMDPSAPLLFNHLKGADPFFLLAGPNVIESEEHILRMAKNIKSVASEVGIPLVFKSSFDKANRTSSKSFRGPGMAEGLKILEKVKIAYDIPIVTDVHETIQCEAVGRVADIIQIPAFLCRQTDLLVAAAKTGKIINIKKGQFCAPSVMTNSAEKVRLAGNPNVMVCERGTMFGYNDLIVDPRNLEWMREANCPIVADITHSLQQPAGKMLDGGGVASGGLRELIPCIARTAVAVGVDGIFMEVHDDPLNAPVDGPTQWPLRHFKELLEELVAIARVSKGKQRFNIDLTPFRE

SEQ ID NO: 58764 - protein, 291 aa, Glycine max
  peptide (1)..(291): Ceres Seq. ID no. 15169280
MDPSAPLLFNHLKGADPFFLLAGPNVIESEEHILRMAKNIKSVASEVGIPLVFKSSFDKANRTSSKSFRGPGMAEGLKILEKVKIAYDIPIVTDVHETIQCEAVGRVADIIQIPAFLCRQTDLLVAAAKTGKIINIKKGQFCAPSVMTNSAEKVRLAGNPNVMVCERGTMFGYNDLIVDPRNLEWMREANCPIVADITHSLQQPAGKMLDGGGVASGGLRELIPCIARTAVAVGVDGIFMEVHDDPLNAPVDGPTQWPLRHFKELLEELVAIARVSKGKQRFNIDLTPFRE

SEQ ID NO: 58765 - protein, 256 aa, Glycine max
  peptide (1)..(256): Ceres Seq. ID no. 15169281
MAKNIKSVASEVGIPLVFKSSFDKANRTSSKSFRGPGMAEGLKILEKVKIAYDIPIVTDVHETIQCEAVGRVADIIQIPAFLCRQTDLLVAAAKTGKIINIKKGQFCAPSVMTNSAEKVRLAGNPNVMVCERGTMFGYNDLIVDPRNLEWMREANCPIVADITHSLQQPAGKMLDGGGVASGGLRELIPCIARTAVAVGVDGIFMEVHDDPLNAPVDGPTQWPLRHFKELLEELVAIARVSKGKQRFNIDLTPFRE

SEQ ID NO: 58766 - DNA, 1392 bp, Glycine max
  misc_feature (1)..(1392): Ceres Seq. ID no. 14313413
acggtctctccatacaccgccaccacatagaaccactgatcgacacgtttgcgccttcattaagctgaggaatagttgtaacttagggacaatgacgtcttcagtggttgaaggtggacgcgacgaggggaaacacgaaccctcggatttcatcacggaaaccatgaatctgacgtctccaaacctttcacttcttcccagtgaaactgaaacattcttgagcgcagcaatttccctcaaggacaaggtggtggaggagacttggaaccggagagatcaagtggttgatccgacggtgtacacgggtctgttgggcaccgccttcacttgcttgcggtcgtaccaggttaccggttgccggaacgacttgatattatgcagcgatatcattgacacgtgtgtcaccgctgcacgtgcctccctcaggcacgtgacttttttgtgtggtagaggaggcgtttatgcgcttggtgctgtcgttgccaattacatggaggaccttccaaagcgtgacctgtttttgggtctattctttgaggtggcaaaagagagagccctaccagttggaccagaggaaggtggttttggaatgtcatatgatcttctgtatggacgagctggattcttatggggtgcattgtttgtgaacaagcacctaggagatgatgcagtgcccaaagacattttgatgcctattattgatgcagtgttggcgggtggtagagcaggagcatctgatgttgaagactgtccattgatgtatagatggcatggaactaggtacttgggtgcagcaaatggccttgctggtatccttcatgtgctgctacattttccacttcctagagaggatgctgaggatgtcaagggaactttgaggtacctcatgagtaagcgtttccctcacagtggaaactacccctccagtgaagggaatccgagggataagttagtgcaatggggtcatggtgcaactggcatggccatcacattgtctaaagcagcacaggtatttccaaatgacagagaactacgagatgctgcaatagaagcaggagaagttgtatggaagagtggattggtgaagaaggtgggacttgcagatggggtatctggaaatgcctatgccttcctttccctctacagactcactaaagagagcatatacgaagagagagcaaagtcattcgcttccttcatgtatgataatgcaaaatctctggcttctgccaatggctattcactttcccaaggacttgctgggacagtatgcctctggtttgatctacttgcacccgacagctctaggttcccaggttatgaactatagatggttccagtagagatggaaaatgttaggtagacaccaatcataagtgatatgatcttgac

SEQ ID NO: 58767 - protein, 442 aa, Glycine max
  peptide (1)..(442): Ceres Seq. ID no. 14313414
RSLHTPPPHRTTDRHVCAFIKLRNSCNLGTMTSSVVEGGRDEGKHEPSDFITETMNLTSPNLSLLPSETETFLSAAISLKDKVVEETWNRRDQVVDPTVYTGLLGTAFTCLRSYQVTGCRNDLILCSDIIDTCVTAARASLRHVTFLCGRGGVYALGAVVANYMEDLPKRDLFLGLFFEVAKERALPVGPEEGGFGMSYDLLYGRAGFLWGALFVNKHLGDDAVPKDILMPIIDAVLAGGRAGASDVEDCPLMYRWHGTRYLGAANGLAGILHVLLHFPLPREDAEDVKGTLRYLMSKRFPHSGNYPSSEGNPRDKLVQWGHGATGMAITLSKAAQVFPNDRELRDAAIEAGEVVWKSGLVKKVGLADGVSGNAYAFLSLYRLTKESIYEERAKSFASFMYDNAKSLASANGYSLSQGLAGTVCLWFDLLAPDSSRFPGYEL

SEQ ID NO: 58768 - protein, 412 aa, Glycine max
  peptide (1)..(412): Ceres Seq. ID no. 14313415
MTSSVVEGGRDEGKHEPSDFITETMNLTSPNLSLLPSETETFLSAAISLKDKVVEETWNRRDQVVDPTVYTGLLGTAFTCLRSYQVTGCRNDLILCSDIIDTCVTAARASLRHVTFLCGRGGVYALGAVVANYMEDLPKRDLFLGLFFEVAKERALPVGPEEGGFGMSYDLLYGRAGFLWGALFVNKHLGDDAVPKDILMPIIDAVLAGGRAGASDVEDCPLMYRWHGTRYLGAANGLAGILHVLLHFPLPREDAEDVKGTLRYLMSKRFPHSGNYPSSEGNPRDKLVQWGHGATGMAITLSKAAQVFPNDRELRDAAIEAGEVVWKSGLVKKVGLADGVSGNAYAFLSLYRLTKESIYEERAKSFASFMYDNAKSLASANGYSLSQGLAGTVCLWFDLLAPDSSRFPGYEL

SEQ ID NO: 58769 - protein, 388 aa, Glycine max
  peptide (1)..(388): Ceres Seq. ID no. 14313416
MNLTSPNLSLLPSETETFLSAAISLKDKVVEETWNRRDQVVDPTVYTGLLGTAFTCLRSYQVTGCRNDLILCSDIIDTCVTAARASLRHVTFLCGRGGVYALGAVVANYMEDLPKRDLFLGLFFEVAKERALPVGPEEGGFGMSYDLLYGRAGFLWGALFVNKHLGDDAVPKDILMPIIDAVLAGGRAGASDVEDCPLMYRWHGTRYLGAANGLAGILHVLLHFPLPREDAEDVKGTLRYLMSKRFPHSGNYPSSEGNPRDKLVQWGHGATGMAITLSKAAQVFPNDRELRDAAIEAGEVVWKSGLVKKVGLADGVSGNAYAFLSLYRLTKESIYEERAKSFASFMYDNAKSLASANGYSLSQGLAGTVCLWFDLLAPDSSRFPGYEL

SEQ ID NO: 58770 - DNA, 1716 bp, Glycine max
  misc_feature (1)..(1716): Ceres Seq. ID no. 14310588
tatatatatatatataatccaggtccaagataaagatggagagaaaagatggaagcaagttgatgtaaacttgacggaccatgtcaacatccccacattccccgaaggaaaaacagcggaatcttatgataaatattttcatgattatttatcaagcatagcaatggagcaattaccacaaagcagaccattatgggatattcacataatcaattaccttacaagtgatgcatccagcactataatatttaagcttcaccatgcacttggagatggctattctctcatgggtgcttttctttcttgtcttcaacgagccgatgacccttctcttcccttgtcctttccttctctcaaacaatctaaacaagaaccttcttccactaaaagcttttgcagaaaattttcttggatgtgttcctctgccttcaacactgtctcagattttggatggagtgtattgaagagtagcatcattagtgatgataaaacaccgataaggtttggagacgaaggagccgactatcaaccaatttccatatcaagcatgacattctccattgaccacatcagggacatcaaatcaaggctcggagtgacaataaatgatgtggtcactggaattgtcttctatggaactagattatatatgcaagatatggactccaaatcaaagaccgcacactccacagcattggtattactgaatacgagaaacgttgaaggttaccaatcgatcaatgatatgctaaatactaaagccacgggtccatgggggaacagaattaccttcttgcatgttccaataccgaaattaaatgaaacaagaactacaaaccctcttgaatttatttgggacacacataacataatcaagaggaagaaacaatctctaggagttgtactcaccgggacacttttgaagatagagggcaaattgaggggacaagaggcagtagctaaacgcattcgtggcacattgacaaaatcaagtgcagtgatttcaaacttggctggaccaatacaacaaatggctttagctaaccatcctgtgaaaggcttgtatttcacattggccggtggacctgaagtatgtattctgaatccctttcatttttcaattaatcatcaattcaacatgtgagaatctgaattgaggtgggtggggtgaaataaggcaaaaaaaaaattataatcaatttataatagcgaaaattggaatggtcattttaagaaggctttaatttctaatttattttgcttaaggaaaaaagtttttaacccaacagatctctctttgttcctttacttaactagttgcagtgatacataagaaatatttaaacatcatttgattgtatttgcagagtctagtcatttcagttatgagctatatgggagtcctaagtgttaccctcaaaacggaaaaagacttcatagacgaacataaattgaagttgtgcatgcaaagtgcatttgagataattctccaagcagctatggaaattcctcaggaaaccaaaccttagtatttggtttggatgattggaacagcttattacgaaaattagagagagagagagatatggagaatttaccatattatttctccggatttatcaacgccttaagtaattgcttgtctatagtatatttgtcgtatgtttggaaagatcaatacacgaggcccaccttattttggatctgtttaggcct

SEQ ID NO: 58771 - protein, 380 aa, Glycine max
  peptide (1)..(380): Ceres Seq. ID no. 14310589
IYIYIIQVQDKDGEKRWKQVDVNLTDHVNIPTFPEGKTAESYDKYFHDYLSSIAMEQLPQSRPLWDIHIINYLTSDASSTIIFKLHHALGDGYSLMGAFLSCLQRADDPSLPLSFPSLKQSKQEPSSTKSFCRKFSWMCSSAFNTVSDFGWSVLKSSIISDDKTPIRFGDEGADYQPISISSMTFSIDHIRDIKSRLGVTINDVVTGIVFYGTRLYMQDMDSKSKTAHSTALVLLNTRNVEGYQSINDMLNTKATGPWGNRITFLHVPIPKLNETRTTNPLEFIWDTHNIIKRKKQSLGVVLTGTLLKIEGKLRGQEAVAKRIRGTLTKSSAVISNLAGPIQQMALANHPVKGLYFTLAGGPEVCILNPFHFSINHQFNM

SEQ ID NO: 58772 - protein, 326 aa, Glycine max
  peptide (1)..(326): Ceres Seq. ID no. 14310590
MEQLPQSRPLWDIHIINYLTSDASSTIIFKLHHALGDGYSLMGAFLSCLQRADDPSLPLSFPSLKQSKQEPSSTKSFCRKFSWMCSSAFNTVSDFGWSVLKSSIISDDKTPIRFGDEGADYQPISISSMTFSIDHIRDIKSRLGVTINDVVTGIVFYGTRLYMQDMDSKSKTAHSTALVLLNTRNVEGYQSINDMLNTKATGPWGNRITFLHVPIPKLNETRTTNPLEFIWDTHNIIKRKKQSLGVVLTGTLLKIEGKLRGQEAVAKRIRGTLTKSSAVISNLAGPIQQMALANHPVKGLYFTLAGGPEVCILNPFHFSINHQFNM

SEQ ID NO: 58773 - protein, 285 aa, Glycine max
  peptide (1)..(285): Ceres Seq. ID no. 14310591
MGAFLSCLQRADDPSLPLSFPSLKQSKQEPSSTKSFCRKFSWMCSSAFNTVSDFGWSVLKSSIISDDKTPIRFGDEGADYQPISISSMTFSIDHIRDIKSRLGVTINDVVTGIVFYGTRLYMQDMDSKSKTAHSTALVLLNTRNVEGYQSINDMLNTKATGPWGNRITFLHVPIPKLNETRTTNPLEFIWDTHNIIKRKKQSLGVVLTGTLLKIEGKLRGQEAVAKRIRGTLTKSSAVISNLAGPIQQMALANHPVKGLYFTLAGGPEVCILNPFHFSINHQFNM

SEQ ID NO: 58774 - DNA, 1141 bp, Glycine max
  misc_feature (1)..(1141): Ceres Seq. ID no. 14313397
gagccatacaaaaggtctcaaaaactgcggttcctgagtagagaggtttgtttgttgtcgtttgagaggattcgatcaagcgaatcttgttttcgaagctcaaattgaattgaacagtaaattcctggaagggaacgaagcagaaaatgggagacacaaaccacgcgtccaccgtcgatgacgatttgcttctcaaaaacttcttcgccgaagttagcgaagttgaaagagacaacgaagtgcttaggattctctcttgttttaagttgaatccatttgagtatctaaacctaccatttgattcatcaattgatgatgtgaaaaagcagtaccgcaagttatcattaatggttcacccggataaatgtaagcatccacaagcaaaggaggcttttggagcattagcgaaagctcaacagttactaatggatcaaaatgaaagagattatattcttagccaagttaattcagctaaagaagaacttagagcaaagaggaagaagcagctgaagaaagatacagcttcaaaaatgaaatctttggttgaagagggaaaatatgacaaacagtatgaacaatcagaggaattccggcaggagctcaaagtcaaagttcgtgaactattaacagaacaagaatggaggagaagaaaaatgcaaatgaggatatctgaggaggaaggcagattaaaaagggatgaagaggaacagaaagaaatgtggaaaagaaagcgtgaacatgaggaggaatgggaaggaacacgagaaaagagggtatccagttggagagattttatgaagggtggaaagaagaataagaaaggagaaattcggccaccgaagctgaagacagaagatcccaacaaatcctacgttcaaaggcctgtaaaaagaggttaggggttctgccgttgagtttgaagatcacagcaatcaattgaaaccaggagttcgagagaacttatttatgcaggccatcttttgtgtatcagttagatacttttaaacagatttattactggagtcatttgaggcatgttaatggtgtagacctccgacgaatgactctatccactttgcatcccaatactgataaataggaattactggtcatccgcagcgagccattttagtgttaggtt

SEQ ID NO: 58775 - protein, 250 aa, Glycine max
  peptide (1)..(250): Ceres Seq. ID no. 14313398
MGDTNHASTVDDDLLLKNFFAEVSEVERDNEVLRILSCFKLNPFEYLNLPFDSSIDDVKKQYRKLSLMVHPDKCKHPQAKEAFGALAKAQQLLMDQNERDYILSQVNSAKEELRAKRKKQLKKDTASKMKSLVEEGKYDKQYEQSEEFRQELKVKVRELLTEQEWRRRKMQMRISEEEGRLKRDEEEQKEMWKRKREHEEEWEGTREKRVSSWRDFMKGGKKNKKGEIRPPKLKTEDPNKSYVQRPVKRG

SEQ ID NO: 58776 - protein, 183 aa, Glycine max
  peptide (1)..(183): Ceres Seq. ID no. 14313399
MVHPDKCKHPQAKEAFGALAKAQQLLMDQNERDYILSQVNSAKEELRAKRKKQLKKDTASKMKSLVEEGKYDKQYEQSEEFRQELKVKVRELLTEQEWRRRKMQMRISEEEGRLKRDEEEQKEMWKRKREHEEEWEGTREKRVSSWRDFMKGGKKNKKGEIRPPKLKTEDPNKSYVQRPVKRG

SEQ ID NO: 58777 - protein, 157 aa, Glycine max
  peptide (1)..(157): Ceres Seq. ID no. 14313400
MDQNERDYILSQVNSAKEELRAKRKKQLKKDTASKMKSLVEEGKYDKQYEQSEEFRQELKVKVRELLTEQEWRRRKMQMRISEEEGRLKRDEEEQKEMWKRKREHEEEWEGTREKRVSSWRDFMKGGKKNKKGEIRPPKLKTEDPNKSYVQRPVKRG

SEQ ID NO: 58778 - DNA, 1314 bp, Glycine max
  misc_feature (1)..(1314): Ceres Seq. ID no. 15169372
aaggcttcatttgtgtcacaactcagaaaggaaagctttgaggtttcttccgcattttagagtggtgagaggatggtgggtgttatttcgttggtaacagggatggctggtcctagtgggtttggatcagcttccactgcagaacaggttactgatggaattgatgccagcaacctcactgcaattatcacaggaggagcaagtggtataggcttggagacagcaagagtgttggctcttcgaaaggtccatgtgatcattgcagttcggaacatggtgtctgcaaaggaggctaaacaacaaatactagaggagaatgagtctgcacgagtggacgtaatgaagctcgacctttgctcagtgaattctattacatcatttgtggacaacttcatagctcttgatcttcctctcaacattttaataaacaatgctggagtaatgttctgcccattcaagctctcagaggatggcattgagatgcaatttgcaacaaaccatcttggtcatttccacttgacaaacctgcttcttgacaaaatgcaacaaactgcaaaagccactggaatagagggcaggatcataaatctgtcatcaattgcccataactacacttatagaaaggggattagatttaataagatcaatgaacgaaaaggttatggtaacaagaaggcgtatgggcagtccaagttagcaaacatattacatacaaatgagctttctcgtcgcctgcaggaagagggtgtgaatatcacagccaactcggtccatccaggagtgataatgactcctcttatgagacactcatcttaccttatgcatttcttaaaggtcttcaccttttacatatggaagaacgtcccccagggagcagccacgacatgctatgttgctctccacccaagcgtgaaaggtgtaactgggaagtactttgtggattgcaatcaatgcaaaccaagttcacacgccaaaaacaaacagcttgcaaagaaactctgggatttcagtaacgatttgatcaaatcaatttcgaaagcttgagtgcacttgcagctaggtggttttctccttagggaaattaaaagccttcgttgtggtcaccagtttatgaaaactagctcgttatgcaataaaaagcacgttacagttatagttataatttgtcgttgtctgaggatgtttccaaacattttattccccactgaaccaccaggaggtgtttcatttcttttcatccaaacatttctgtatcaaacgtttcgtttcatccataagttagttgtgtagttacaatcaaataaaattgtttgt

SEQ ID NO: 58779 - protein, 323 aa, Glycine max
  peptide (1)..(323): Ceres Seq. ID no. 15169373
MVGVISLVTGMAGPSGFGSASTAEQVTDGIDASNLTAIITGGASGIGLETARVLALRKVHVIIAVRNMVSAKEAKQQILEENESARVDVMKLDLCSVNSITSFVDNFIALDLPLNILINNAGVMFCPFKLSEDGIEMQFATNHLGHFHLTNLLLDKMQQTAKATGIEGRIINLSSIAHNYTYRKGIRFNKINERKGYGNKKAYGQSKLANILHTNELSRRLQEEGVNITANSVHPGVIMTPLMRHSSYLMHFLKVFTFYIWKNVPQGAATTCYVALHPSVKGVTGKYFVDCNQCKPSSHAKNKQLAKKLWDFSNDLIKSISKA

SEQ ID NO: 58780 - protein, 313 aa, Glycine max
  peptide (1)..(313): Ceres Seq. ID no. 15169374
MAGPSGFGSASTAEQVTDGIDASNLTAIITGGASGIGLETARVLALRKVHVIIAVRNMVSAKEAKQQILEENESARVDVMKLDLCSVNSITSFVDNFIALDLPLNILINNAGVMFCPFKLSEDGIEMQFATNHLGHFHLTNLLLDKMQQTAKATGIEGRIINLSSIAHNYTYRKGIRFNKINERKGYGNKKAYGQSKLANILHTNELSRRLQEEGVNITANSVHPGVIMTPLMRHSSYLMHFLKVFTFYIWKNVPQGAATTCYVALHPSVKGVTGKYFVDCNQCKPSSHAKNKQLAKKLWDFSNDLIKSISKA

SEQ ID NO: 58781 - protein, 256 aa, Glycine max
  peptide (1)..(256): Ceres Seq. ID no. 15169375
MVSAKEAKQQILEENESARVDVMKLDLCSVNSITSFVDNFIALDLPLNILINNAGVMFCPFKLSEDGIEMQFATNHLGHFHLTNLLLDKMQQTAKATGIEGRIINLSSIAHNYTYRKGIRFNKINERKGYGNKKAYGQSKLANILHTNELSRRLQEEGVNITANSVHPGVIMTPLMRHSSYLMHFLKVFTFYIWKNVPQGAATTCYVALHPSVKGVTGKYFVDCNQCKPSSHAKNKQLAKKLWDFSNDLIKSISKA

SEQ ID NO: 58782 - DNA, 1108 bp, Glycine max
  misc_feature (1)..(1108): Ceres Seq. ID no. 14308575
tttgtgttttcaaccgaaaacttggccttcatttttatttgatttgttacacataagctaagcaagtgccaattcactcgtccatctgtagatttttcttcacatgaacacttttgtttttatacttgctttacataagaatatttggccatataacttcccttttaaccctccctttcaggtcttcttcgttgtggtaagagctgccggttaagatggacaaactacctcagaccagatattaaacgtggttcctttacacttgaggatgaaaaactaatcatacagcttcatggtatccttggaaataggtgggctgctatagcctctcagctaccaggaagaacagacaatgagataaaaaacttatggaacacccacttgaagaaacgtctcatttgcatgggccttgacccacaaacccaccaaccactagcctctccacataaccctaatgacaaggctcatgcatcatcatccacttcaacccgccacatggcccagtgggagagtgcaaggcttgaagcagaggcaaggctctcaagggaaccacacttatactacaacaacaacaaaactgactctgactacttcctacgaatttggaactctgatcttggagaatcttttcgtgatgtccacaaattagaatcttcaatcaaatgtgagtcacagtctgccacaacggatttggcttccttaaccccagcaagcattgtgaaagaggagtttctgtggggtgttaagaaaattgtctcggattcatcatcaagctctagtgaactacaccatgactcttgtgacacttctttgcagctcttgttagactttcctatgaacaatgacatgagcttcttagaattatgagacaccaacagccccttccttacccttaattagtgcatgtatgatgttgttgatatgctgacatgtagctttttgttggctattttgtagacttatagcatgttaggataattaactatcataattgattttggaaggaaattatgctgaaaattgaaaaaagtgaaagcaactatttgttgcttggactttcaatgagaatttggaattgattcggggaaaaaaaaaaaaaaaaaaaaag

SEQ ID NO: 58783 - protein, 154 aa, Glycine max
  peptide (1)..(154): Ceres Seq. ID no. 14308576
MGLDPQTHQPLASPHNPNDKAHASSSTSTRHMAQWESARLEAEARLSREPHLYYNNNKTDSDYFLRIWNSDLGESFRDVHKLESSIKCESQSATTDLASLTPASIVKEEFLWGVKKIVSDSSSSSSELHHDSCDTSLQLLLDFPMNNDMSFLEL

SEQ ID NO: 58784 - protein, 123 aa, Glycine max
  peptide (1)..(123): Ceres Seq. ID no. 14308577
MAQWESARLEAEARLSREPHLYYNNNKTDSDYFLRIWNSDLGESFRDVHKLESSIKCESQSATTDLASLTPASIVKEEFLWGVKKIVSDSSSSSSELHHDSCDTSLQLLLDFPMNNDMSFLEL

SEQ ID NO: 58785 - DNA, 613 bp, Glycine max
  misc_feature (1)..(613): Ceres Seq. ID no. 15169443
gacgttcattcggcttgcttgattgttccaggtattcgcagtcgaccgtgtcctcggagcacgatgaaggttgttgctgcctacctgcttgctgtcctcgctgggaatgccagcccctccgctgaggatttgactggcattctggagtcagttggctgtgaagttgacaatgaaaggatggaactgctgctgtcccaactgagcggtaaggacatcaccgagctcattgccgcgggcagagagaagtttgcttcagtcccatgtggcggcggcggtgtggctgttgcggcaggtgcacctgctgctggcggagctgctcctgcagctgaggcaaagaaagaagagaaggtggaagagaaggaagaaagcgatgatgatatgggcttcagcctcttcgactaggttgcacagtcatcacagtattgtttcgggcagtgaaatcaaagggaaaccagagtcatgtttagattttaaccttattttatgttggaaagtactgcaaagactgctaattgtctctgtatttggtaattcagctgtagattgctatgatggttgggatttactcgtgaaccagagtttttctatcttatatcctgaattggttatcccg

SEQ ID NO: 58786 - protein, 133 aa, Glycine max
  peptide (1)..(133): Ceres Seq. ID no. 15169444
DVHSACLIVPGIRSRPCPRSTMKVVAAYLLAVLAGNASPSAEDLTGILESVGCEVDNERMELLLSQLSGKDITELIAAGREKFASVPCGGGGVAVAAGAPAAGGAAPAAEAKKEEKVEEKEESDDDMGFSLFD

SEQ ID NO: 58787 - protein, 112 aa, Glycine max
  peptide (1)..(112): Ceres Seq. ID no. 15169445
MKVVAAYLLAVLAGNASPSAEDLTGILESVGCEVDNERMELLLSQLSGKDITELIAAGREKFASVPCGGGGVAVAAGAPAAGGAAPAAEAKKEEKVEEKEESDDDMGFSLFD

SEQ ID NO: 58788 - protein, 81 aa, Glycine max
  peptide (1)..(81): Ceres Seq. ID no. 15169446
MMIWASASSTRLHSHHSIVSGSEIKGKPESCLDFNLILCWKVLQRLLIVSVFGNSAVDCYDGWDLLVNQSFSILYPELVIP

SEQ ID NO: 58789 - DNA, 1565 bp, Glycine max
  misc_feature (1)..(1565): Ceres Seq. ID no. 15176349
atagcagcaccgcaccgcaccgcaccaggtcttctttttttctttcatggcggaggaaattacttctcaattaaaaaaaaatttgctggatgaagaaaatggaacatcaagtcatgttgtagaaggggctgctgatgctgatgctgatgctgagctttctccaccatcacaaaaaggagatgacgctaaagaagtttcaaagaagaaaaagaagaaatctaaaagcaagaaaaagaaagaactcttacaacagactgatccaccatcaatttctgttattaaccttttcccatctggagattttcctgaaggtgaaattcagcagtacaaagacgataacctatggagaactacttcagaggagaagagagaactggagcgcctgcagaaaccattatataattcagttcgtcgagcggcagaagttcatcgtcaggttcgcaaatatattaaaggcattttaaagcccggaatgttgatgactgacatatgtgaaacattggagaacactgttcgtaagctaatatcagaggatggccttcaagcaggcattgcattccccacaggatgctctttaaattgggttgctgctcactggaccccaaattcaggggataagactatactttagtatgatgatgtgatgaaattggattttggtacccatgttgatggatatatagttgactgtgcttttaccgtggcattcaaccccatgtttgatccactgcttgaagcctctcgtgaagcaaccaatacgggtattaaggaagctggaatcgatgtgcgcctttgtgacattggtgccgcaattcaagaggtcatggaatcttatgaagttgagattaatgggaaggtgtatcaagttaagagtatacggaatttgaatggacatagcattggtcgctaccaaatccatgctggaaaatctgttcccattgtgaagggtggggagcagacaaagatggaagagggtgaattttttgctattgaaacctttgcatcaacggggaaaggatatgtacgagaagacctggaatgcagccactacatgaaaaattttgatgttggtcatatcccactgagattgcctagagcgaagcaactgttagcaactattaacaagaacttctctactttggccttttgtaggcggtatttagatcgcctaggggagactaaatacttaatggcattaaagaacttgtgtgactctggcattgttcagccttatcctcctctatgtgatgtgaaaggaagctatgtatcacaattcgagcatacaatcttactccgaccaacatgcaaagaagttatatcaaagggtgacgattactaatgtggatttgaagtttttttgctttgttttatatatatatatatatatatatatatatatatatatatatatatatatatttaatactcactgtaccattatctttgtgaactgttttcattataccatcaacacttcggttttatatatgtgcctatggaggacgccattactagtttaataattggatatttccccaatagataaacatcgtattagaaggtcc

SEQ ID NO: 58790 - protein, 231 aa, Glycine max
  peptide (1)..(231): Ceres Seq. ID no. 15176350
MKLDFGTHVDGYIVDCAFTVAFNPMFDPLLEASREATNTGIKEAGIDVRLCDIGAAIQEVMESYEVEINGKVYQVKSIRNLNGHSIGRYQIHAGKSVPIVKGGEQTKMEEGEFFAIETFASTGKGYVREDLECSHYMKNFDVGHIPLRLPRAKQLLATINKNFSTLAFCRRYLDRLGETKYLMALKNLCDSGIVQPYPPLCDVKGSYVSQFEHTILLRPTCKEVISKGDDY

SEQ ID NO: 58791 - protein, 207 aa, Glycine max
  peptide (1)..(207): Ceres Seq. ID no. 15176351
MFDPLLEASREATNTGIKEAGIDVRLCDIGAAIQEVMESYEVEINGKVYQVKSIRNLNGHSIGRYQIHAGKSVPIVKGGEQTKMEEGEFFAIETFASTGKGYVREDLECSHYMKNFDVGHIPLRLPRAKQLLATINKNFSTLAFCRRYLDRLGETKYLMALKNLCDSGIVQPYPPLCDVKGSYVSQFEHTILLRPTCKEVISKGDDY

SEQ ID NO: 58792 - protein, 194 aa, Glycine max
  peptide (1)..(194): Ceres Seq. ID no. 15176352
MAEEITSQLKKNLLDEENGTSSHVVEGAADADADAELSPPSQKGDDAKEVSKKKKKKSKSKKKKELLQQTDPPSISVINLFPSGDFPEGEIQQYKDDNLWRTTSEEKRELERLQKPLYNSVRRAAEVHRQVRKYIKGILKPGMLMTDICETLENTVRKLISEDGLQAGIAFPTGCSLNWVAAHWTPNSGDKTIL

SEQ ID NO: 58793 - DNA, 499 bp, Glycine max
  misc_feature (1)..(499): Ceres Seq. ID no. 14308880
ttacctcggaggagactgccaaggtcaaggctgccggcaaggcgtggtacaagaccatgatctcggacagtgactacaccgagtttgagaacttcaccaagtggctcggagtgacgcagtgaagcggcctttgagacctagttaagttttgattagttgtgtcgctgaacttgtattgagacgaaatagtattttatcaatctgtcttatcctgcatcttcacaacaagttacctatctgtggactttaagcctgcatgttcgttttatttctccattgccgtgggagcatagtatttgcatgttcgaaccaattatctggattatggtatggatttgtgcacataatgtctgttcatgatgcttgtggtctagtgccgtttggccttgtagtagtactacttccgtatccgtctcagagataattgatgttttagaaagtaagtgatgttttaggtttgttgaacaatcgactaaatttataagatttttttttgacc

SEQ ID NO: 58794 - protein, 55 aa, Glycine max
  peptide (1)..(55): Ceres Seq. ID no. 14308881
MFVLFLHCRGSIVFACSNQLSGLWYGFVHIMSVHDACGLVPFGLVVVLLPYPSQR

SEQ ID NO: 58795 - protein, 39 aa, Glycine max
  peptide (1)..(39): Ceres Seq. ID no. 14308882
TSEETAKVKAAGKAWYKTMISDSDYTEFENFTKWLGVTQ

SEQ ID NO: 58796 - DNA, 1372 bp, Glycine max
  misc_feature (1)..(1372): Ceres Seq. ID no. 15176230
agagtgctacttgaaaaattgttctcaccgtgtgtgtgttgtgtgtgtgtgtgagagagagagagagagagagagagaaagagagagagagagaggttaggctatggctgatgagagcgtcgttgagtccccagtgaagaggcagagagatgatgatgaagaaaatgaggtctctgtttccatggatgtggagggtggcaaagaccctcttagtaacggtttatcatctgtgattcctgggtggttctctgaaattagttcaatgtggcctggagaggctcactccttgaaggtggaaaagattttgtttcaaggaaagtctgaataccagaatgtcatggtcttccagtcatcaacatatggcaaggttcttgttttagatggagtaattcagctaacagaaagggatgaatgtgcctaccaagaaatgatcactcatcttcctctttgctctattccaaaccccaaaaaggttttggttatcggtggaggtgatggaggggtcatacgagaagtagcacaccattcttcagttgaaaagatagacatttgtgaaattgacaagatggttgttgatgtctccaaacaatacttccctgatgtagctgttgggtatgatgatcctcgtgtgacacttcatattggtgatggagttgcatttctgaaggaagttcctgaaggaacttatgatgctgttatagtggattcatccgatcctattggtcctgctcaagagctttttgaaaagcccttcttttcgtcagttgcaaaggctcttcgtccaggtggagttgtgtgcactcaggcagaaagcatatggcttcatatggatataattgaggacattgtggctaattgtcgccagatttttaaaggctctgtcaactatgcttggactactgttcctacatacccaagtgggatgattggttttatgctttgctcaactgagggaccacctgttgatttcaagcatccagtgaatcccatagatgaaaatgagagtcagaagtcagtaagaccgctgaaattttacaactctgagattcataccgcagctttctgcttgccgtcgtttgcgaagaggaagattggttctaaagcaaattaagaagattttctaaacctttgaaggagctcatgtggctgttgtagaagtccaacattcatcctttctgtattggtccatctatcaatgagctatggaataagtcagattaaatttggcattgaatattaacgtttatttctggaaatgagttttaggtgataaaggtataattgatggattcagttgtcagtgactttcctcataaacacatttaaaaatgtggaactatgaatatctgtttaggaaaattttgtttaatgc

SEQ ID NO: 58797 - protein, 335 aa, Glycine max
  peptide (1)..(335): Ceres Seq. ID no. 15176231
MADESVVESPVKRQRDDDEENEVSVSMDVEGGKDPLSNGLSSVIPGWFSEISSMWPGEAHSLKVEKILFQGKSEYQNVMVFQSSTYGKVLVLDGVIQLTERDECAYQEMITHLPLCSIPNPKKVLVIGGGDGGVIREVAHHSSVEKIDICEIDKMVVDVSKQYFPDVAVGYDDPRVTLHIGDGVAFLKEVPEGTYDAVIVDSSDPIGPAQELFEKPFFSSVAKALRPGGVVCTQAESIWLHMDIIEDIVANCRQIFKGSVNYAWTTVPTYPSGMIGFMLCSTEGPPVDFKHPVNPIDENESQKSVRPLKFYNSEIHTAAFCLPSFAKRKIGSKAN

SEQ ID NO: 58798 - protein, 309 aa, Glycine max
  peptide (1)..(309): Ceres Seq. ID no. 15176232
MDVEGGKDPLSNGLSSVIPGWFSEISSMWPGEAHSLKVEKILFQGKSEYQNVMVFQSSTYGKVLVLDGVIQLTERDECAYQEMITHLPLCSIPNPKKVLVIGGGDGGVIREVAHHSSVEKIDICEIDKMVVDVSKQYFPDVAVGYDDPRVTLHIGDGVAFLKEVPEGTYDAVIVDSSDPIGPAQELFEKPFFSSVAKALRPGGVVCTQAESIWLHMDIIEDIVANCRQIFKGSVNYAWTTVPTYPSGMIGFMLCSTEGPPVDFKHPVNPIDENESQKSVRPLKFYNSEIHTAAFCLPSFAKRKIGSKAN

SEQ ID NO: 58799 - protein, 282 aa, Glycine max
  peptide (1)..(282): Ceres Seq. ID no. 15176233
MWPGEAHSLKVEKILFQGKSEYQNVMVFQSSTYGKVLVLDGVIQLTERDECAYQEMITHLPLCSIPNPKKVLVIGGGDGGVIREVAHHSSVEKIDICEIDKMVVDVSKQYFPDVAVGYDDPRVTLHIGDGVAFLKEVPEGTYDAVIVDSSDPIGPAQELFEKPFFSSVAKALRPGGVVCTQAESIWLHMDIIEDIVANCRQIFKGSVNYAWTTVPTYPSGMIGFMLCSTEGPPVDFKHPVNPIDENESQKSVRPLKFYNSEIHTAAFCLPSFAKRKIGSKAN

SEQ ID NO: 58800 - DNA, 1486 bp, Glycine max
  misc_feature (1)..(1486): Ceres Seq. ID no. 14308209
acacaagattgagacacgaaacagaaaatgccaggactcacagcaccttccgattactcccaagaacccccccgccactcttctcttctcatcaacgccaaggaacctttcaatgcggagccaccgcgtgctgcgttggttgcttcctacgtcaccccttccgatttcttctataagaggaaccacggtccaatccccatcgttgagaacatcaacagatattccgtgaacgtgtccggcttggtggagcgtcccaaacagctcttcatgaaagatatatggatgcttccaaagtataatgtcactgccacgttgcagtgtgcaggtaatcgaaggactgctatgagcaagaccaaaacagtgaagggagttggctgggatgtttctgctattggaaatgctatttggggtggagccaaattgtctgatgttcttgaactcattggaattccaaagttgactagtgtcactgaatttggtggaagacatgtggaattcgtaagcattgataagtgcaaggaggaaaatggaggcccatacaaggcttcaataccactcagtcaggccacaaatcctgaagcagatgttctactagcttatgaaatgaatggtgaacctcttaacagggatcatgggtatccattacgtgtggttgttcctggtgtcattggagcccggtctgttaaatggctggaagatatcaatatcattgaagaagaatgtcagggtttcttcatgcaaaaggactacaaaatgtttccaccatcagtgaattgggataatattgattggtctacccggagaccccaaatggatttcccagttcagtgtgttatatgttctcttgaagacgtgagcacaataaagcctgggaaggtaaaaattagtggatatgcagcatcaggaggtggcagaggcattgagagagtagatgtgtctgttgatggaggcaaaacatggatggaagcctcaagaattcagaaaagtggggttccttatatatcagaacatgccagcagtgacaaatgggcatgggtgctgtttgaagtcacagctgatatccttcacagcactgagataattgcaaaagcggtagattctgctgcaaatgtccaacctgaaaaggttgaagacatttggaaccttagaggtattttaaacacttcatggcatcgagtgaaagttcaagcgagttactcaaacctgtaaaagtagcaccaacttcccaatcgagcctttatgactctctcccccaacaatgcttggtggattttgaagcttctctgtttgaactatgaacactgaaaacacctgaacaggcatcgcaatcagttgtaaaaaagtctttatacaaataagctataggcaagggattataagaaaaatccttgggtttctcagagtttttcatggaatatctgttcttcgtttcttcgaggaaataatttgagatcgtaaacatgattcgtctggcactttgaatttc

SEQ ID NO: 58801 - protein, 393 aa, Glycine max
  peptide (1)..(393): Ceres Seq. ID no. 14308210
MPGLTAPSDYSQEPPRHSSLLINAKEPFNAEPPRAALVASYVTPSDFFYKRNHGPIPIVENINRYSVNVSGLVERPKQLFMKDIWMLPKYNVTATLQCAGNRRTAMSKTKTVKGVGWDVSAIGNAIWGGAKLSDVLELIGIPKLTSVTEFGGRHVEFVSIDKCKEENGGPYKASIPLSQATNPEADVLLAYEMNGEPLNRDHGYPLRVVVPGVIGARSVKWLEDINIIEEECQGFFMQKDYKMFPPSVNWDNIDWSTRRPQMDFPVQCVICSLEDVSTIKPGKVKISGYAASGGGRGIERVDVSVDGGKTWMEASRIQKSGVPYISEHASSDKWAWVLFEVTADILHSTEIIAKAVDSAANVQPEKVEDIWNLRGILNTSWHRVKVQASYSNL

SEQ ID NO: 58802 - protein, 313 aa, Glycine max
  peptide (1)..(313): Ceres Seq. ID no. 14308211
MKDIWMLPKYNVTATLQCAGNRRTAMSKTKTVKGVGWDVSAIGNAIWGGAKLSDVLELIGIPKLTSVTEFGGRHVEFVSIDKCKEENGGPYKASIPLSQATNPEADVLLAYEMNGEPLNRDHGYPLRVVVPGVIGARSVKWLEDINIIEEECQGFFMQKDYKMFPPSVNWDNIDWSTRRPQMDFPVQCVICSLEDVSTIKPGKVKISGYAASGGGRGIERVDVSVDGGKTWMEASRIQKSGVPYISEHASSDKWAWVLFEVTADILHSTEIIAKAVDSAANVQPEKVEDIWNLRGILNTSWHRVKVQASYSNL

SEQ ID NO: 58803 - protein, 308 aa, Glycine max
  peptide (1)..(308): Ceres Seq. ID no. 14308212
MLPKYNVTATLQCAGNRRTAMSKTKTVKGVGWDVSAIGNAIWGGAKLSDVLELIGIPKLTSVTEFGGRHVEFVSIDKCKEENGGPYKASIPLSQATNPEADVLLAYEMNGEPLNRDHGYPLRVVVPGVIGARSVKWLEDINIIEEECQGFFMQKDYKMFPPSVNWDNIDWSTRRPQMDFPVQCVICSLEDVSTIKPGKVKISGYAASGGGRGIERVDVSVDGGKTWMEASRIQKSGVPYISEHASSDKWAWVLFEVTADILHSTEIIAKAVDSAANVQPEKVEDIWNLRGILNTSWHRVKVQASYSNL

SEQ ID NO: 58804 - DNA, 1353 bp, Glycine max
  misc_feature (1)..(1353): Ceres Seq. ID no. 15176887
gttgtgaatcttgtgatcatcgaaagtcactgtagtctattttgtctacaaaatatctggactgacggagtagaaacaactgcaccacaaggggattggggataatttcaagtcagtcttcttctctatcttccgttttttctgagaaagtaacaaatgtgagtcgctaagcgtatcaaactcgtgaacacagttagttaattagttttctcattctcattcaaagtacgtctagtgtttgcaaaaatggaagaagaaagtgcgttgaggccgatggacgctgagcaactgagagagcaggctcataagatggtcgacttcattgccgattactacaaaaccatcgaagacttccccgttctaagccaagttcagccaggttatcttgggaagcttttaccagattctgcacctgattctcctgagtcattgcaaaatgttttggatgatgtgcaggaaaaaatactgccaggggtgacgcactggcaaagcccaaattattttgcgtattttccttccaacagtagcattgctgggtttctaggagagatgctcagtgcgggtcttaacatcgtgggtttcagctggataacttctcctgctgcaattgaacttgagacgattgttctggattggcttgcaaaggctttccagctgcctgattatttctattctagtgggaaaggtggtggagttatacagggaactgcaagtgaagctgtactagttgtcttattagctgcccgtgacaagatcttaaggagggttggaaggaatgcccttcctaagcttgtgatgtatgcatctgatcaaacacactctgctttactaaaagcttgccagatagcaggaattaatccagagctatgcaggttgcttaaaactgattcttccacaaattatgcactttctcctgatgtgctttctgaagcaatttcaaatgacattgctggcggtcttgtaccctttttcttatgtgctactgtaagaattgaaggcttatatgaatttgtgaatttgtaacaaattgctatataatgcgttaacttaactgcccattgtctatgtgtgtgtgtcttatgtccaatattttatcatacatgtttactgaatttttaaattagaaattgctcaactcatctgagtatcagataaagggataacatatccttcttcatgttgttcagagctctgtctcttcattatttgttgctggggaacagattgttttatacctgttaatatggtatatgtttggactaataaaggggagagagcaagggactgagatccctgtctgatcctaaaagaaataactgtctgatagacagttaactgttatgtaacacatgg

SEQ ID NO: 58805 - protein, 258 aa, Glycine max
  peptide (1)..(258): Ceres Seq. ID no. 15176888
MEEESALRPMDAEQLREQAHKMVDFIADYYKTIEDFPVLSQVQPGYLGKLLPDSAPDSPESLQNVLDDVQEKILPGVTHWQSPNYFAYFPSNSSIAGFLGEMLSAGLNIVGFSWITSPAAIELETIVLDWLAKAFQLPDYFYSSGKGGGVIQGTASEAVLVVLLAARDKILRRVGRNALPKLVMYASDQTHSALLKACQIAGINPELCRLLKTDSSTNYALSPDVLSEAISNDIAGGLVPFFLCATVRIEGLYEFVNL

SEQ ID NO: 58806 - protein, 249 aa, Glycine max
  peptide (1)..(249): Ceres Seq. ID no. 15176889
MDAEQLREQAHKMVDFIADYYKTIEDFPVLSQVQPGYLGKLLPDSAPDSPESLQNVLDDVQEKILPGVTHWQSPNYFAYFPSNSSIAGFLGEMLSAGLNIVGFSWITSPAAIELETIVLDWLAKAFQLPDYFYSSGKGGGVIQGTASEAVLVVLLAARDKILRRVGRNALPKLVMYASDQTHSALLKACQIAGINPELCRLLKTDSSTNYALSPDVLSEAISNDIAGGLVPFFLCATVRIEGLYEFVNL

SEQ ID NO: 58807 - protein, 237 aa, Glycine max
  peptide (1)..(237): Ceres Seq. ID no. 15176890
MVDFIADYYKTIEDFPVLSQVQPGYLGKLLPDSAPDSPESLQNVLDDVQEKILPGVTHWQSPNYFAYFPSNSSIAGFLGEMLSAGLNIVGFSWITSPAAIELETIVLDWLAKAFQLPDYFYSSGKGGGVIQGTASEAVLVVLLAARDKILRRVGRNALPKLVMYASDQTHSALLKACQIAGINPELCRLLKTDSSTNYALSPDVLSEAISNDIAGGLVPFFLCATVRIEGLYEFVNL

SEQ ID NO: 58808 - DNA, 1185 bp, Glycine max
  misc_feature (1)..(1185): Ceres Seq. ID no. 15224330
actacctacctacccttttgcagccacttaaacaaagtcattgacaaaagcacacaaagtctcttcccctcataaagcactgattttcacgcagaactcagctttagttcgtgcttcattaacatgggtgctggtgactactacaaaatactgaaggtgaagcatgatgccactgatgaagaagtgaagaaggcttataagaaattggcaatgaaatggcacccagataagaaccttgaagaccctcttaggaaagaagagtttgaggccaagtttaaacaagtttctgaggcctatgatgtgcttagtgacccaaagaagcgccagatctatgacttgtacggtcactatccccttaactctcaacgcttcaccaaggaatatggctatgggaacatgaaggatgcaggggtggttgaaagcagcttgctttgtacccttgaagagctttacaacggttgcaaaaagaagttgaaggtctcaaggattgttcctgatgaattcggagagttaaggtctgtagaagaaatcttgaagatagacataaagcctggttggaagaagggcacaaaaataacttttcctgggaaaggcaaccaagaaccaggatttgctccatctgatctaatttttgagttggatgagaagcctcatgctattttcaagagggatggaaatgatcttgtagtgatgcataagatattacttgtggatgctctcacaggaaagactctcaacttgactactttggatggaagagatctcacaatcaaagtggctgatattgtgaaacctggctatgagctggtggtcccaaatgaaggcatgcccatctcaaaggaacctggcaagaaaggaaacctcagaatcatgtttgatgttatgtttccatcaaggctgaccacacaacagaagtatgatctgaaaaggattctcagtgatgttgattactaagccaattaatggctgtaactatccattaacatcctctttcacatgaagatcagtttacactgtaaataacttaaaagtaattccacttatctataagaagtttgtgcatattacaaattatacctagcatagttgctactgctaccatatatgaagcatgatgtagctttgtaaacaagtctatatcaatatttttacagttttagtaattttactctgctgttttagatt

SEQ ID NO: 58809 - protein, 276 aa, Glycine max
  peptide (1)..(276): Ceres Seq. ID no. 15224331
MGAGDYYKILKVKHDATDEEVKKAYKKLAMKWHPDKNLEDPLRKEEFEAKFKQVSEAYDVLSDPKKRQIYDLYGHYPLNSQRFTKEYGYGNMKDAGVVESSLLCTLEELYNGCKKKLKVSRIVPDEFGELRSVEEILKIDIKPGWKKGTKITFPGKGNQEPGFAPSDLIFELDEKPHAIFKRDGNDLVVMHKILLVDALTGKTLNLTTLDGRDLTIKVADIVKPGYELVVPNEGMPISKEPGKKGNLRIMFDVMFPSRLTTQQKYDLKRILSDVDY

SEQ ID NO: 58810 - protein, 247 aa, Glycine max
  peptide (1)..(247): Ceres Seq. ID no. 15224332
MKWHPDKNLEDPLRKEEFEAKFKQVSEAYDVLSDPKKRQIYDLYGHYPLNSQRFTKEYGYGNMKDAGVVESSLLCTLEELYNGCKKKLKVSRIVPDEFGELRSVEEILKIDIKPGWKKGTKITFPGKGNQEPGFAPSDLIFELDEKPHAIFKRDGNDLVVMHKILLVDALTGKTLNLTTLDGRDLTIKVADIVKPGYELVVPNEGMPISKEPGKKGNLRIMFDVMFPSRLTTQQKYDLKRILSDVDY

SEQ ID NO: 58811 - protein, 185 aa, Glycine max
  peptide (1)..(185): Ceres Seq. ID no. 15224333
MKDAGVVESSLLCTLEELYNGCKKKLKVSRIVPDEFGELRSVEEILKIDIKPGWKKGTKITFPGKGNQEPGFAPSDLIFELDEKPHAIFKRDGNDLVVMHKILLVDALTGKTLNLTTLDGRDLTIKVADIVKPGYELVVPNEGMPISKEPGKKGNLRIMFDVMFPSRLTTQQKYDLKRILSDVDY

SEQ ID NO: 58812 - DNA, 1191 bp, Glycine max
  misc_feature (1)..(1191): Ceres Seq. ID no. 14306381
aatacgaaattctttgaaaaagaattgtaaccgttattagcaaaaagaagatgatactttttcaaatatctatttcaagctatagtttagattcttattccatcattaatttccacttatgccttgtagatttatcctattttgcttatcaaggcttcaagcctatttacttggtattttatttttatgttctgttttatatccctatctactcacttgtgatattttctttgacttccatacaccagatcaaattttcttggtacaaagttcattatatacgatacacagcctccatactcttctgcccatatatgccctcctgggactgggaagacgagccgcagattttattccaaaaaggtctcgcctaaggtcccatctgggagttacaacatagctcaggtaacatatgaattaaatgtgcttgggactcgaggaccaagaaagatgcactgcgttatgcattcaataccagcttcagcactagatgcaggtggcactgttcctggccagccagagcttcttccccgttccctggaggactcgtttcggagcatctcgttttcaaagtctctagatcattctattgagttcagcagttcgcgattttctgagattggggaatcctgcatcgaagatgatgatggcaagatgagacccttggttctgaaaaacaagcttccaagatggcatgaacagttacaatgttggtgccttaatttccgtggacgagtaacagttgcgtctgttaaaaactttcagttgattgctgccacccaaccagctgctggtgcacctacaccatctcaaccagctccaccggagcacgataagatcattcttcagtttggcaaagttgggaaggacatgttcaccatggattatcggtaccctttatctgcattccaagcttttgcaatatgcttgagcagctttgacaccaaattggcttgtgaataagataaatcatgaatcagaagggttataagtgagctaatgaaacaatgatgttgatggtatatttccctttgtttttcttttcttttcctattttcattatcagtatcatgggagtaggcaattgttgttactcagcttttgtatgactaaattgtaaccgtagtgcatctctgatgtaataggattttagagcatttttaacatacaatgttgctatgtttctttctc

SEQ ID NO: 58813 - protein, 170 aa, Glycine max
  peptide (1)..(170): Ceres Seq. ID no. 14306382
MHCVMHSIPASALDAGGTVPGQPELLPRSLEDSFRSISFSKSLDHSIEFSSSRFSEIGESCIEDDDGKMRPLVLKNKLPRWHEQLQCWCLNFRGRVTVASVKNFQLIAATQPAAGAPTPSQPAPPEHDKIILQFGKVGKDMFTMDYRYPLSAFQAFAICLSSFDTKLACE

SEQ ID NO: 58814 - protein, 166 aa, Glycine max
  peptide (1)..(166): Ceres Seq. ID no. 14306383
MHSIPASALDAGGTVPGQPELLPRSLEDSFRSISFSKSLDHSIEFSSSRFSEIGESCIEDDDGKMRPLVLKNKLPRWHEQLQCWCLNFRGRVTVASVKNFQLIAATQPAAGAPTPSQPAPPEHDKIILQFGKVGKDMFTMDYRYPLSAFQAFAICLSSFDTKLACE

SEQ ID NO: 58815 - protein, 107 aa, Glycine max
  peptide (1)..(107): Ceres Seq. ID no. 14306384
MILFQISISSYSLDSYSIINFHLCLVDLSYFAYQGFKPIYLVFYFYVLFYIPIYSLVIFSLTSIHQIKFSWYKVHYIRYTASILFCPYMPSWDWEDEPQILFQKGLA

SEQ ID NO: 58816 - DNA, 1319 bp, Glycine max
  misc_feature (1)..(1319): Ceres Seq. ID no. 13523550
ttttattatgcatggtcactgatactaacatccaacacttggtgccctaggttcttatttgccaaatgcttcatggcacaataggaaaatccaaaaagaatataattttttgaggtttcggtggccaagtttgaaccaccattacaaaagcattgaaggagggtgtacatgtaaaaaatgtaatataaaatttgttgtgaaagcgacctctgaaaaatcttttgagtctgaacctcaagcttttgatccaaaaagcattttggactctgtcaagaattccttggatgctttctacaggttttccagacctcacacagttattggcacagcattaagcataatttctgtgtccctccttgctgttgagaaaatatcagatatatctccattattttttactggtgtgttggaggctgtggttgctgccctgtttatgaatatttatattgttggtttgaatcaattgtctgatgttgaaatagacaagataaacaagccgtatcttccattagcatctggggaatattcctttgaaactggtgtcactattgttgcatctttttcaattctgagtttttggcttggctgggttgtaggttcatggccattattttgggccctttttgtaagctttgtgctaggaactgcttattcaatcaatgtgcctctgttgagatggaagaggtttgcagtgcttgcagcgatgtgcattctagctgttcgggcagtaatagttcaacttgcatttttccttcacatccagactcatgtatacaagaggccacctgtcttttcaagatcattgatttttgctactgcattcatgagcttcttctctgtagttatagcactgtttaaggatatacctgacattgaaggagataaagtatttggcatccaatctttttcagtgcgtttaggtcagaagccggtattctggacttgtgttatccttcttgaaatagcttatggagtcgccctcctggtgggagctgcatctccttgtctttggagcaaaattgtcacgggtctgggacacgctgttctggcttcaattctctggtttcatgccaaatctgtagatttgaawgyttaagcwaaagcttcgataacatccttctatatgtttatttggaagctattttatgcagaatacttactcattccttttgttagatgaggatgcagcggcaatattgacttgagaattagttttgtttaaatggtgctgcctttgtcacaggccggcttggagtcgctacattagttttaagtttttaattgctaatttaaawgaagawatatttcttttkggatgg

SEQ ID NO: 58817 - protein, 220 aa, Glycine max
  peptide (1)..(220): Ceres Seq. ID no. 15222846
  misc_feature (219)..(219): Xaa is any aa, unknown or other
  misc_feature (220)..(220): Xaa is any aa, unknown or other
MNIYIVGLNQLSDVEIDKINKPYLPLASGEYSFETGVTIVASFSILSFWLGWVVGSWPLFWALFVSFVLGTAYSINVPLLRWKRFAVLAAMCILAVRAVIVQLAFFLHIQTHVYKRPPVFSRSLIFATAFMSFFSVVIALFKDIPDIEGDKVFGIQSFSVRLGQKPVFWTCVILLEIAYGVALLVGAASPCLWSKIVTGLGHAVLASILWFHAKSVDLXX

SEQ ID NO: 58818 - protein, 130 aa, Glycine max
  peptide (1)..(130): Ceres Seq. ID no. 15222847
  misc_feature (129)..(129): Xaa is any aa, unknown or other
  misc_feature (130)..(130): Xaa is any aa, unknown or other
MCILAVRAVIVQLAFFLHIQTHVYKRPPVFSRSLIFATAFMSFFSVVIALFKDIPDIEGDKVFGIQSFSVRLGQKPVFWTCVILLEIAYGVALLVGAASPCLWSKIVTGLGHAVLASILWFHAKSVDLXX

SEQ ID NO: 58819 - DNA, 1248 bp, Glycine max
  misc_feature (1)..(1248): Ceres Seq. ID no. 15175949
aaaaacaccatcagcatcttcactcaccacgaaggttccgttctctgtggatctatatctctagggcacgttacgtggaaggaagctcttcaccgacttcaatcgaagaagatggattacagtgctggttcgagtctgtttccgttgcaccgttgcaaaaccattcacctggtgaggcacgcgcaggggattcacaatgtggagggtgacaaaaactacaaagcctacatgaaccccgattacttcgatgctcatctcactcccttgggatggcaacaggttgacaatttgcgtaagcatgttcgcgactctggccttatcaacaccattgatctagtcattgcatcttctctgatgaggactctacaaacatctgttggcgtatttggaggtgagggctacacagataaaacagacgtccttcctcttatggttgcaaatgcaggaaatagctaccgtgctgcaatttcaagtctaaattccccaccaattgttactgttgaactttgtcgtgaacatttgggagttcatccctgtgacagaagaagaagtgttagcgagtatcaatttctttttcccgctgttgatttttcactgttagatagtgatgaggatacctggtggaaggccaatgttagagagacaaaggaagaacttgcagctagggggatgaagttccttaactggttgtggacacgaaaagagaaggagatagcaattgtgacacatagtggattcttgtttcatactctgaatgcctttggaagtgattgccaccccttggtaaagaaagaaatatccaagcactttgctaattgtgaacttcgctccatggtcattgtggatagaggtatgataggattggaacaatcaaccactaactatccaggcaagataccttcagggctggacctccctagtgatgttgcagatgagaagtctgagaaataatggatttggcttcttctacttgtttgtatgtgttcaggaccattcaagcattggttcttctatttgaagttcactattacaaaatctaacatgattatgtcagattatacaaactgtgctgattctgtcttgaaatttatcaattattgtctgcagaaaatatttgttaacaattataaccttgttggaaatcagatgacccatgtgtggcaacacagtcacaaaacacttctgtttgttgatggaacagtttcggaagaggattggttgcctcactcgtgtcacaaattcattgtt

SEQ ID NO: 58820 - protein, 316 aa, Glycine max
  peptide (1)..(316): Ceres Seq. ID no. 15175950
KNTISIFTHHEGSVLCGSISLGHVTWKEALHRLQSKKMDYSAGSSLFPLHRCKTIHLVRHAQGIHNVEGDKNYKAYMNPDYFDAHLTPLGWQQVDNLRKHVRDSGLINTIDLVIASSLMRTLQTSVGVFGGEGYTDKTDVLPLMVANAGNSYRAAISSLNSPPIVTVELCREHLGVHPCDRRRSVSEYQFLFPAVDFSLLDSDEDTWWKANVRETKEELAARGMKFLNWLWTRKEKEIAIVTHSGFLFHTLNAFGSDCHPLVKKEISKHFANCELRSMVIVDRGMIGLEQSTTNYPGKIPSGLDLPSDVADEKSEK

SEQ ID NO: 58821 - protein, 279 aa, Glycine max
  peptide (1)..(279): Ceres Seq. ID no. 15175951
MDYSAGSSLFPLHRCKTIHLVRHAQGIHNVEGDKNYKAYMNPDYFDAHLTPLGWQQVDNLRKHVRDSGLINTIDLVIASSLMRTLQTSVGVFGGEGYTDKTDVLPLMVANAGNSYRAAISSLNSPPIVTVELCREHLGVHPCDRRRSVSEYQFLFPAVDFSLLDSDEDTWWKANVRETKEELAARGMKFLNWLWTRKEKEIAIVTHSGFLFHTLNAFGSDCHPLVKKEISKHFANCELRSMVIVDRGMIGLEQSTTNYPGKIPSGLDLPSDVADEKSEK

SEQ ID NO: 58822 - protein, 240 aa, Glycine max
  peptide (1)..(240): Ceres Seq. ID no. 15175952
MNPDYFDAHLTPLGWQQVDNLRKHVRDSGLINTIDLVIASSLMRTLQTSVGVFGGEGYTDKTDVLPLMVANAGNSYRAAISSLNSPPIVTVELCREHLGVHPCDRRRSVSEYQFLFPAVDFSLLDSDEDTWWKANVRETKEELAARGMKFLNWLWTRKEKEIAIVTHSGFLFHTLNAFGSDCHPLVKKEISKHFANCELRSMVIVDRGMIGLEQSTTNYPGKIPSGLDLPSDVADEKSEK

SEQ ID NO: 58823 - DNA, 1591 bp, Glycine max
  misc_feature (1)..(1591): Ceres Seq. ID no. 15177969
gaatgaacaaagagcccatttatgtcttcaatgtagaaacttgatttggacaagctcaagagcattccatcagtgtcttgagctccaaatggagaacacctggatcctgacttttcaccttctcctcctcctgctccatccaaatgcagcaaaaggggccattggtgttggtgttggtgttggtggcagaggtggcataggtgttggcattggcattgggggcagtgttaacaccccagggccctctggatcaaacctcaagagtgccttcacagcactccaggcatggaaatctgccatgaccgatgacccattgaagattctggatacttgggttggtcccaatgtgtgttcctacagaggtgtcttctgtgcaaactctcaggatgataatggaattgtcacaacagcagcaactgagtcttctattgttgcaggaatagatctcaaccatgcaaacctccaagggacccttgtcaaagatctctctttgctctctgacatcactcttttccatctcaacagtaacaggttttctggctcactccctgacacattcagggacctcacttcactccaagagttggacctcagcaacaaccagctctcaggccctttccccatggtcactctctccatgccaagcctcatctacttggacctcagattcaacaacttctcaggccaacttcctgatcaactcttcaacaagaaacttgatgctatattcctcaacaacaacaactttggaggtgaaattccagacagtttgggaaattcacctgcctcagtcatcaacttggccaacaacaagttgagtggaagcatccctttcagctttggcttcatgggttcaggactgaaggagattctcttccttaacaaccagttaacaggttgcattccacaaggagtagggatcttcactgagatgcaagtttttgatgtgagcttcaactcactcatgggccatttgcctgacactatgagttgcttgcaagacatagaggttcttaatttggcacataacaagctttctggggagttatccgatgtggtatgctctttgagaagcctattaaatctaactgttgcttacaacttcttctctgggctgagccaggaatgttcaaggctattcagtgtggggtttgatttctcggataattgtattcctggaagggatatgcaaagaccccaaccggactgctctataatccctggtggtagtctcaattgtcttagaattcctactccaaaacctcttgtttgcgctgctctggctgcaactttgtctaagcacacaaattcacgttccttttctccctgatgctgggtggctactacagcttggttagttggtcgtggcttttacattaattaatgctgctatcaatttaattcatatatagtcacagtcacagctttctgctaattttattcgatcttcatggattcggtattcttggcccgcacggataagatgtgccttgatttgagaaacttctatgatggtgttaacaaacaagataatttatgtgtctcgtggcatgcttgcttgcttcatttgattgccactggtttttacttc

SEQ ID NO: 58824 - protein, 442 aa, Glycine max
  peptide (1)..(442): Ceres Seq. ID no. 15177970
NEQRAHLCLQCRNLIWTSSRAFHQCLELQMENTWILTFHLLLLLLHPNAAKGAIGVGVGVGGRGGIGVGIGIGGSVNTPGPSGSNLKSAFTALQAWKSAMTDDPLKILDTWVGPNVCSYRGVFCANSQDDNGIVTTAATESSIVAGIDLNHANLQGTLVKDLSLLSDITLFHLNSNRFSGSLPDTFRDLTSLQELDLSNNQLSGPFPMVTLSMPSLIYLDLRFNNFSGQLPDQLFNKKLDAIFLNNNNFGGEIPDSLGNSPASVINLANNKLSGSIPFSFGFMGSGLKEILFLNNQLTGCIPQGVGIFTEMQVFDVSFNSLMGHLPDTMSCLQDIEVLNLAHNKLSGELSDVVCSLRSLLNLTVAYNFFSGLSQECSRLFSVGFDFSDNCIPGRDMQRPQPDCSIIPGGSLNCLRIPTPKPLVCAALAATLSKHTNSRSFSP

SEQ ID NO: 58825 - protein, 413 aa, Glycine max
  peptide (1)..(413): Ceres Seq. ID no. 15177971
MENTWILTFHLLLLLLHPNAAKGAIGVGVGVGGRGGIGVGIGIGGSVNTPGPSGSNLKSAFTALQAWKSAMTDDPLKILDTWVGPNVCSYRGVFCANSQDDNGIVTTAATESSIVAGIDLNHANLQGTLVKDLSLLSDITLFHLNSNRFSGSLPDTFRDLTSLQELDLSNNQLSGPFPMVTLSMPSLIYLDLRFNNFSGQLPDQLFNKKLDAIFLNNNNFGGEIPDSLGNSPASVINLANNKLSGSIPFSFGFMGSGLKEILFLNNQLTGCIPQGVGIFTEMQVFDVSFNSLMGHLPDTMSCLQDIEVLNLAHNKLSGELSDVVCSLRSLLNLTVAYNFFSGLSQECSRLFSVGFDFSDNCIPGRDMQRPQPDCSIIPGGSLNCLRIPTPKPLVCAALAATLSKHTNSRSFSP

SEQ ID NO: 58826 - protein, 343 aa, Glycine max
  peptide (1)..(343): Ceres Seq. ID no. 15177972
MTDDPLKILDTWVGPNVCSYRGVFCANSQDDNGIVTTAATESSIVAGIDLNHANLQGTLVKDLSLLSDITLFHLNSNRFSGSLPDTFRDLTSLQELDLSNNQLSGPFPMVTLSMPSLIYLDLRFNNFSGQLPDQLFNKKLDAIFLNNNNFGGEIPDSLGNSPASVINLANNKLSGSIPFSFGFMGSGLKEILFLNNQLTGCIPQGVGIFTEMQVFDVSFNSLMGHLPDTMSCLQDIEVLNLAHNKLSGELSDVVCSLRSLLNLTVAYNFFSGLSQECSRLFSVGFDFSDNCIPGRDMQRPQPDCSIIPGGSLNCLRIPTPKPLVCAALAATLSKHTNSRSFSP

SEQ ID NO: 58827 - DNA, 1116 bp, Glycine max
  misc_feature (1)..(1116): Ceres Seq. ID no. 13594100
tttgaattttattagaatatggaaattgagcattatggttagtgccaaaatgatatgaaaatttagaattgagactgtacaactcctttgcagtttggttatttctgtgttctgtctcaatttgaatatgcagagtgtggaaaacggacatggtttggggacaaaagagaggaacaagctccaattgagtcaaatgaatttcttccaaggttaaggaggcaaaagtcagtaacttctaggtctcagtatataaacaaaaaggaactaagagtttgtgttggaacatggaatgttggaggaaagcttccacctgatgacctagatattgaggggggggggggcattaacgagctagctgatatctatgttcttagtcttcaggagattgtaccattaaatccgggtaacattttttgtgttgaagacactcgaccgagacagaaatgggaaaacattattcgagatgcacttaatagagttagatcaaaagcaccaaagatgaaatccttcagtgatcccccatcaccatcaaaatttaagccatcaaatgatgcgccagacatagaagaagaaacattacttgaaagtgatggtgatattggtgaggaagtccatcctttggatgaagaacacaatgtttatgatggaggtgcaaataaaccaaccacatatgaagaagccttgaatactaattttcaggcttcagatgttgttgatattgccaacacaaaagagccaataggcaatgatttaaagagacagatttatgatggaaagaggtgatgccttggctgtattgaagaatagtatgagtgaccctaacaatgttcttcaaagttggaattgtacccttgtcactccttgcacatggtttcatgttaattgcaacagtgaaaatagcgtgacccgtgttgatcttggaaatgcaaacctttcgggtcatcttgttccacagcttggtcagctcctaattttggaatgcttgtaagttacaaaacagatatgacattattggctcaaatatgcttaattttactagtaattcttgattgttggctgaaatagatatgaccaggcaaaggttatgctaaaagtaaatatgataacggttatttt

SEQ ID NO: 58828 - protein, 94 aa, Glycine max
  peptide (1)..(94): Ceres Seq. ID no. 13594101
MKSFSDPPSPSKFKPSNDAPDIEEETLLESDGDIGEEVHPLDEEHNVYDGGANKPTTYEEALNTNFQASDVVDIANTKEPIGNDLKRQIYDGKR

SEQ ID NO: 58829 - protein, 73 aa, Glycine max
  peptide (1)..(73): Ceres Seq. ID no. 13594102
MMERGDALAVLKNSMSDPNNVLQSWNCTLVTPCTWFHVNCNSENSVTRVDLGNANLSGHLVPQLGQLLILECL

SEQ ID NO: 58830 - protein, 72 aa, Glycine max
  peptide (1)..(72): Ceres Seq. ID no. 13594103
MERGDALAVLKNSMSDPNNVLQSWNCTLVTPCTWFHVNCNSENSVTRVDLGNANLSGHLVPQLGQLLILECL

SEQ ID NO: 58831 - DNA, 1575 bp, Glycine max
  misc_feature (1)..(1575): Ceres Seq. ID no. 15226870
aaggaacctttgtttttgttgttgttgttgttgttcgtctggattgggttggctttagggctttgaatgccatctggggttttgctctcaggcaatcaagctccaaagctgacccctttctctcacttctaactcacataccttgttccattcttcactttctctctctagaactacaatggtagaagacatgtgtttcctctacaaggaaattcttgttatgaagcctccaaagagatcaccaatgttgttaaggacggcagtcataatattttcgatggtttgtggcgtttttatcttctctgtatgtctaaagcagataagcacccaagctaggactacatttatggacttcaaagtcattgacaaccattctcagagtatattgaagctaatgaatactcacctactacattatcccaaaccttcatcctttagcaggaacgagtgcgctcataatcctgtattattctttgccatattgtccaatcagagatctggtagtgggtggtttgagacccttttgaatagccacgttaatgtaagctcctatggggagatattttctgttagagagagaaggcaaaatgtttcttcaattttgctgactttagataaagtttacaatttggactggttcaatagtgcttccaagaatgagtgctctgctgcaactggtttgaagtggatgcttaatcagggattggtggagcaccataaggaaatagcagaatatttcaatcatagacgtgtttcaattatatttcttttccggagaaacttgctacgcaggatggtatcaatgctagccaattcatatgatcgttatgccaagctattgaatggaacgcacaaggctcatgtacactctgcagaagaggctgagattctttcgaagtacaagcctatcataaattctacatcattgctggatgacttgaaagatatggagatgagatctgctaaggctttagaatacttcaacagcactcggcatataattgtgtactatgaggatcttatgagaaatcacactctaaaagacgtgcaagagtttttaggattgccacagatggagttaacgagccgtcacgttaagatacatagaggaccattgtcagaccacattcagaactgggatgacgttaacaagacactgaaaggaaccatttatgagagttttcttgaagctgactattagtcgttatctcttctattctaactgctggagaaaggtgtaaataccatgccaactttgctgatcttttgccccctcaggaaagcctcagggttcaaaagttttggttttggttctggaacattacctcagtgttctgatgcctttttttgtcaccacctcgtgatcaattaacaccgttgataaatgaatgcttcttgtttctttgtagtatttttttttgttttttcttcttttttttttacctttctttagtgaacatgtatatggctttgccactaattgatttaagtaaagacgagcattgttttgttcaaaccggtgttcaatgatttgtttgtttgttcaattttaacccaatagatagataatacttg

SEQ ID NO: 58832 - protein, 340 aa, Glycine max
  peptide (1)..(340): Ceres Seq. ID no. 15226871
MVEDMCFLYKEILVMKPPKRSPMLLRTAVIIFSMVCGVFIFSVCLKQISTQARTTFMDFKVIDNHSQSILKLMNTHLLHYPKPSSFSRNECAHNPVLFFAILSNQRSGSGWFETLLNSHVNVSSYGEIFSVRERRQNVSSILLTLDKVYNLDWFNSASKNECSAATGLKWMLNQGLVEHHKEIAEYFNHRRVSIIFLFRRNLLRRMVSMLANSYDRYAKLLNGTHKAHVHSAEEAEILSKYKPIINSTSLLDDLKDMEMRSAKALEYFNSTRHIIVYYEDLMRNHTLKDVQEFLGLPQMELTSRHVKIHRGPLSDHIQNWDDVNKTLKGTIYESFLEADY

SEQ ID NO: 58833 - protein, 336 aa, Glycine max
  peptide (1)..(336): Ceres Seq. ID no. 15226872
MCFLYKEILVMKPPKRSPMLLRTAVIIFSMVCGVFIFSVCLKQISTQARTTFMDFKVIDNHSQSILKLMNTHLLHYPKPSSFSRNECAHNPVLFFAILSNQRSGSGWFETLLNSHVNVSSYGEIFSVRERRQNVSSILLTLDKVYNLDWFNSASKNECSAATGLKWMLNQGLVEHHKEIAEYFNHRRVSIIFLFRRNLLRRMVSMLANSYDRYAKLLNGTHKAHVHSAEEAEILSKYKPIINSTSLLDDLKDMEMRSAKALEYFNSTRHIIVYYEDLMRNHTLKDVQEFLGLPQMELTSRHVKIHRGPLSDHIQNWDDVNKTLKGTIYESFLEADY

SEQ ID NO: 58834 - protein, 326 aa, Glycine max
  peptide (1)..(326): Ceres Seq. ID no. 15226873
MKPPKRSPMLLRTAVIIFSMVCGVFIFSVCLKQISTQARTTFMDFKVIDNHSQSILKLMNTHLLHYPKPSSFSRNECAHNPVLFFAILSNQRSGSGWFETLLNSHVNVSSYGEIFSVRERRQNVSSILLTLDKVYNLDWFNSASKNECSAATGLKWMLNQGLVEHHKEIAEYFNHRRVSIIFLFRRNLLRRMVSMLANSYDRYAKLLNGTHKAHVHSAEEAEILSKYKPIINSTSLLDDLKDMEMRSAKALEYFNSTRHIIVYYEDLMRNHTLKDVQEFLGLPQMELTSRHVKIHRGPLSDHIQNWDDVNKTLKGTIYESFLEADY

SEQ ID NO: 58835 - protein, 307 aa, Glycine max
  peptide (1)..(307): Ceres Seq. ID no. 15226874
MVCGVFIFSVCLKQISTQARTTFMDFKVIDNHSQSILKLMNTHLLHYPKPSSFSRNECAHNPVLFFAILSNQRSGSGWFETLLNSHVNVSSYGEIFSVRERRQNVSSILLTLDKVYNLDWFNSASKNECSAATGLKWMLNQGLVEHHKEIAEYFNHRRVSIIFLFRRNLLRRMVSMLANSYDRYAKLLNGTHKAHVHSAEEAEILSKYKPIINSTSLLDDLKDMEMRSAKALEYFNSTRHIIVYYEDLMRNHTLKDVQEFLGLPQMELTSRHVKIHRGPLSDHIQNWDDVNKTLKGTIYESFLEADY

SEQ ID NO: 58836 - DNA, 1379 bp, Glycine max
  misc_feature (1)..(1379): Ceres Seq. ID no. 14312277
aaaaaccccttcccttccacatacactcttctccaatctcaccccaaaaaaacttgcaacaaaccaaaaaccatgcttgatgaatcagtctcatccaccccaacattcttgggcagcctgtacagctggttcacccccactgtcttcttcctcctcctccaactagtcattggcaccattttcatcatctcaaaccttaccaacacccacaaacaccaacaacaagaaccacaacaagcacatgactttccacaccaccatcttcccagatccccttccatgctccaaagactcaaatccatcaacttttacccttcttcccctttcagatcccaagaccttcaaaaccctcattttcacaacgctcatgaaaatgaacaacctcaacttgctagatctccctccgttctccagagactcaaatccatcaacctctacagttacttccctaccgaacccttcacttccaaactcacacccgaccagcacgtgccggagaaaccgtacgtgcgagaacaaaaccaaccgcaacaagtggtggaaacggacgaggaaaaagaagagggttatgatgactatgttgtcgaagatgacaacaacatcattatgagcacgcacaattacaattataacctcggagtctccgaagagggtggtgctggttcttcctcgctggacgagatttactgcaagctgcagcagcagggacaagagggtcatttcgagcggacgcactccgacacgaagccggcgtccggggaggttccggtgaagcttccgaggaagatgaagaagtcggcgagcagcaagtcggcgttctcgcacttcaaggaggacgacatcgtggagactcgccggccggccaccgtgagggaggccaaggtaaccggcggcgccgccgaggacgacgccgaggtggacgccaaggccgacgacttcatcaacaagttcaagcaacagctgaagctccagaggctggattccatcatcaggtacaaggaaatgattggcagagggtctgctaagtaagtactagttattaacaattattattattatcataatactatttttgttttactatgttattgataacaattatctactagttttatggatgagtaatctaattttcattggataacttaattggtcacgtctagcaggattatccgtttattacattttagtgtaatattttatttttttgttagtttttaattaggtttttttgtttctttttttgtaaaattagtgagcttttttggggggttggttatgtgaagtagggtgctgagtgtggcttgttcattttcagccactacttgtgggatgttgggaattagttgtaagttgttgctttatgttgatgactcctc

SEQ ID NO: 58837 - protein, 342 aa, Glycine max
  peptide (1)..(342): Ceres Seq. ID no. 14312278
KNPFPSTYTLLQSHPKKTCNKPKTMLDESVSSTPTFLGSLYSWFTPTVFFLLLQLVIGTIFIISNLTNTHKHQQQEPQQAHDFPHHHLPRSPSMLQRLKSINFYPSSPFRSQDLQNPHFHNAHENEQPQLARSPSVLQRLKSINLYSYFPTEPFTSKLTPDQHVPEKPYVREQNQPQQVVETDEEKEEGYDDYVVEDDNNIIMSTHNYNYNLGVSEEGGAGSSSLDEIYCKLQQQGQEGHFERTHSDTKPASGEVPVKLPRKMKKSASSKSAFSHFKEDDIVETRRPATVREAKVTGGAAEDDAEVDAKADDFINKFKQQLKLQRLDSIIRYKEMIGRGSAK

SEQ ID NO: 58838 - protein, 318 aa, Glycine max
  peptide (1)..(318): Ceres Seq. ID no. 14312279
MLDESVSSTPTFLGSLYSWFTPTVFFLLLQLVIGTIFIISNLTNTHKHQQQEPQQAHDFPHHHLPRSPSMLQRLKSINFYPSSPFRSQDLQNPHFHNAHENEQPQLARSPSVLQRLKSINLYSYFPTEPFTSKLTPDQHVPEKPYVREQNQPQQVVETDEEKEEGYDDYVVEDDNNIIMSTHNYNYNLGVSEEGGAGSSSLDEIYCKLQQQGQEGHFERTHSDTKPASGEVPVKLPRKMKKSASSKSAFSHFKEDDIVETRRPATVREAKVTGGAAEDDAEVDAKADDFINKFKQQLKLQRLDSIIRYKEMIGRGSAK

SEQ ID NO: 58839 - protein, 249 aa, Glycine max
  peptide (1)..(249): Ceres Seq. ID no. 14312280
MLQRLKSINFYPSSPFRSQDLQNPHFHNAHENEQPQLARSPSVLQRLKSINLYSYFPTEPFTSKLTPDQHVPEKPYVREQNQPQQVVETDEEKEEGYDDYVVEDDNNIIMSTHNYNYNLGVSEEGGAGSSSLDEIYCKLQQQGQEGHFERTHSDTKPASGEVPVKLPRKMKKSASSKSAFSHFKEDDIVETRRPATVREAKVTGGAAEDDAEVDAKADDFINKFKQQLKLQRLDSIIRYKEMIGRGSAK

SEQ ID NO: 58840 - DNA, 1455 bp, Glycine max
  misc_feature (1)..(1455): Ceres Seq. ID no. 14310524
acattttctacgtattgaatctcaagattctaagagagattttgctgctctttgaagaagggtgtttgcttgattttggtgatgtcgctgctctcagatctcatcaaccttaacctctcagacactactgagaaggtgatcgcagagtacatatggatcggtggatcaggaatggacctgaggagcaaagcaaggactctcccaggaccagttagcgacccttcaaagcttcccaagtggaactatgatggttccagcacaggccaagctcctggagaagacagtgaagtgattatatacccacaagccattttcagggatccattcagaaggggcaacaatatcttggttatctgtgatgcttacactccagctggagaacccattcccactaacaagaggcacgatgctgccaaggttttcagccatcctgatgttgttgctgaagagacatggtatggtattgagcaggaatacaccttgttgcagaaagatatccaatggcctcttgggtggcctgttggtggtttccctggaccacagggtccatactactgtggtgttggcgctgacaaggcttttggccgtgacattgttgacgcacattacaaagcctgtctttatgctggcatcaacatcagtggaattaatggagaagtgatgcccggtcagtgggaattccaagttggaccttcagttggaatctcagctggtgacgaggtgtgggcagctcgttacatcttggagaggatcactgagattgctggtgtggtggtttcctttgatcccaagccaattcagggtgattggaatggtgctggtgctcacacaaactacagcactaagtccatgagaaatgatggtggctatgaagtgatcaaaaccgccattgagaagttggggaagagacacaaggagcacattgctgcttatggagaaggcaacgagcgtcgtttgacagggcgccacgaaaccgctgacatcaacaccttcttatggggagttgcaaaccgtggagcttcagttagggttgggagggacacagagaaagcagggaagggatattttgaggacagaaggccagcttctaacatggacccatatgtggttacttccatgattgcagacacaaccattctgtggaagccatgagcaaaacttgcatgttgtctccctttggatggaacaaggaacaaggaacaaggaacagttatgcttttctaagtagggtttggtcctttttattttttaccttttgatttttctaggatttcgatttgtggctactttggttggtgcaaccaactgccaagggttgttcattgttttctattcctttccctcgttttccgattgttacaataataataataataatgtaatatggttattttcagtctcaaacaaaagtaatgctgattgtgaagtataataatatatgaaattgtcatgtcc

SEQ ID NO: 58841 - protein, 356 aa, Glycine max
  peptide (1)..(356): Ceres Seq. ID no. 14310525
MSLLSDLINLNLSDTTEKVIAEYIWIGGSGMDLRSKARTLPGPVSDPSKLPKWNYDGSSTGQAPGEDSEVIIYPQAIFRDPFRRGNNILVICDAYTPAGEPIPTNKRHDAAKVFSHPDVVAEETWYGIEQEYTLLQKDIQWPLGWPVGGFPGPQGPYYCGVGADKAFGRDIVDAHYKACLYAGINISGINGEVMPGQWEFQVGPSVGISAGDEVWAARYILERITEIAGVVVSFDPKPIQGDWNGAGAHTNYSTKSMRNDGGYEVIKTAIEKLGKRHKEHIAAYGEGNERRLTGRHETADINTFLWGVANRGASVRVGRDTEKAGKGYFEDRRPASNMDPYVVTSMIADTTILWKP

SEQ ID NO: 58842 - protein, 326 aa, Glycine max
  peptide (1)..(326): Ceres Seq. ID no. 14310526
MDLRSKARTLPGPVSDPSKLPKWNYDGSSTGQAPGEDSEVIIYPQAIFRDPFRRGNNILVICDAYTPAGEPIPTNKRHDAAKVFSHPDVVAEETWYGIEQEYTLLQKDIQWPLGWPVGGFPGPQGPYYCGVGADKAFGRDIVDAHYKACLYAGINISGINGEVMPGQWEFQVGPSVGISAGDEVWAARYILERITEIAGVVVSFDPKPIQGDWNGAGAHTNYSTKSMRNDGGYEVIKTAIEKLGKRHKEHIAAYGEGNERRLTGRHETADINTFLWGVANRGASVRVGRDTEKAGKGYFEDRRPASNMDPYVVTSMIADTTILWKP

SEQ ID NO: 58843 - DNA, 1722 bp, Glycine max
  misc_feature (1)..(1722): Ceres Seq. ID no. 14311808
atcccggaaatggagggtggtggtgacgttaagggttgggcgttggagtttcttctccgggctcagaacccagtcgttcccagtaacctaattaagaaagtcattctaatagtccccctttcagacttttattccaggctcaagaagacgcttcttctccgagcccttcaagatcacttgttcgctgtctctgtccctgagtccgttctcgaaaccctcgagcaagtcgaggaactccaccgcctcggcgatgacgacgacggagctctggtcaccacctcatccgccatgagcgccgcctactgtgccgtcgcggtggagtgcactctcaagcacctgctgctggagctacacaacaaccctgcttatctcggcgcggtgaacaggatatggcgcggtagggttcggctcatgagcggttccggggaggggagcctcctgctctcgccagagctggagcggtggagaaccgacattgaagcttcccttctggattcgtcggtgagggagaggttggcctccattgatacaagaagggatgccgtcttcaagctccgggattatttgaaggaagcttggaccgatttggggccttcatttcttgagcgagcggcgttggcgcatataaacaacaatgccctagccgcgaatcactctgaggattctcaacagccggagagagaaattgagaagtgcactgctgctcctgctgaggaagtgcatccctcaacagatgttgagatccaaaaggttggggagtgcggttctgtggagttgcaaaagttggctgaggattctctacttgatttgttggaagtgaatgaggaggcatcgatggaagaacaaagtagagatgtagatgtaccttgcccacatgctattaatgacaatgaggctgatctgatggaaaaggatcaaacttctgccgaggaagtgcttccctcaacaactgttgaggtccaaaaggttagggaatgtggttccgtggagttgcaaaagttggctaaggattctctacttaattcgttggaagtgaatgaggaggcacatattgaaagtagagatgcagatgtaccttgcccacttgttattagtaacaatgaggctgatctgatggaaaaggatcaaacttctatccctcataatcatgaccataagccaagtttaatggaaagaaatagttctgctcgtatttatgagtgggatgattcaatagatggcttggaggatggaacatcagatcatgcaactagatttaatttgcctagtcccaaggggagaaaagtttctccattgaataagtacaaacctgcaaacattacaaagaggagaaaagtgaaaaaatggagtcagttggaagaggagactctaaggactgctgtagacaagtttggcaggggaaattggaagttaatcctagattctcacaaagatatatttgaagagagaactgaagttgatttgaaggacaagtggagaaatatgacgtaatatgggtgcaaatgaatcacaatgtggaatattgcagagggcggtagatcgtgtggatatctttttggcttaagcagagtctacttcctaaatttctttaatttagctcttcaaactattgtctcctaatttgatgtctgtggttgtattttggattaagtaatattcatactattttcatgtttgtacttttaatgacactaacgatggtaaaatgacaggagtttatat

SEQ ID NO: 58844 - protein, 496 aa, Glycine max
  peptide (1)..(496): Ceres Seq. ID no. 14311809
IPEMEGGGDVKGWALEFLLRAQNPVVPSNLIKKVILIVPLSDFYSRLKKTLLLRALQDHLFAVSVPESVLETLEQVEELHRLGDDDDGALVTTSSAMSAAYCAVAVECTLKHLLLELHNNPAYLGAVNRIWRGRVRLMSGSGEGSLLLSPELERWRTDIEASLLDSSVRERLASIDTRRDAVFKLRDYLKEAWTDLGPSFLERAALAHINNNALAANHSEDSQQPEREIEKCTAAPAEEVHPSTDVEIQKVGECGSVELQKLAEDSLLDLLEVNEEASMEEQSRDVDVPCPHAINDNEADLMEKDQTSAEEVLPSTTVEVQKVRECGSVELQKLAKDSLLNSLEVNEEAHIESRDADVPCPLVISNNEADLMEKDQTSIPHNHDHKPSLMERNSSARIYEWDDSIDGLEDGTSDHATRFNLPSPKGRKVSPLNKYKPANITKRRKVKKWSQLEEETLRTAVDKFGRGNWKLILDSHKDIFEERTEVDLKDKWRNMT

SEQ ID NO: 58845 - protein, 493 aa, Glycine max
  peptide (1)..(493): Ceres Seq. ID no. 14311810
MEGGGDVKGWALEFLLRAQNPVVPSNLIKKVILIVPLSDFYSRLKKTLLLRALQDHLFAVSVPESVLETLEQVEELHRLGDDDDGALVTTSSAMSAAYCAVAVECTLKHLLLELHNNPAYLGAVNRIWRGRVRLMSGSGEGSLLLSPELERWRTDIEASLLDSSVRERLASIDTRRDAVFKLRDYLKEAWTDLGPSFLERAALAHINNNALAANHSEDSQQPEREIEKCTAAPAEEVHPSTDVEIQKVGECGSVELQKLAEDSLLDLLEVNEEASMEEQSRDVDVPCPHAINDNEADLMEKDQTSAEEVLPSTTVEVQKVRECGSVELQKLAKDSLLNSLEVNEEAHIESRDADVPCPLVISNNEADLMEKDQTSIPHNHDHKPSLMERNSSARIYEWDDSIDGLEDGTSDHATRFNLPSPKGRKVSPLNKYKPANITKRRKVKKWSQLEEETLRTAVDKFGRGNWKLILDSHKDIFEERTEVDLKDKWRNMT

SEQ ID NO: 58846 - protein, 400 aa, Glycine max
  peptide (1)..(400): Ceres Seq. ID no. 14311811
MSAAYCAVAVECTLKHLLLELHNNPAYLGAVNRIWRGRVRLMSGSGEGSLLLSPELERWRTDIEASLLDSSVRERLASIDTRRDAVFKLRDYLKEAWTDLGPSFLERAALAHINNNALAANHSEDSQQPEREIEKCTAAPAEEVHPSTDVEIQKVGECGSVELQKLAEDSLLDLLEVNEEASMEEQSRDVDVPCPHAINDNEADLMEKDQTSAEEVLPSTTVEVQKVRECGSVELQKLAKDSLLNSLEVNEEAHIESRDADVPCPLVISNNEADLMEKDQTSIPHNHDHKPSLMERNSSARIYEWDDSIDGLEDGTSDHATRFNLPSPKGRKVSPLNKYKPANITKRRKVKKWSQLEEETLRTAVDKFGRGNWKLILDSHKDIFEERTEVDLKDKWRNMT

SEQ ID NO: 58847 - DNA, 1368 bp, Glycine max
  misc_feature (1)..(1368): Ceres Seq. ID no. 13638160
ctctttcgttatctggtcatggttgtttgcgacttctgggagctcagtctcgctcagagtcagagaaaaacacccaaatcaaatattatcatggagcccagcttggatttgagactgggctttgtccccaaacccctttccctgtttttcggcgacgtttctgggaacagagacaagtgcgacaaagtggtcacactcgatggcttcgtgcagagattggaggaagagttgacaaaggtcgaggctttcaaacgcgagcttcctctctgcattctcctcctaaacgatgctatagcgagattgaaggaggaaaaagtgaagtgttcgggaatgcaagatccgcctcttaaaaccagttcaggaggaaatgaaaatgaaaactctgagaagaagaattggatgagttcagcacagctttggagcactcagaaatccaaatcgaggaatgaggaagatgataggtctgtgccagcgaactcaattaatgggaattcgtgtgtccccgagaaggagggctcgcaagttccgagctttggtttgatggctcgtgcttctgaactgagtcatagcaattccaagagtgttggtggagatactagttctggctcctctttgctccgtgttgaggtacagagtcagccacagccgccgcagcatatgcagcagaatccgaggaaacaacggcggtgctggtcgccggagcttcaccggcgctttgtggacgcccttcaacaacttggtggagcacaagtggccactcctaaacagattagagaactgatgcaggtggaaggccttacaaatgatgaagtgaaaagtcatttgcaaaagtacaggcttcatgttaggagattcccagttttttcaattggccaggttgataatggctcatggatgacacaggatgaatgtggggataaatcaaagggaaacatgtcacagtctggttctccacagggtcctctcacacctctgctcctaggaggagcaggatccgctaagggtctctcaagccctggacggaacagtgtggatgcagaagatgagcaatcatcagattgccggaattggaaaggagggctccaccaccagcagcttgaaactgataatcacagcctctaaaattttgcagataaatgataatacaatacataaaatgatgaggagttgaaggcccagaatttgacaacataagaataatagagatctaacacataaaagaactatagggatcaagtttatgctaccagtattttaaactgtttggtagagagcaactgaggttttgcagatttttcaaggtttcttcttttctatttttaaactcagtatagttgtatggagcttaaattttactgggcaattttc

SEQ ID NO: 58848 - protein, 373 aa, Glycine max
  peptide (1)..(373): Ceres Seq. ID no. 13638161
LFRYLVMVVCDFWELSLAQSQRKTPKSNIIMEPSLDLRLGFVPKPLSLFFGDVSGNRDKCDKVVTLDGFVQRLEEELTKVEAFKRELPLCILLLNDAIARLKEEKVKCSGMQDPPLKTSSGGNENENSEKKNWMSSAQLWSTQKSKSRNEEDDRSVPANSINGNSCVPEKEGSQVPSFGLMARASELSHSNSKSVGGDTSSGSSLLRVEVQSQPQPPQHMQQNPRKQRRCWSPELHRRFVDALQQLGGAQVATPKQIRELMQVEGLTNDEVKSHLQKYRLHVRRFPVFSIGQVDNGSWMTQDECGDKSKGNMSQSGSPQGPLTPLLLGGAGSAKGLSSPGRNSVDAEDEQSSDCRNWKGGLHHQQLETDNHSL

SEQ ID NO: 58849 - protein, 367 aa, Glycine max
  peptide (1)..(367): Ceres Seq. ID no. 13638162
MVVCDFWELSLAQSQRKTPKSNIIMEPSLDLRLGFVPKPLSLFFGDVSGNRDKCDKVVTLDGFVQRLEEELTKVEAFKRELPLCILLLNDAIARLKEEKVKCSGMQDPPLKTSSGGNENENSEKKNWMSSAQLWSTQKSKSRNEEDDRSVPANSINGNSCVPEKEGSQVPSFGLMARASELSHSNSKSVGGDTSSGSSLLRVEVQSQPQPPQHMQQNPRKQRRCWSPELHRRFVDALQQLGGAQVATPKQIRELMQVEGLTNDEVKSHLQKYRLHVRRFPVFSIGQVDNGSWMTQDECGDKSKGNMSQSGSPQGPLTPLLLGGAGSAKGLSSPGRNSVDAEDEQSSDCRNWKGGLHHQQLETDNHSL

SEQ ID NO: 58850 - protein, 343 aa, Glycine max
  peptide (1)..(343): Ceres Seq. ID no. 13638163
MEPSLDLRLGFVPKPLSLFFGDVSGNRDKCDKVVTLDGFVQRLEEELTKVEAFKRELPLCILLLNDAIARLKEEKVKCSGMQDPPLKTSSGGNENENSEKKNWMSSAQLWSTQKSKSRNEEDDRSVPANSINGNSCVPEKEGSQVPSFGLMARASELSHSNSKSVGGDTSSGSSLLRVEVQSQPQPPQHMQQNPRKQRRCWSPELHRRFVDALQQLGGAQVATPKQIRELMQVEGLTNDEVKSHLQKYRLHVRRFPVFSIGQVDNGSWMTQDECGDKSKGNMSQSGSPQGPLTPLLLGGAGSAKGLSSPGRNSVDAEDEQSSDCRNWKGGLHHQQLETDNHSL

SEQ ID NO: 58851 - DNA, 1430 bp, Glycine max
  misc_feature (1)..(1430): Ceres Seq. ID no. 15227289
ccgggccccccctcgagtcagctacgtaggcccccccccccaattttcataattatttttttctttgaaaccagccaagagggttatttttgatccctcaaagctaatttctctctctctttttttatttccgggactgaagaggttgtctatttgaaatctccttcatcctttcctttcttgtagaaaactttttaaatttttttgtcagtgggtgttttaattaaccacctgttcttcaagttttagaaagacgcaggttgaattaattagtatcatggcagctttgatggatttttacagcagcagcccagagtttcaacttcactcagatccattcaggggagaactaatggaagttcttgaaccttttatgaaaagtccttctcccaactatttcccttcctccccctccctccctaatctttactcaaacgggttatccagcaacacccaaagcttaattggcttcgggcaagcgcaacccacatctcttgtgggcctgaaccacctaaccccatctcagatctctcagatccaagcccaaatccagatccaggcccagcagcatcagaatcgcagcaacaccctgagcttccttgggccgaagcccatccccatgaagcacgcgggcatgcctccgaagcccacgaagctttacagaggggtgagacagaggcactggggaaagtgggtggctgagatcagacttcccaagaaccggaccaggctgtggctgggaaccttcgacaccgccgaggaagccgctctggcatacgacaaggccgcgtacaagctccgaggtgacttcgccaggctcaacttcccaaacctgcgacaccagggttcctccgtcggtggtgatttcggggagtacaagcctcttcattccgctgttgacgccaagcttcaggccatttgcgaaggcctggctgagctgcagaaacaggggaagaccgagaagcctccgaggaagtcgcgttccaaactcgcggagaaggttgtttccgacaaggagaacaacaactcttgtaaggtggaagctgcgtcctggtcgtcggaaggttcttcgccgctttcggatctgacgtttgctgacgtgagcgaggctcagtgggaaggtgattcggataattataatctccagaagtacccctcttatgagatcgattgggattctctgtgaagtgtcctattatgtatggtctagtctaggtcttagtgtctcttaggtggctgctactgcaatggagtttttggcaattgcagggctagtactattctgtgtataatctctctaccttgctcacagctggtttttttcttgcttgaccagggagaattagtccgcttaatatgtttttcaagtgcatcgctgtaatctacttcaatttcatcatcttataaaatatattattctactannnnaa

SEQ ID NO: 58852 - protein, 302 aa, Glycine max
  peptide (1)..(302): Ceres Seq. ID no. 15227290
MAALMDFYSSSPEFQLHSDPFRGELMEVLEPFMKSPSPNYFPSSPSLPNLYSNGLSSNTQSLIGFGQAQPTSLVGLNHLTPSQISQIQAQIQIQAQQHQNRSNTLSFLGPKPIPMKHAGMPPKPTKLYRGVRQRHWGKWVAEIRLPKNRTRLWLGTFDTAEEAALAYDKAAYKLRGDFARLNFPNLRHQGSSVGGDFGEYKPLHSAVDAKLQAICEGLAELQKQGKTEKPPRKSRSKLAEKVVSDKENNNSCKVEAASWSSEGSSPLSDLTFADVSEAQWEGDSDNYNLQKYPSYEIDWDSL

SEQ ID NO: 58853 - protein, 298 aa, Glycine max
  peptide (1)..(298): Ceres Seq. ID no. 15227291
MDFYSSSPEFQLHSDPFRGELMEVLEPFMKSPSPNYFPSSPSLPNLYSNGLSSNTQSLIGFGQAQPTSLVGLNHLTPSQISQIQAQIQIQAQQHQNRSNTLSFLGPKPIPMKHAGMPPKPTKLYRGVRQRHWGKWVAEIRLPKNRTRLWLGTFDTAEEAALAYDKAAYKLRGDFARLNFPNLRHQGSSVGGDFGEYKPLHSAVDAKLQAICEGLAELQKQGKTEKPPRKSRSKLAEKVVSDKENNNSCKVEAASWSSEGSSPLSDLTFADVSEAQWEGDSDNYNLQKYPSYEIDWDSL

SEQ ID NO: 58854 - protein, 277 aa, Glycine max
  peptide (1)..(277): Ceres Seq. ID no. 15227292
MEVLEPFMKSPSPNYFPSSPSLPNLYSNGLSSNTQSLIGFGQAQPTSLVGLNHLTPSQISQIQAQIQIQAQQHQNRSNTLSFLGPKPIPMKHAGMPPKPTKLYRGVRQRHWGKWVAEIRLPKNRTRLWLGTFDTAEEAALAYDKAAYKLRGDFARLNFPNLRHQGSSVGGDFGEYKPLHSAVDAKLQAICEGLAELQKQGKTEKPPRKSRSKLAEKVVSDKENNNSCKVEAASWSSEGSSPLSDLTFADVSEAQWEGDSDNYNLQKYPSYEIDWDSL

SEQ ID NO: 58855 - DNA, 1413 bp, Glycine max
  misc_feature (1)..(1413): Ceres Seq. ID no. 14308608
gagggacaacaacaacaattctgcaccaattagctcacaaaactttcaagggtttgatgatcataataataactcttcttctgatcatcatcacaccactttcactgactgcttacatggttccatggattacaacaccctctctagagtctttgacatgtcttgttcatcttctgaagtgatctcctccattgatgaaaaccccaagaagcctagtgcaggaggagactctgtgggggtcagggggaaccaatcaacacctaattcatctgtctcttcgccatccaatgaagctgaagcaattatagaagaagactcaaccaagagccagaaagataagcagccaaaagcgtgtgaagctgatggagatgaaaagcctaagaaagagaacaaacccaaaaagaaagagaaaaagccaagggagcctcgttttgccttcttgactaaaagtgagatcgatcatcttgaagatggatacagatggagaaaatatggacagaaagcggtcaagaatagtccatacccaaggagctattatagatgcacgagtcagaagtgcggtgtaaagaaaagggtggagaggtcattccaggacccaacaattgtgatcacaacatacgaagggcaacacaaccatcactgtccagcaactctgaggggcagtgctgcaagcatgttgtcatcaccttccttttttggttcctcttatatggcgtcaagcttaccccaagattttcttgctcagttggttccaagttatagccaaattaatgatcaccaaagtccaatgtttcaccaaaacctttcccataatctccatccacagcctcaacagcagcaccagttccaactctctcatgaccatggtttgttgcaagacctactaccatcattccctggcaaacacgagccatgaactcactaaaaacctagtgcatgttttgatttatttattttaggaaaaataatggttttatatttcatcactactagaaaaattaaaattagtaacggaataatctatgtaggttttttaaaaaatccgttactaaaatttggtgatctgatctcaaattaattagtgaaggaaaattaattttctatcactaattttgatcaccaatttattgatttttagaagtatttctaggagtttttaaaagaaaaaacaattgctttttcaagataaaccagaatcaaacatgcacttaacccatttctattagcgtatggtggagcttgcagtgtattgcacactgtctatatataagtatgtgtagtaattaagtagtagtagattccctcttggttaattacctcctctctttaagtcacatgtatgtacctagatttgtatggaaatgaaaaacattgattattcttaaatgagtatttagaattacttcagatggc

SEQ ID NO: 58856 - protein, 304 aa, Glycine max
  peptide (1)..(304): Ceres Seq. ID no. 14308609
RDNNNNSAPISSQNFQGFDDHNNNSSSDHHHTTFTDCLHGSMDYNTLSRVFDMSCSSSEVISSIDENPKKPSAGGDSVGVRGNQSTPNSSVSSPSNEAEAIIEEDSTKSQKDKQPKACEADGDEKPKKENKPKKKEKKPREPRFAFLTKSEIDHLEDGYRWRKYGQKAVKNSPYPRSYYRCTSQKCGVKKRVERSFQDPTIVITTYEGQHNHHCPATLRGSAASMLSSPSFFGSSYMASSLPQDFLAQLVPSYSQINDHQSPMFHQNLSHNLHPQPQQQHQFQLSHDHGLLQDLLPSFPGKHEP

SEQ ID NO: 58857 - protein, 263 aa, Glycine max
  peptide (1)..(263): Ceres Seq. ID no. 14308610
MDYNTLSRVFDMSCSSSEVISSIDENPKKPSAGGDSVGVRGNQSTPNSSVSSPSNEAEAIIEEDSTKSQKDKQPKACEADGDEKPKKENKPKKKEKKPREPRFAFLTKSEIDHLEDGYRWRKYGQKAVKNSPYPRSYYRCTSQKCGVKKRVERSFQDPTIVITTYEGQHNHHCPATLRGSAASMLSSPSFFGSSYMASSLPQDFLAQLVPSYSQINDHQSPMFHQNLSHNLHPQPQQQHQFQLSHDHGLLQDLLPSFPGKHEP

SEQ ID NO: 58858 - protein, 252 aa, Glycine max
  peptide (1)..(252): Ceres Seq. ID no. 14308611
MSCSSSEVISSIDENPKKPSAGGDSVGVRGNQSTPNSSVSSPSNEAEAIIEEDSTKSQKDKQPKACEADGDEKPKKENKPKKKEKKPREPRFAFLTKSEIDHLEDGYRWRKYGQKAVKNSPYPRSYYRCTSQKCGVKKRVERSFQDPTIVITTYEGQHNHHCPATLRGSAASMLSSPSFFGSSYMASSLPQDFLAQLVPSYSQINDHQSPMFHQNLSHNLHPQPQQQHQFQLSHDHGLLQDLLPSFPGKHEP

SEQ ID NO: 58859 - DNA, 1686 bp, Glycine max
  misc_feature (1)..(1686): Ceres Seq. ID no. 14307548
ctggtagtgtgctccgttgagataaacctgagtgagagtgaggcgaagggggagaaagctaaaactaaaaaatgtcatcttctaagctcacactgtacggaatcggaaccgcactcttccgcacccgtagaactgcacccgtaactgtaactccccactctccctttctcttcttcaaacccattcccttcccgccgtgcttcctccgcccggattcctcttcctcctcctccttctccgcagctgcagccgccgcagaaaccctaccctccgtcgaccacccctggccggaatgggtctccttcgtcgaccgcttgaacaccaaaggctacctccccaaaacctcctcttccgacgacaccgtaagcctttacgccaacatgaactctctcaaggacgcttgtctcagcttcgcgcgtgaccgttacgaccttttcaatttgctgcctacaaatgatatccaagcagtggttgagggtgggtgccctaatcttctccgtaaagctgttaattcagctaagaggctgagagcacacctgcaattagatgaaggggatgattttgaaactgatgcccgaactgttgatatagttcgaatacttttgttctacgcactagatccacttgtgctttctggaggagacaaaccaccgggccgggaagttattgaatcatctgtcagaaaacttctctctcagctaattgagttgagtgagtcccctgctcctgcccctgctcctgctcgttcaaagcctactgcacaggatggtgtggtagaaggccaatctctaagtgttacgactaatcaattgtttaaagatgttgagatgaagaaaggtgactggatgtgtccaaaatgcaatttcatgaacttttctagaaatacacaatgcctgaattgtaaggaagacaagcctaaggatattaacccgtttactgttcaaatgaagccaggagattggacctgtcctgaatgcaattatttaaattttgccagaaacagactatgtctagaatgcaaaatagaggggccggcgaaggaagctaataccattgaagttgaaaggaaaaaaggagattggacttgcccacaatgtgggttcatgaattatgctaggaacacgaaatgtttgcgttgtcctgagacaaggcctaagaaacatcctggggactggaattgtcccgggtgtgggttcatgaattttgctagtaaaatgaagtgtttgcattgtcaagagccaaacccaagttccaagaaatatagtggggattggagttgccccaaatgcgatttctacaattatgcaagaaatatggcttgcctgaagtgcaatgctgaacgccctaaagaacaaccaaccgttgactatgaggaccatgaatggagacgatcaaactgattaggggaaaaaacgccatcgggctatatcatatagggaggtcacaattgtgctggtgggctgtaacaaatattttgttattgatgcattctctgcccatttttctttctcaatcttccaattaatggtgctaagtgcttcttcacttattggaaatggtacaaaaacgataattagagatactttaaagttatttgattgcatatgaatgtgttttaatataatcatgtacagatctaaaagtaaatttacagagattgaatcttgtgaatgttgttatagcttt

SEQ ID NO: 58860 - protein, 442 aa, Glycine max
  peptide (1)..(442): Ceres Seq. ID no. 14307549
MSSSKLTLYGIGTALFRTRRTAPVTVTPHSPFLFFKPIPFPPCFLRPDSSSSSSFSAAAAAAETLPSVDHPWPEWVSFVDRLNTKGYLPKTSSSDDTVSLYANMNSLKDACLSFARDRYDLFNLLPTNDIQAVVEGGCPNLLRKAVNSAKRLRAHLQLDEGDDFETDARTVDIVRILLFYALDPLVLSGGDKPPGREVIESSVRKLLSQLIELSESPAPAPAPARSKPTAQDGVVEGQSLSVTTNQLFKDVEMKKGDWMCPKCNFMNFSRNTQCLNCKEDKPKDINPFTVQMKPGDWTCPECNYLNFARNRLCLECKIEGPAKEANTIEVERKKGDWTCPQCGFMNYARNTKCLRCPETRPKKHPGDWNCPGCGFMNFASKMKCLHCQEPNPSSKKYSGDWSCPKCDFYNYARNMACLKCNAERPKEQPTVDYEDHEWRRSN

SEQ ID NO: 58861 - protein, 339 aa, Glycine max
  peptide (1)..(339): Ceres Seq. ID no. 14307550
MNSLKDACLSFARDRYDLFNLLPTNDIQAVVEGGCPNLLRKAVNSAKRLRAHLQLDEGDDFETDARTVDIVRILLFYALDPLVLSGGDKPPGREVIESSVRKLLSQLIELSESPAPAPAPARSKPTAQDGVVEGQSLSVTTNQLFKDVEMKKGDWMCPKCNFMNFSRNTQCLNCKEDKPKDINPFTVQMKPGDWTCPECNYLNFARNRLCLECKIEGPAKEANTIEVERKKGDWTCPQCGFMNYARNTKCLRCPETRPKKHPGDWNCPGCGFMNFASKMKCLHCQEPNPSSKKYSGDWSCPKCDFYNYARNMACLKCNAERPKEQPTVDYEDHEWRRSN

SEQ ID NO: 58862 - DNA, 1390 bp, Glycine max
  misc_feature (1)..(1390): Ceres Seq. ID no. 14304120
ctcactcactcactcattgtccttactcacccctctctctattagcattagcatcaaaaacactctcttggttatccaatccaaacaccacccttcttctcataccctgctcagttagcagcagctactctcattcctctaccggagcaaaactataaacaaaaaaaacaagtccatcgtatgggtctcttagcatcctcatgcttcattctcattgctctcctactcctcactcccaaaggtgttatgggtgccaccttcacattctttaacaaatgcgactacacagtgtggcctgggattctcgcaaatgccggtagcccaccactcgacagcaccggttttgagctccccaaggacacttctcgcgccttccaagctcccaccggctggtccggtcgtttctggggccgaaccggttgcaccttcgacggatccggcgccggctcatgcctcaccggcgactgcggctccggccaagtcgaatgcaacggcgccggagccgccccgccggcaaccctggcggagttcacgctcggcaccggaggtcaagacttctacgacgtgagcctcgttgatggctacaatcttcccatgatcgtggaaggcactggtgggtcgggtctttgcgcctccacgggttgtacctcggatctgaaccagcaatgtcctgcggagctgagagcctcggagggaagcgcgtgcaagagcgcgtgtgaggcttttggtagccctgagtactgctgcagcggcgcgtatggctcacccgccacttgcaggccgtccatttactcggagatgttcaaggctgcttgccctaggtcttatagctacgcatacgatgatgctacgagtacgtttacgtgttccggcgccgattataccgttaccttctgtccatcctctccaagtcagaaatcttcacgagataccactaccaaccccatgacctcaacaacaacatcaccagggtcagggacagtgacaggaaccggaaccggaacaggatccgaaggggcagtggtatacacgggtgcggacaacggcgttgcgtataatacagttacggattccgggtcaagttcaggatccggaggagaaacaatgctcgcagatgggtcatatttagctggtttagccatgggagactcccctgaaagaacagtttccatcgcgtttgtttactctgctagctttttgcttattctcttcctgctttagctgcaccagcattgtttgttaaatgtgtaaatggctcttagattttcgggtttttcgtgggtgggttcaagaattttggctttgccagtaaagctggcagattctctccctcattgtaaaccaccttccaaaagattcgccagaaaaagtattccgtgtttcattcgtt

SEQ ID NO: 58863 - protein, 346 aa, Glycine max
  peptide (1)..(346): Ceres Seq. ID no. 14304121
MGLLASSCFILIALLLLTPKGVMGATFTFFNKCDYTVWPGILANAGSPPLDSTGFELPKDTSRAFQAPTGWSGRFWGRTGCTFDGSGAGSCLTGDCGSGQVECNGAGAAPPATLAEFTLGTGGQDFYDVSLVDGYNLPMIVEGTGGSGLCASTGCTSDLNQQCPAELRASEGSACKSACEAFGSPEYCCSGAYGSPATCRPSIYSEMFKAACPRSYSYAYDDATSTFTCSGADYTVTFCPSSPSQKSSRDTTTNPMTSTTTSPGSGTVTGTGTGTGSEGAVVYTGADNGVAYNTVTDSGSSSGSGGETMLADGSYLAGLAMGDSPERTVSIAFVYSASFLLILFLL

SEQ ID NO: 58864 - protein, 324 aa, Glycine max
  peptide (1)..(324): Ceres Seq. ID no. 14304122
MGATFTFFNKCDYTVWPGILANAGSPPLDSTGFELPKDTSRAFQAPTGWSGRFWGRTGCTFDGSGAGSCLTGDCGSGQVECNGAGAAPPATLAEFTLGTGGQDFYDVSLVDGYNLPMIVEGTGGSGLCASTGCTSDLNQQCPAELRASEGSACKSACEAFGSPEYCCSGAYGSPATCRPSIYSEMFKAACPRSYSYAYDDATSTFTCSGADYTVTFCPSSPSQKSSRDTTTNPMTSTTTSPGSGTVTGTGTGTGSEGAVVYTGADNGVAYNTVTDSGSSSGSGGETMLADGSYLAGLAMGDSPERTVSIAFVYSASFLLILFLL

SEQ ID NO: 58865 - protein, 208 aa, Glycine max
  peptide (1)..(208): Ceres Seq. ID no. 14304123
MIVEGTGGSGLCASTGCTSDLNQQCPAELRASEGSACKSACEAFGSPEYCCSGAYGSPATCRPSIYSEMFKAACPRSYSYAYDDATSTFTCSGADYTVTFCPSSPSQKSSRDTTTNPMTSTTTSPGSGTVTGTGTGTGSEGAVVYTGADNGVAYNTVTDSGSSSGSGGETMLADGSYLAGLAMGDSPERTVSIAFVYSASFLLILFLL

SEQ ID NO: 58866 - DNA, 1132 bp, Glycine max
  misc_feature (1)..(1132): Ceres Seq. ID no. 14313103
gttctacagttctcttggtcatgttcaacaaagcagccctctcctcttacaatttcccatttgcaaatgtcatcacacttgctcagatggtgtttgcatttattattctctacgtgttgagatccttgaagataatttctttcacagctggtgaatcgctgagcagttctaagaatacaataatatttgtgtcctataggacattagcccagacacttcctcttgctttaacttatttgctttttatggtagtgaccatggaagcagtgcgcggtataaacattcccatgtacaccaccctcaggcgaactgttgtcgccttcacaatggttatggagtattttctgtcagggcagacacattcaagatttgttgttggaagtgttgggataatcatagccggtgcttttgttgctggagctcgtgacttggcatttgatgctttttcctattcagttgtatttgtagaaaacatgtgtaaggcagtatacctggcttctgtttctcgtgttggtaaatccagcggcctcaatatttttggtattgtatggtgcaatgtggtgatttgtggaccaatcttgtttctctggtccttactcagaggagatctccaagcaacactaaactttccatacttcttttcccgtggatttcaggttgtgatgcttctttcctgcgcttttactttctttataaactacatcgtagttttgaatacaactatcaactcggcacttacacaggcaatctgtggtaacttaaaggatgttttcacaagtggtattggttggttattattcggaggacttccatatgacttgttcaatattcttggtcaagtacttggcttccttgggtcctgtttgtatgcttattgtaaactgatgcaagcagtatgaggatgacctttcaggtgggtgtttaggaacatcaaaacaccaaacaagcatcgtatagtgtccctacaaattttttagggtttacaaattaagtcaacagaaaaaggtcaaatatcaaattatctttatcaaaatttacagtataaaaaatgtttttgtctgcccaagtgtaacttagggaatgacaatagaaatgaattcctgaaaatatttaatataaaagcgtttaattt

SEQ ID NO: 58867 - protein, 298 aa, Glycine max
  peptide (1)..(298): Ceres Seq. ID no. 14313104
STVLLVMFNKAALSSYNFPFANVITLAQMVFAFIILYVLRSLKIISFTAGESLSSSKNTIIFVSYRTLAQTLPLALTYLLFMVVTMEAVRGINIPMYTTLRRTVVAFTMVMEYFLSGQTHSRFVVGSVGIIIAGAFVAGARDLAFDAFSYSVVFVENMCKAVYLASVSRVGKSSGLNIFGIVWCNVVICGPILFLWSLLRGDLQATLNFPYFFSRGFQVVMLLSCAFTFFINYIVVLNTTINSALTQAICGNLKDVFTSGIGWLLFGGLPYDLFNILGQVLGFLGSCLYAYCKLMQAV

SEQ ID NO: 58868 - protein, 292 aa, Glycine max
  peptide (1)..(292): Ceres Seq. ID no. 14313105
MFNKAALSSYNFPFANVITLAQMVFAFIILYVLRSLKIISFTAGESLSSSKNTIIFVSYRTLAQTLPLALTYLLFMVVTMEAVRGINIPMYTTLRRTVVAFTMVMEYFLSGQTHSRFVVGSVGIIIAGAFVAGARDLAFDAFSYSVVFVENMCKAVYLASVSRVGKSSGLNIFGIVWCNVVICGPILFLWSLLRGDLQATLNFPYFFSRGFQVVMLLSCAFTFFINYIVVLNTTINSALTQAICGNLKDVFTSGIGWLLFGGLPYDLFNILGQVLGFLGSCLYAYCKLMQAV

SEQ ID NO: 58869 - protein, 270 aa, Glycine max
  peptide (1)..(270): Ceres Seq. ID no. 14313106
MVFAFIILYVLRSLKIISFTAGESLSSSKNTIIFVSYRTLAQTLPLALTYLLFMVVTMEAVRGINIPMYTTLRRTVVAFTMVMEYFLSGQTHSRFVVGSVGIIIAGAFVAGARDLAFDAFSYSVVFVENMCKAVYLASVSRVGKSSGLNIFGIVWCNVVICGPILFLWSLLRGDLQATLNFPYFFSRGFQVVMLLSCAFTFFINYIVVLNTTINSALTQAICGNLKDVFTSGIGWLLFGGLPYDLFNILGQVLGFLGSCLYAYCKLMQAV

SEQ ID NO: 58870 - DNA, 1078 bp, Glycine max
  misc_feature (1)..(1078): Ceres Seq. ID no. 14313088
gtcggttacagagataataatcctgcagcactttcagactttctgcaatctgtgcactgtttaattccatattatcctttatctatctctttatctctcttctgcaaagtgcaaaccctacttactactttcacagctcctacctcctattcctctcccttcccatactctctgctcctaactttttctctcttctcccctttcttccattcctccttgtctctcgcaacgcgaaattcatggacgtggacatactgaaaacttccacgagtgacaacatcagcatggacatgatgatgacgatgatgcaaatggaaaagttccctgaattttgtgaacctttttataacaacaacaacaacactagtactgctcctctctacccagaaaacgagctcttaataaactccaccaccactctacccgtgttctccaacgttattaacaacccaaacgttataactccaccaccatcttcctctaattttattcaacaacaacccatgacaccccatcttgaacccaacttggagaagaggaattctgtggcggctatgagggagatgattttccgcgtagcagtgatgcaacctattcatatagaccctgaatccatcaagccaccgaagagaaggaacgtgaagatttcaaaagatccgcagagtgtggcggcgaggcacagaagagaaaggataagcgagagaataaggatacttcagagattagttcctggtgggaccaaaatggacacggcttctatgttggatgaagccattcactacgtgaagttcttgaagaagcaagtgcagacgctggaacaagcaggggcaagtagacccttgaatgttgttggcttccctactactgcgtccaacgccaataataataatagttattctggttttgtgaagagttgtcagccttatccaatgctgggttctgcagcttctaaacaattgcttagttgagaagtgtttgtttgatacatgcatgaaaaatgaaaatcaatgaattatatatgtggtttttattttattttttatcttcatagtattgtgatcgatcgtgcatggattat

SEQ ID NO: 58871 - protein, 242 aa, Glycine max
  peptide (1)..(242): Ceres Seq. ID no. 14313089
MDVDILKTSTSDNISMDMMMTMMQMEKFPEFCEPFYNNNNNTSTAPLYPENELLINSTTTLPVFSNVINNPNVITPPPSSSNFIQQQPMTPHLEPNLEKRNSVAAMREMIFRVAVMQPIHIDPESIKPPKRRNVKISKDPQSVAARHRRERISERIRILQRLVPGGTKMDTASMLDEAIHYVKFLKKQVQTLEQAGASRPLNVVGFPTTASNANNNNSYSGFVKSCQPYPMLGSAASKQLLS

SEQ ID NO: 58872 - protein, 227 aa, Glycine max
  peptide (1)..(227): Ceres Seq. ID no. 14313090
MDMMMTMMQMEKFPEFCEPFYNNNNNTSTAPLYPENELLINSTTTLPVFSNVINNPNVITPPPSSSNFIQQQPMTPHLEPNLEKRNSVAAMREMIFRVAVMQPIHIDPESIKPPKRRNVKISKDPQSVAARHRRERISERIRILQRLVPGGTKMDTASMLDEAIHYVKFLKKQVQTLEQAGASRPLNVVGFPTTASNANNNNSYSGFVKSCQPYPMLGSAASKQLLS

SEQ ID NO: 58873 - protein, 225 aa, Glycine max
  peptide (1)..(225): Ceres Seq. ID no. 14313091
MMMTMMQMEKFPEFCEPFYNNNNNTSTAPLYPENELLINSTTTLPVFSNVINNPNVITPPPSSSNFIQQQPMTPHLEPNLEKRNSVAAMREMIFRVAVMQPIHIDPESIKPPKRRNVKISKDPQSVAARHRRERISERIRILQRLVPGGTKMDTASMLDEAIHYVKFLKKQVQTLEQAGASRPLNVVGFPTTASNANNNNSYSGFVKSCQPYPMLGSAASKQLLS

SEQ ID NO: 58874 - protein, 218 aa, Glycine max
  peptide (1)..(218): Ceres Seq. ID no. 14313092
MEKFPEFCEPFYNNNNNTSTAPLYPENELLINSTTTLPVFSNVINNPNVITPPPSSSNFIQQQPMTPHLEPNLEKRNSVAAMREMIFRVAVMQPIHIDPESIKPPKRRNVKISKDPQSVAARHRRERISERIRILQRLVPGGTKMDTASMLDEAIHYVKFLKKQVQTLEQAGASRPLNVVGFPTTASNANNNNSYSGFVKSCQPYPMLGSAASKQLLS

SEQ ID NO: 58875 - DNA, 1393 bp, Glycine max
  misc_feature (1)..(1393): Ceres Seq. ID no. 14307526
aacacaacaacacacgttgtacagtgtgatgcccaaaccgagaccacttcgaaagagcgaaacgcagtgttagcattgttcctcaacaaaaaaaaaaaaaaaagaagaaaaaagactcagttgtgtatcgttgcagctctactagctagggtttcgcaagtgcgatcgaagaagaacgatggcgatggctgctgctctgcgtcgcgaaggaaggcgtttgacccaaccaatcaacgccctccgttcctctctcatctctcaagaccaatcccctcatggcgcgcgcttcatttccactcaagtggtgagaaaccgaatgaagagtgtgaggaatatccagaagatcaccaaggccatgaagatggttgccgcatccaagctgagagccgttcagaccagagctgaaaattcccgcggcctctggcagccgttcaccgctcttctcggcgacaatcccagtgctgatgttaagaaaaacgttgttgttaccatctcttcggacaaaggtctttgtggtggaatcaattccacgtctgtcaagataagcagggttttgtacaaattgaattctgggcctgataaagagacaaaatatgtcatattgggagagaaggctaaagctcaattgttgcgtgactcaaggaaacacattgtgctcagccttactgaattgcagaaaaatcccctgaattacactcaggtgtctgtcttggcagatgacattctaaagaatgtggagtatgacgcattaaggattgttttcaacaaatttcattctgttgtacaatttttgccaacagtgtcaactgtactgtctcctgaggttattgagagagaggctgaatcaggaggaaagctcggggaattggattcatatgagattgaaggtggcgaaacaaaagctgaaattcttcagaatctggctgagttccagttttcttgtgtgatgtacaatgccgtgttggagaatgcctgtagtgagcaaggagcaagaatgtctgcaatggacagctctagcaggaatgctggggatatgcttgatcgtctcacgctcacctataacagaactcgtcaagcatcaatcaccactgaattgatagagattatctctggagcttcagcactggaaggctaattgcaggagagcaatatgtaattattcagcagtctcccataccttcgcatagcgaagagcctctgggcaatggggtacgaagtttttttataatatcgttgtgttcttttgaaatttgttggtgccacatttttttgatcttacctcgactcctgtaataagtgttccaaggtcaaacccatgatgaggattttcctagttgaggctagatatttctggaattatgtttttgaattaaagatggagtctgtctttttt

SEQ ID NO: 58876 - protein, 318 aa, Glycine max
  peptide (1)..(318): Ceres Seq. ID no. 14307527
MAMAAALRREGRRLTQPINALRSSLISQDQSPHGARFISTQVVRNRMKSVRNIQKITKAMKMVAASKLRAVQTRAENSRGLWQPFTALLGDNPSADVKKNVVVTISSDKGLCGGINSTSVKISRVLYKLNSGPDKETKYVILGEKAKAQLLRDSRKHIVLSLTELQKNPLNYTQVSVLADDILKNVEYDALRIVFNKFHSVVQFLPTVSTVLSPEVIEREAESGGKLGELDSYEIEGGETKAEILQNLAEFQFSCVMYNAVLENACSEQGARMSAMDSSSRNAGDMLDRLTLTYNRTRQASITTELIEIISGASALEG

SEQ ID NO: 58877 - protein, 316 aa, Glycine max
  peptide (1)..(316): Ceres Seq. ID no. 14307528
MAAALRREGRRLTQPINALRSSLISQDQSPHGARFISTQVVRNRMKSVRNIQKITKAMKMVAASKLRAVQTRAENSRGLWQPFTALLGDNPSADVKKNVVVTISSDKGLCGGINSTSVKISRVLYKLNSGPDKETKYVILGEKAKAQLLRDSRKHIVLSLTELQKNPLNYTQVSVLADDILKNVEYDALRIVFNKFHSVVQFLPTVSTVLSPEVIEREAESGGKLGELDSYEIEGGETKAEILQNLAEFQFSCVMYNAVLENACSEQGARMSAMDSSSRNAGDMLDRLTLTYNRTRQASITTELIEIISGASALEG

SEQ ID NO: 58878 - protein, 272 aa, Glycine max
  peptide (1)..(272): Ceres Seq. ID no. 14307529
MKSVRNIQKITKAMKMVAASKLRAVQTRAENSRGLWQPFTALLGDNPSADVKKNVVVTISSDKGLCGGINSTSVKISRVLYKLNSGPDKETKYVILGEKAKAQLLRDSRKHIVLSLTELQKNPLNYTQVSVLADDILKNVEYDALRIVFNKFHSVVQFLPTVSTVLSPEVIEREAESGGKLGELDSYEIEGGETKAEILQNLAEFQFSCVMYNAVLENACSEQGARMSAMDSSSRNAGDMLDRLTLTYNRTRQASITTELIEIISGASALEG

SEQ ID NO: 58879 - DNA, 1766 bp, Glycine max
  misc_feature (1)..(1766): Ceres Seq. ID no. 15226449
attctccatttccacactctcatcagattcgggtcgggttagcgttatcggataacttcgcccataaattctctgtttacggggcgaaaatgacagtattcttagccacgaggctcgtgtttcggagatccccgccgcttctctggcggcgcagcttttctcgggcggcggtagaggccgaaaaggacatgttgccgtgccgtcgcttccgttgttcgattactctccgcctccgtatgcggggcccaccgctgacgagattctggcaaagcgcagggagtatctgagtccttccatcttgcacttctacaagaatcccgtgaacatagtggagggtaagaagcagtacctgtttgacgagaaggggagaaggtacgtggatgcgtttggagggattgctacggtgtgctgcgggcactgtcaccctgatgtggtcgaagccatagtcaaccaaaccaaaaagttgcagcactccacagttctctaccttaacaacgccatcgccgatttcgctcaagctttgacttccaagcttcccggtaatctcaaggtggtgtttttcacaaactctggaacagaagcaaacgaattggcgatactgattgcaaggttatacacagggtgtcatgacataatatctctaaggaatgcttatcatggtaatgcagctgggacaatgggagctacagctcaaagcatctggaaatttaatgtagtacagagtggtgttcatcatgcagtgaatccagacccttatagaggcattttcggttctgatggagagaagtatgcaagagatgtacaagatatcattaacttcggaacttctggaaatgttgcagccttcatttctgaagccatacagggagtggggggtatcattgaattggctcctggttacttgccagctgtgtacaataccattaaaaaagcaggaggacttttcatagctgatgaggttcaggctggctttggtcgcactggtagccatttctggggatttgaggcccacaatgttgttcctgacatagtgacaatggctaagggcattggaaatgtcattcctcttggtgctgttgtaactactccagagatcgcagaggtcttaacccgccggagctactttaacacatttggtggcaaccctgtttgtactgctgcagggttggctgttttaaaagtaatagagaaagagcagcttcaacaaaacgcgtttgtggttggatcctatttgaaagaaaggctcactgccctcaaggacaaatatgaattaattggtgatgtgaggggaagaggcctaatgctaggagttgaacttgtcactgatcgtgaacttaaaattccagcaaaaggtgaaacgctgcatgtaatggaccaaatgaaagaattaggagtacttattggtaagggtggttactatggaaatgtcttcagaattacacccccgttgtgtttcaccaaagaagatgcagactttgtagcagacgcaatggacttgaccttgtctagaatgtgaagctgagccaagatcctagctttaataaaagtctattatatcataaatgaaactgtattatctcatctccatagctggtaaaaattacatagatgcagacttatatagctaaaatagcagaccaatctactgtgatcttaggctatgcatgagccaacaactcgttgtctcttgtttgatgtttatctttccaaatgaatgagccaacaactcgttgtctcttgctttgtcgtcaaaaaaaaaaaaaaaa

SEQ ID NO: 58880 - protein, 279 aa, Glycine max
  peptide (1)..(279): Ceres Seq. ID no. 15226450
MGATAQSIWKFNVVQSGVHHAVNPDPYRGIFGSDGEKYARDVQDIINFGTSGNVAAFISEAIQGVGGIIELAPGYLPAVYNTIKKAGGLFIADEVQAGFGRTGSHFWGFEAHNVVPDIVTMAKGIGNVIPLGAVVTTPEIAEVLTRRSYFNTFGGNPVCTAAGLAVLKVIEKEQLQQNAFVVGSYLKERLTALKDKYELIGDVRGRGLMLGVELVTDRELKIPAKGETLHVMDQMKELGVLIGKGGYYGNVFRITPPLCFTKEDADFVADAMDLTLSRM

SEQ ID NO: 58881 - protein, 159 aa, Glycine max
  peptide (1)..(159): Ceres Seq. ID no. 15226451
MAKGIGNVIPLGAVVTTPEIAEVLTRRSYFNTFGGNPVCTAAGLAVLKVIEKEQLQQNAFVVGSYLKERLTALKDKYELIGDVRGRGLMLGVELVTDRELKIPAKGETLHVMDQMKELGVLIGKGGYYGNVFRITPPLCFTKEDADFVADAMDLTLSRM

SEQ ID NO: 58882 - DNA, 1343 bp, Glycine max
  misc_feature (1)..(1343): Ceres Seq. ID no. 13594185
gccttagtctgtgttgagacttgagagtaaggtttcaaattgaaaccttttttttcagtagtttttcacttgcgtatatcactatattcgttgtgttctgtaggttgtgtgcataacacaatcaattaagaagctgtgattctgattcagaatcagaatgttgcgaagatggagcaaagcagttactccaatctccaaatttggatcgcagcagagtcatttgaatttcgtgaaggacgtcacgcgccaaagctacgccggggttgcacccgcgccaacaacgatagaggataaacctcaaccccccgtggttaaacttgacaaaatgttttggtctaagccctgttcgctggccctgccccgggactcacccctcaaagctgaagaacctgattatcagggcatcaagcgtttcatgctcaagctcatgctgttttatagtaagcagagcaagtcaattcgaggcgctaatgttgtgtaccgaagaattgtttctcaaattgataaacctcccatttatgaagtgtttaacttggagaaaacattcaaaacaacattctctttacttgtacttcatatgtggttatgtttgcgtcgcttgaagcaagagggaaatgagggtgttgaatttggccagtacctttatgagatttacaatcatgatgtggagctaagagtctctaaagctggagttaacctactactgactaagtggatgaaagagctcgagaagattttttatgggaacattgttgcttatgatactgccatacttccagaagctaaaccgggtgatttttctaatgttatatggaggaatatattctctgaagatggttcttcaacaccagatgctgctgcatctcaatcagtacaggcgatggccagatatgctcgccgtgaagtaagttgcatgaccttaacagataaagaagcactatattcagggaattttatgttcacctctttgaagcatgagaacagaagcggaaaggggcctcaatgatgaagtggtgatttctaaatttgtgatttagcaaattgaaaatacacgctgttcttattttatttattttttacaaaaaaattgttgaataattatgacataaagctcatgtccttctccgtaaggcttttattatacttgattagcttggtgcccagaaactagaactctcatattcttgccctgtaaaatgagaaaagaaaaagggcagaagtgactgaaaaatgttgttctttctcatttttggtcatctgttcctctttactttgctttaacggcttcaatggtttgcctttgttatttgagacattacaaattttcaatacaatgcaatatt

SEQ ID NO: 58883 - protein, 282 aa, Glycine max; identical to SEQ ID NO: 57785
  peptide (1)..(282): Ceres Seq. ID no. 13594186

SEQ ID NO: 58884 - protein, 226 aa, Glycine max; identical to SEQ ID NO: 57786
  peptide (1)..(226): Ceres Seq. ID no. 13594187

SEQ ID NO: 58885 - protein, 196 aa, Glycine max; identical to SEQ ID NO: 57787
  peptide (1)..(196): Ceres Seq. ID no. 13594188

SEQ ID NO: 58886 - DNA, 1518 bp, Glycine max
  misc_feature (1)..(1518): Ceres Seq. ID no. 13594151
attcacccaacacttcaactccatcttcttccatccatttcctctttctcgatctgttccaaattcacttcacacacaggaaagaagatggagactcgcgccgccgcaaagagaaaggcaaatgccgccaccatagtctttgtcgaaaaacaataccccaacaagaggcagcgggttgtgttgggtgaacttcccaatttacaaaaccttattgtctccgaaactcaaaattcgcgcaaagagaagctcctatgtcggaagaatcccaatgagaagaaaccatcacccacaaacaacaacacctttccttcccctcagatcaacgaatcttatgattcggatatccacgggtatcttcgtgaaatggagatgcagaataagagaagaccaatggttgactacattgaaaaggttcagaaaattgttaccccaaccatgagagcaatattggtggattggttagtggaggtagctgtggagtacaagcttctatcggatactcttcatctctctgtatcatacatcgataggtttttatcagttaatccagtcagtaaatccagacttcagttactgggtgtttcgtccatgctcattgctgcaaaatatgaggagatggatccacctggtgtggacgagttttgcagcatcactgatcacacttatgacaagacagaggttgtgaagatggaagctgacatacttaagtccctaatgtttgaaatgggaaatcctactgtaagcacctttctaaggaggtatgctgatgttgcttctaatgaccaaaaaactccaaatttgcagattgaatttttgggcagctatattggcgagctaagtttgttggactatgattgtttaagattcttgccttctattgtggctgcctcggttatatttcttgccaagttcattatctgtcctgaagtgcatccatggacttcttccttgtgtgaatgctcgggttacaagccagctgagttgaaagaatgtgtccttatcttgcatgacttgtatttgtcaagaaaggcagcatccttcaaagctgttcgggcaaaatacaagcagcaaaagttcgaatgtgtggcaaacctgcctacccctccatatgtaccgagttgttactttgaagaccagtggtgcagtgaattccttgataaatgatcaaaccgaccattgcttgcatgggcatggcttagaaatttgatgcgtaggtttttgtctttgaattgcaagagcaacaggatttcattagataccaaagttcaattcccattcctgatgaactatcagggagaagacctttaaataaggatcaaataacaagatcttagaatgtacaactgcatacttgcaacatgtattaggagaattacggtgtaggatgaaccgaaaattgcattgttcttacagagaatttttatcttagtgaagtagtttttagacatatttgttaggaattttataatttttaattaattaatatggattatatattataaaaaaaaaaaaaaaaaa

SEQ ID NO: 58887 - protein, 387 aa, Glycine max
  peptide (1)..(387): Ceres Seq. ID no. 13594152
IHPTLQLHLLPSISSFSICSKFTSHTGKKMETRAAAKRKANAATIVFVEKQYPNKRQRVVLGELPNLQNLIVSETQNSRKEKLLCRKNPNEKKPSPTNNNTFPSPQINESYDSDIHGYLREMEMQNKRRPMVDYIEKVQKIVTPTMRAILVDWLVEVAVEYKLLSDTLHLSVSYIDRFLSVNPVSKSRLQLLGVSSMLIAAKYEEMDPPGVDEFCSITDHTYDKTEVVKMEADILKSLMFEMGNPTVSTFLRRYADVASNDQKTPNLQIEFLGSYIGELSLLDYDCLRFLPSIVAASVIFLAKFIICPEVHPWTSSLCECSGYKPAELKECVLILHDLYLSRKAASFKAVRAKYKQQKFECVANLPTPPYVPSCYFEDQWCSEFLDK

SEQ ID NO: 58888 - protein, 358 aa, Glycine max
  peptide (1)..(358): Ceres Seq. ID no. 13594153
METRAAAKRKANAATIVFVEKQYPNKRQRVVLGELPNLQNLIVSETQNSRKEKLLCRKNPNEKKPSPTNNNTFPSPQINESYDSDIHGYLREMEMQNKRRPMVDYIEKVQKIVTPTMRAILVDWLVEVAVEYKLLSDTLHLSVSYIDRFLSVNPVSKSRLQLLGVSSMLIAAKYEEMDPPGVDEFCSITDHTYDKTEVVKMEADILKSLMFEMGNPTVSTFLRRYADVASNDQKTPNLQIEFLGSYIGELSLLDYDCLRFLPSIVAASVIFLAKFIICPEVHPWTSSLCECSGYKPAELKECVLILHDLYLSRKAASFKAVRAKYKQQKFECVANLPTPPYVPSCYFEDQWCSEFLDK

SEQ ID NO: 58889 - protein, 266 aa, Glycine max
  peptide (1)..(266): Ceres Seq. ID no. 13594154
MEMQNKRRPMVDYIEKVQKIVTPTMRAILVDWLVEVAVEYKLLSDTLHLSVSYIDRFLSVNPVSKSRLQLLGVSSMLIAAKYEEMDPPGVDEFCSITDHTYDKTEVVKMEADILKSLMFEMGNPTVSTFLRRYADVASNDQKTPNLQIEFLGSYIGELSLLDYDCLRFLPSIVAASVIFLAKFIICPEVHPWTSSLCECSGYKPAELKECVLILHDLYLSRKAASFKAVRAKYKQQKFECVANLPTPPYVPSCYFEDQWCSEFLDK

SEQ ID NO: 58890 - DNA, 2021 bp, Glycine max
  misc_feature (1)..(2021): Ceres Seq. ID no. 13594189
gaaaaactactttctgagacaacgacgacgttgtatagcagtccttcttcttctttctgtgttgacggtggcgttgatctgattggaattcaggatcaatggcaggggcagcctctgctctgttcctcctcgacatcaaaggccgcgtcctcatctggcgcgactaccgcggcgacgtctccgccctcgacgccgaacgcttcttcaccaaactcatcgaaaaacaggccgatccgcaagctcaagatccggttgtgcacgacaacggcgtgacctacatgttcatccagcacagcaacgtctacctcatgatagccaccagacataactgcaatgccgccagcctcctctttttcctgcaccgcatcgtcgatgtgtttaagcactactttgaagaattggaagaggaatcgcttcgggacaatttcgtcgtcgtgtatgagctacttgatgagattatggactttggctaccctcagtacaccgaggcgcagattcttagtgagtttattaagactgatgcttatagaatggaagttacgcagagacctcccatggctgtgactaatgccgtgtcgtggcgcagcgaagggataaactataagaaaaatgaggttttcttggatgtggtggagagtgttaatatacttgtcaatagcaatggacaaataattagatctgacgtcgttggggctttgaagatgagaacgtatttgagtggtatgcctgagtgcaaacttggtttaaatgatagagtattgttagaggcgcaaggtagaacaaccaagggaaaggctattgacttggaagacataaaatttcatcagtgtgtgcgtttggctcgatttgaaaacgatcgaacaatttcctttataccacctgatggatcgtttgatttgatgacatacaggctcagtacacaggttaagcctttaatttgggtggaagcaaatgttgaaaagcattcaaagagtcggattgagattatggtaaaagctaggagtcaatttaaggaacgtagcactgccacaaacgttgagattgagttgcctgtgcctgttgatgcaaccaatcctaatgttcgaacttcaatgggatctgcatcatatgcacccgaaaaagatgcgttaatctggaaaattagatccttccccggaggcaaggagtatatgttaagagcagagtttcatcttcccagtataacagatgaggaagcaactcctgagagaaaagctcctatacgtgtgaaatttgaaataccatattttactgtttctggaatacaggtaagatatttgaagattattgagaaaagtgggtatcaggctcttccatgggtgagatacataacgatggctggagagtatgaattgaggcttatttaagaatttgtatctttctttggtgctggaattccaccaaataatcgtgccaacttccatgatcaatggttttaaactggtggatgggagagggactcttgagtaaaattagagtttatttggcctgatcatatctcctcttgcgtcatgatagttttggcaacagatcgtaaattgctcattgtccgtaaagttcataacttcaagtcaggaattggcaagtgtaaggctgtatcttctgtgtaagtcctttttgttcaaatctgtttgttgggaaaatgtctgatttttttttcctcttgttttcttttcttttatttacgatctgtcaatctttgccattgtcttcaatttgatttatttgtaagagaattattagcttttgtattactaagattgaatattttccccatctttatttgtattcataacctgacccatcttgtgtattaatatggtgccatatccctccctttctgaacaaaaaccatgtatttttttaccattcattcaaaaagttgattgcaggtcaatggcagaaaagaaaaaaaaaaaaaaaaaaaaaaaaaaaaaaaaccaaaaaaaaaaaaaaaaaagcttatcgataccgtcgacctcgagggggggcccggtacccaa

SEQ ID NO: 58891 - protein, 428 aa, Glycine max
  peptide (1)..(428): Ceres Seq. ID no. 13594190
MAGAASALFLLDIKGRVLIWRDYRGDVSALDAERFFTKLIEKQADPQAQDPVVHDNGVTYMFIQHSNVYLMIATRHNCNAASLLFFLHRIVDVFKHYFEELEEESLRDNFVVVYELLDEIMDFGYPQYTEAQILSEFIKTDAYRMEVTQRPPMAVTNAVSWRSEGINYKKNEVFLDVVESVNILVNSNGQIIRSDVVGALKMRTYLSGMPECKLGLNDRVLLEAQGRTTKGKAIDLEDIKFHQCVRLARFENDRTISFIPPDGSFDLMTYRLSTQVKPLIWVEANVEKHSKSRIEIMVKARSQFKERSTATNVEIELPVPVDATNPNVRTSMGSASYAPEKDALIWKIRSFPGGKEYMLRAEFHLPSITDEEATPERKAPIRVKFEIPYFTVSGIQVRYLKIIEKSGYQALPWVRYITMAGEYELRLI

SEQ ID NO: 58892 - protein, 368 aa, Glycine max
  peptide (1)..(368): Ceres Seq. ID no. 13594191
MFIQHSNVYLMIATRHNCNAASLLFFLHRIVDVFKHYFEELEEESLRDNFVVVYELLDEIMDFGYPQYTEAQILSEFIKTDAYRMEVTQRPPMAVTNAVSWRSEGINYKKNEVFLDVVESVNILVNSNGQIIRSDVVGALKMRTYLSGMPECKLGLNDRVLLEAQGRTTKGKAIDLEDIKFHQCVRLARFENDRTISFIPPDGSFDLMTYRLSTQVKPLIWVEANVEKHSKSRIEIMVKARSQFKERSTATNVEIELPVPVDATNPNVRTSMGSASYAPEKDALIWKIRSFPGGKEYMLRAEFHLPSITDEEATPERKAPIRVKFEIPYFTVSGIQVRYLKIIEKSGYQALPWVRYITMAGEYELRLI

SEQ ID NO: 58893 - protein, 358 aa, Glycine max
  peptide (1)..(358): Ceres Seq. ID no. 13594192
MIATRHNCNAASLLFFLHRIVDVFKHYFEELEEESLRDNFVVVYELLDEIMDFGYPQYTEAQILSEFIKTDAYRMEVTQRPPMAVTNAVSWRSEGINYKKNEVFLDVVESVNILVNSNGQIIRSDVVGALKMRTYLSGMPECKLGLNDRVLLEAQGRTTKGKAIDLEDIKFHQCVRLARFENDRTISFIPPDGSFDLMTYRLSTQVKPLIWVEANVEKHSKSRIEIMVKARSQFKERSTATNVEIELPVPVDATNPNVRTSMGSASYAPEKDALIWKIRSFPGGKEYMLRAEFHLPSITDEEATPERKAPIRVKFEIPYFTVSGIQVRYLKIIEKSGYQALPWVRYITMAGEYELRLI

SEQ ID NO: 58894 - DNA, 1618 bp, Glycine max
  misc_feature (1)..(1618): Ceres Seq. ID no. 15177783
aactactaaagggataaaatatgactactattagtgatgatcagtgattagtgtgattagtgcgtgcgattcattgtgtttgtgtagtagtgagtgactttgggttgggtttcgtctcaactcaacaaacgtcgtcgttctcccatttccaatctttctccaatggcttcttctgcttccttaatcaactcgttgacttgctcttcgcctgcacccactcagcactgtttcgccttcacccgcaccaccgccaccgctaccgccacgtcactgagacaattcaacagccaccgtccgcccccactcaccacgaggatctcctcgtcgccttccaccgttgtctgcaaagctgtctccgttaagccccaaaccgaaaccgaaggtctcaacattgctgacgatgtcacacagctcatagggaaaacgccgatggtttacctcaacaatatcgtgaagggttctgtggccaatattgctgcgaagcttgagattatggagccctgttgtagtgtcaaggacaggattggttttagtatgataaatgatgctgagcagagaggagctataacacctgggaagagtatattggtggaacctactagtgggaacacaggaattggtcttgcctttatagcagcttcaagaggatataagctaattttgacaatgcctgcttcaatgagtttagaaagacgggttcttttgaaagcatttggggccgagcttgttttgactgatgcagcaaagggcatgaatggagcagtacaaaaagctgaagaaattttaaaaagtacccccaattcatacatgcttcaacaatttgataatccttcaaatcctaaggttcattatgagacaactggcccggagatatgggaagatactagaggaaagatagatattttagttgcaggaattggaaccggtggaactgtttctggagctggccaattcctaaaacaacaaaatccgaaaatacaggttattggcgtagagcctctggaaagcaacatacttacaggtggaaagccaggacctcacaaaattcagggtattggggctggttttgtgcccaggaatttggatcaagatgtgcttgatgaagttatagcgatatcaagtgatgaagcagttgaaactgcaaagcaattagcactccaggaaggcttgctggtgggaatttcttcaggagctgcagctgcagctgctttgaaggttggaaagaggcctgagaatgcaggaaagcttattggggttgtcttcccaagctttggtgaaagatatttgtcaactattcttttccagtcaatacgggaagaatgcgagaaaatgcaacctgagccatgaattgactttgcttgttaatgtttcatactcattttccacaagtatctgtatggaatgacagtgtcagatgtccatgttatgcccgtgtttctcatttttgacactcaagaaattagataactgtgtacaggtcattgatttgacttacaacacagattaatgacccttgattgaagaaattttagatgtaataattattggcattgatgacaacgtagcaaatttctgccttatgttcgctattaaaaaataattgatgaaacagtttatc

SEQ ID NO: 58895 - protein, 394 aa, Glycine max
  peptide (1)..(394): Ceres Seq. ID no. 15177784
MASSASLINSLTCSSPAPTQHCFAFTRTTATATATSLRQFNSHRPPPLTTRISSSPSTVVCKAVSVKPQTETEGLNIADDVTQLIGKTPMVYLNNIVKGSVANIAAKLEIMEPCCSVKDRIGFSMINDAEQRGAITPGKSILVEPTSGNTGIGLAFIAASRGYKLILTMPASMSLERRVLLKAFGAELVLTDAAKGMNGAVQKAEEILKSTPNSYMLQQFDNPSNPKVHYETTGPEIWEDTRGKIDILVAGIGTGGTVSGAGQFLKQQNPKIQVIGVEPLESNILTGGKPGPHKIQGIGAGFVPRNLDQDVLDEVIAISSDEAVETAKQLALQEGLLVGISSGAAAAAALKVGKRPENAGKLIGVVFPSFGERYLSTILFQSIREECEKMQPEP

SEQ ID NO: 58896 - protein, 305 aa, Glycine max
  peptide (1)..(305): Ceres Seq. ID no. 15177785
MVYLNNIVKGSVANIAAKLEIMEPCCSVKDRIGFSMINDAEQRGAITPGKSILVEPTSGNTGIGLAFIAASRGYKLILTMPASMSLERRVLLKAFGAELVLTDAAKGMNGAVQKAEEILKSTPNSYMLQQFDNPSNPKVHYETTGPEIWEDTRGKIDILVAGIGTGGTVSGAGQFLKQQNPKIQVIGVEPLESNILTGGKPGPHKIQGIGAGFVPRNLDQDVLDEVIAISSDEAVETAKQLALQEGLLVGISSGAAAAAALKVGKRPENAGKLIGVVFPSFGERYLSTILFQSIREECEKMQPEP

SEQ ID NO: 58897 - protein, 284 aa, Glycine max
  peptide (1)..(284): Ceres Seq. ID no. 15177786
MEPCCSVKDRIGFSMINDAEQRGAITPGKSILVEPTSGNTGIGLAFIAASRGYKLILTMPASMSLERRVLLKAFGAELVLTDAAKGMNGAVQKAEEILKSTPNSYMLQQFDNPSNPKVHYETTGPEIWEDTRGKIDILVAGIGTGGTVSGAGQFLKQQNPKIQVIGVEPLESNILTGGKPGPHKIQGIGAGFVPRNLDQDVLDEVIAISSDEAVETAKQLALQEGLLVGISSGAAAAAALKVGKRPENAGKLIGVVFPSFGERYLSTILFQSIREECEKMQPEP

SEQ ID NO: 58898 - DNA, 1842 bp, Glycine max
  misc_feature (1)..(1842): Ceres Seq. ID no. 14308540
ttaatcaatactttatgcacttttgttactagcacatgtgattgatattgaattgctctgctgttggatctctgcactggaaatttgtttcattttatatgttctaaacacggcttaggaaacctggcatgggagttattactgtttctacctcagctgctaggactccattaagattgaatacaaggttgatcagtcatcagcaggagaaaattcctctacccctagaaacagcgaagaaacaccagaaaagagtaggaaagactagtgagtcactgaagagagtgagagccgtctctactgttgaaacctctccatgcaccttggatgtggactacaatgaagctgcagccaaacttgaaaatatatataaactcagccctgtatctgatacctgtaatgtggaagatatagatagtaaaatcgagagagtcttgcggaggaggaagaaggttagtgaggaacgtgatgatggaaattgtgataatgtggttagaaaccagaataagaaggccaaacgattgagtcttgataagaggattgcattgaaaaataatgcaaaggaggaggtgattgatcaaactcagaagaaaaggaatgttaagaatagagtacaaaatattgatgtgcttatcagggattattcagcatcaactgatttagttagcatggactggaagaaaatgaagattccgccagttcttccttcttcagaacatgcatggttgttcaagttgatgcagccaatgaaggcactcctacaagcaaaagaagatttaaaggaagtggataaagaaattacaggtggtgaactagctgatgcaacaaacatgagtattattcaagtaaggaaagctatagaggttggtcgagctgcgagaaacaaactcataaagcacaatctccggcttgtattgttcgtgatcaacaaatattttcaagattttgcaagtggcccgaggtttcaagatctttgtcaggcaggagttaagggacttatcacagcaattgatcgttttgagccaaaaagaagacttcagctatctacatacagtttattttggataagacattctatcgttcgttccataaccctctcaagcttcacacgtgttccttttggacttgaaagggttagagtagatatccaaagaacaaaacttaagttaacatttgagctccagaggtcaccaacggaagaagagttagtagaaagaattgggatctcacttgaaagatatcatgaagtaatgaaggcatcaaaacccattttatcccttcattcaagacatataaccacgcaagaggagtatattaatgggattactgatgttgatggtgttaatggtgataataggaggcaacttgctgttctaagacttgctcttgatgatgtgcttgattccctgaagccaaaggagagcctagtgatcaggcagagatatggacttgatggcaagggtgacagaacattgggagaaattgctgggaacttgaatatttctagggaaattgtccggaagcatgaagtcaaagctctcatgaagcttaagcatccagctcggttggattatcttcgtcgttatgttgtataaattaacaaatatatatatatgcttccattggtgtcattttagtcccacgtacgctacctatagccatgcccttgataattctcataacaattatttaagtatacaaaattataatcatttgtcatgtaatttgtatatgaaggagttattgctcataagaaataacaacccaatacatgttacatgtaatgtgttgtgttcatgaattacattccaaattatataatagttgctagagttcatgtcg

SEQ ID NO: 58899 - protein, 488 aa, Glycine max
  peptide (1)..(488): Ceres Seq. ID no. 14308541
MGVITVSTSAARTPLRLNTRLISHQQEKIPLPLETAKKHQKRVGKTSESLKRVRAVSTVETSPCTLDVDYNEAAAKLENIYKLSPVSDTCNVEDIDSKIERVLRRRKKVSEERDDGNCDNVVRNQNKKAKRLSLDKRIALKNNAKEEVIDQTQKKRNVKNRVQNIDVLIRDYSASTDLVSMDWKKMKIPPVLPSSEHAWLFKLMQPMKALLQAKEDLKEVDKEITGGELADATNMSIIQVRKAIEVGRAARNKLIKHNLRLVLFVINKYFQDFASGPRFQDLCQAGVKGLITAIDRFEPKRRLQLSTYSLFWIRHSIVRSITLSSFTRVPFGLERVRVDIQRTKLKLTFELQRSPTEEELVERIGISLERYHEVMKASKPILSLHSRHITTQEEYINGITDVDGVNGDNRRQLAVLRLALDDVLDSLKPKESLVIRQRYGLDGKGDRTLGEIAGNLNISREIVRKHEVKALMKLKHPARLDYLRRYVV

SEQ ID NO: 58900 - protein, 308 aa, Glycine max
  peptide (1)..(308): Ceres Seq. ID no. 14308542
MDWKKMKIPPVLPSSEHAWLFKLMQPMKALLQAKEDLKEVDKEITGGELADATNMSIIQVRKAIEVGRAARNKLIKHNLRLVLFVINKYFQDFASGPRFQDLCQAGVKGLITAIDRFEPKRRLQLSTYSLFWIRHSIVRSITLSSFTRVPFGLERVRVDIQRTKLKLTFELQRSPTEEELVERIGISLERYHEVMKASKPILSLHSRHITTQEEYINGITDVDGVNGDNRRQLAVLRLALDDVLDSLKPKESLVIRQRYGLDGKGDRTLGEIAGNLNISREIVRKHEVKALMKLKHPARLDYLRRYVV

SEQ ID NO: 58901 - protein, 303 aa, Glycine max
  peptide (1)..(303): Ceres Seq. ID no. 14308543
MKIPPVLPSSEHAWLFKLMQPMKALLQAKEDLKEVDKEITGGELADATNMSIIQVRKAIEVGRAARNKLIKHNLRLVLFVINKYFQDFASGPRFQDLCQAGVKGLITAIDRFEPKRRLQLSTYSLFWIRHSIVRSITLSSFTRVPFGLERVRVDIQRTKLKLTFELQRSPTEEELVERIGISLERYHEVMKASKPILSLHSRHITTQEEYINGITDVDGVNGDNRRQLAVLRLALDDVLDSLKPKESLVIRQRYGLDGKGDRTLGEIAGNLNISREIVRKHEVKALMKLKHPARLDYLRRYVV

SEQ ID NO: 58902 - DNA, 1607 bp, Glycine max
  misc_feature (1)..(1607): Ceres Seq. ID no. 14313097
aataatagtgcagtgcgtttcagtggtggaaagtggaaaccgtaatcgccaagctggaaagaaaacgctccatttctgcgccactctctgccttatcgccccatttccgttccaacattgtcagagagcaacacagattagtcgtagcagtgagaggcatcggagggggaataaaacatggtttcaacagcaacagaaacagagcaagattagaaagcgccagggtgcgcacgttagcaccgaaccccgtgggttcctctcccctaactcgcttcgcccccacggcattcctacgctgatccacactcaaaacgcatcacaaaaaacaccgtttcgcaaccctaacggaggaggggggtaaaaaaaaaaactgaaaaaaatgtttcggataacgagattctcggggtttttctccgccgcaatgtttgtgattgttcttgttattctctccccctccttccaatccgaagccattcgatcctcccaccgattttccttccggaaagcccctccgttccgcaatgccgccgaatgcggttcaatttccggtgaaaccaccaccgtctgcgacccttccttggtccacgtcgccataaccctcgacgtcgactacctccgcggctcaatcgccgccgtgcactccatcctccacaactccctctgtccggagaacatcttcttccatttcctcgtctccgacaccaacctccaaaccctagttgaatccacgttccctaacttgaagttcaacgtctattacttcgatccgaacatcgtcgctcacttgatctcctcctccgtgcggcaggcgttggagcagcctctcaattacgcgagaaattacctcgttgaccttctggagagttgcgtggagagggtgatctacttggactccgatctggtggtagtggatgacgtggcgaaactgtggagcgcgagtctggactcacgcgccatcggcgcgccggagtactgccacgcgaacttcacgaagtatttcacggcggggttctggtcggagccgaggttgtcggggacgttcgcgcagcggagggcgtgctacttcaacacgggggtgatggtgatggatctggtgaagtggaggaaggaagggtacaccaagagaatcgagaggtggatggagattcagaagagtgataggatctacgagcttggttctctgccgccgtttttgctggtgtttgcgggacacgtggcgcccattgagcaccggtggaaccagcatggtttgggcggggataacgtgaagggtagttgccgtgacttgcaccctggtccggttagtttgttgcattggtctggtagtgggaagccatggatccgtttaagttccaaacgcccctgtcctctggattctctatgggctccctttgatttgtatgcacactcttcctcttaaactaattcttccctctcatttaattcaatttctctttgcttgtcatttttcgctagttagatgttattcatctatttcttctccctaaactttttctccggaaaatttgtatgtcatttctattctattattttcctgtcattcctgatttgaaaataaaagaaaaagaaaagaaagcggattttct

SEQ ID NO: 58903 - protein, 346 aa, Glycine max
  peptide (1)..(346): Ceres Seq. ID no. 14313098
MFRITRFSGFFSAAMFVIVLVILSPSFQSEAIRSSHRFSFRKAPPFRNAAECGSISGETTTVCDPSLVHVAITLDVDYLRGSIAAVHSILHNSLCPENIFFHFLVSDTNLQTLVESTFPNLKFNVYYFDPNIVAHLISSSVRQALEQPLNYARNYLVDLLESCVERVIYLDSDLVVVDDVAKLWSASLDSRAIGAPEYCHANFTKYFTAGFWSEPRLSGTFAQRRACYFNTGVMVMDLVKWRKEGYTKRIERWMEIQKSDRIYELGSLPPFLLVFAGHVAPIEHRWNQHGLGGDNVKGSCRDLHPGPVSLLHWSGSGKPWIRLSSKRPCPLDSLWAPFDLYAHSSS

SEQ ID NO: 58904 - protein, 332 aa, Glycine max
  peptide (1)..(332): Ceres Seq. ID no. 14313099
MFVIVLVILSPSFQSEAIRSSHRFSFRKAPPFRNAAECGSISGETTTVCDPSLVHVAITLDVDYLRGSIAAVHSILHNSLCPENIFFHFLVSDTNLQTLVESTFPNLKFNVYYFDPNIVAHLISSSVRQALEQPLNYARNYLVDLLESCVERVIYLDSDLVVVDDVAKLWSASLDSRAIGAPEYCHANFTKYFTAGFWSEPRLSGTFAQRRACYFNTGVMVMDLVKWRKEGYTKRIERWMEIQKSDRIYELGSLPPFLLVFAGHVAPIEHRWNQHGLGGDNVKGSCRDLHPGPVSLLHWSGSGKPWIRLSSKRPCPLDSLWAPFDLYAHSSS

SEQ ID NO: 58905 - DNA, 1339 bp, Glycine max
  misc_feature (1)..(1339): Ceres Seq. ID no. 14316499
gaatccttcatatcactgccggcgcgcaagagaggaccatccttgttctgccctctacctcgttcatacaaacatttcgcacacgcagctctatctctccacaacacatccaccatgggtctcatcaagggcggcttcttgcgcctgttccaaacactgctatacgcgctctgcttctgctgcgccggcattgccctcggcatctactcatacttcctcgcggtccaagccgatcgcgaccagggcatccccagatggcaaaaggctgttgagggtatctccggcgtggctgttctgtacaccatcgctgccgtggtcctcacttgctgccttggtggtatcagcttcttcgccttcaccgcgattgtccttgacatcctcttcgtcggcggcttcattgccatcgctgttctgacccgccacggtgcttcctcttgcactggcatcgtcaacacccctctcggtatcggcaatgccaacgccaactctgagggcttcggcaacaacggtctcggcactggaaacggcgagaacctcacctacgctgtttctcctcgcaacgcttgccgcatgaacacagccgtcttcgccgtgtctattgttgccgctttcctgttcctcatcaccgctctcttccaagtcttccttgtccgcaagcacaagaaggagaagcgtttcggccctggcccgtccaacaactacaccagcggccctgccaagcgcaacttctggcagcgcaagaagaagaccaacgacagggatcttgagaaggatgtcatcactcccgcaccagctggcaccctcaccactggccatgccaccgacatccgtccctcgcacgacacggcctacactggaagcactgtcgctgcccccggcgacaggtacgacaaggtcgacggcgccaacggctacgctacccagcagcacaccggccacgcggctcacggttcccacggcgcctactacggagctcctcagggaaccgccaacccgtacaccatggacactaatggcgatcacactctgcttcgcgagaacaaccctgtctaccgcggcgttgcttagatcaatgattgtcccatcggcaacacgatcaacaactagacttcgagtctactgacagctagtctttcgggactgatcagctgccttttctttctgtttgctccatgacgcgatttaatgaacaagataccactataatgccacctgtaacataggacttctgaaaagaaggtgatacgaagttgggattggatggtggcgaggagcgatgtttactctaatatatgtaattgcaagaatgacagcggcacctagccgtttaataactaag

SEQ ID NO: 58906 - protein, 355 aa, Glycine max
  peptide (1)..(355): Ceres Seq. ID no. 14316500
ESFISLPARKRGPSLFCPLPRSYKHFAHAALSLHNTSTMGLIKGGFLRLFQTLLYALCFCCAGIALGIYSYFLAVQADRDQGIPRWQKAVEGISGVAVLYTIAAVVLTCCLGGISFFAFTAIVLDILFVGGFIAIAVLTRHGASSCTGIVNTPLGIGNANANSEGFGNNGLGTGNGENLTYAVSPRNACRMNTAVFAVSIVAAFLFLITALFQVFLVRKHKKEKRFGPGPSNNYTSGPAKRNFWQRKKKTNDRDLEKDVITPAPAGTLTTGHATDIRPSHDTAYTGSTVAAPGDRYDKVDGANGYATQQHTGHAAHGSHGAYYGAPQGTANPYTMDTNGDHTLLRENNPVYRGVA

SEQ ID NO: 58907 - protein, 317 aa, Glycine max
  peptide (1)..(317): Ceres Seq. ID no. 14316501
MGLIKGGFLRLFQTLLYALCFCCAGIALGIYSYFLAVQADRDQGIPRWQKAVEGISGVAVLYTIAAVVLTCCLGGISFFAFTAIVLDILFVGGFIAIAVLTRHGASSCTGIVNTPLGIGNANANSEGFGNNGLGTGNGENLTYAVSPRNACRMNTAVFAVSIVAAFLFLITALFQVFLVRKHKKEKRFGPGPSNNYTSGPAKRNFWQRKKKTNDRDLEKDVITPAPAGTLTTGHATDIRPSHDTAYTGSTVAAPGDRYDKVDGANGYATQQHTGHAAHGSHGAYYGAPQGTANPYTMDTNGDHTLLRENNPVYRGVA

SEQ ID NO: 58908 - DNA, 1717 bp, Glycine max
  misc_feature (1)..(1717): Ceres Seq. ID no. 14309682
tttcctcttctttgcatcatcattctcattccttctttctaaactaaccaactttttttcaaacaaattcgattctttcttcatttttaacctaattttcttttcgatccaaaaaatggctctctcgcgcgttgttgctcaatcgtcgcaatcgaatcttctgaaacccctagcgtcgtacttatcactacgacgccgttcggtttcgacttcgtcagacccactcacgatagagacctcggtgcccttcacctcccacaactgcgacgcgccgtcacgcgccgtggagacctcctcggcggagctctttgcgttcttccacgacatggcgctgatgcggcggatggagatcgcggcggactcgctctacaaggcgaagctgatccgcggcttctgccacctctacgacggtcaggaggctgtcgccgtcggcatggaggccgccatcacgcgcaaggactgcgtcatcaccgcctaccgcgaccattgcaccttcctcgcccgtggcggaaccctaatcgagatcttctccgagctcatgggccgccgcgacggctgctccaaggggaaagggggatccatgcacttttataggaaggaaggtggcttctacggtggccatggaatcgttggggcgcaggttccgcttgggtgtggcttggcttttgctcagaagtattgtaaagatgagaatgttacgttttctatgtacggtgatggtgctgccaatcagggccagttgttcgaggcgcttaacatttccgctctttgggatctcccctccattttggtctgcgagaataatcactatggaatggggacagctgagtggagagctgctaagagtcctgcttattacaagcgtggggattatgttcctggattgaaggtagatggcatggatgctcttgctgtgaaacaagcttgtaaatttgcaaaggagtttgctttgaagaatggtcccattattcttgaaatggacacatacagataccatggccactccatgtctgatcctggcagcacataccgtacacgtgatgagatttctggtgtgagacaggagcgtgatccaattgagagagtaagaaagctactattgactcacgagattgctactgaaaaggagctaaaggacattgaaaaggaaataagaaaagaagttgatgaagccattgccaaagcaaaggaaagtcaaatgccagagccatctgatttatttaccaatgtatatgtaaaaggctttggtgtcgaggcttgtggcgctgataggaaagaagttagagctattttgccctgatggaaaacttttcctttgaatttcttttccttagttttggaccgatcaaaataatgaagaataaaaggttcagaagatcatctctacctatttgttgagctttccccaaattgtatatgaaattgattcttcagtagcaatggggcggaaattaatgttttgccatgtaattttggaggatctaacactcatatgacctcaattgattaagcatgcaactagtgtcctgcaaatttggaggatttcgttatgcaaaacctccatgattggcaaaattttgccattattttatttttaggtattcacaagattgtgttccaattgaaaccattttttggctataagagtctttggacagttaaaaatttgatgcctgtacattgcagattgaattggtgatacaggttggattatgtt

SEQ ID NO: 58909 - protein, 432 aa, Glycine max
  peptide (1)..(432): Ceres Seq. ID no. 14309683
FLFFASSFSFLLSKLTNFFSNKFDSFFIFNLIFFSIQKMALSRVVAQSSQSNLLKPLASYLSLRRRSVSTSSDPLTIETSVPFTSHNCDAPSRAVETSSAELFAFFHDMALMRRMEIAADSLYKAKLIRGFCHLYDGQEAVAVGMEAAITRKDCVITAYRDHCTFLARGGTLIEIFSELMGRRDGCSKGKGGSMHFYRKEGGFYGGHGIVGAQVPLGCGLAFAQKYCKDENVTFSMYGDGAANQGQLFEALNISALWDLPSILVCENNHYGMGTAEWRAAKSPAYYKRGDYVPGLKVDGMDALAVKQACKFAKEFALKNGPIILEMDTYRYHGHSMSDPGSTYRTRDEISGVRQERDPIERVRKLLLTHEIATEKELKDIEKEIRKEVDEAIAKAKESQMPEPSDLFTNVYVKGFGVEACGADRKEVRAILP

SEQ ID NO: 58910 - protein, 394 aa, Glycine max
  peptide (1)..(394): Ceres Seq. ID no. 14309684
MALSRVVAQSSQSNLLKPLASYLSLRRRSVSTSSDPLTIETSVPFTSHNCDAPSRAVETSSAELFAFFHDMALMRRMEIAADSLYKAKLIRGFCHLYDGQEAVAVGMEAAITRKDCVITAYRDHCTFLARGGTLIEIFSELMGRRDGCSKGKGGSMHFYRKEGGFYGGHGIVGAQVPLGCGLAFAQKYCKDENVTFSMYGDGAANQGQLFEALNISALWDLPSILVCENNHYGMGTAEWRAAKSPAYYKRGDYVPGLKVDGMDALAVKQACKFAKEFALKNGPIILEMDTYRYHGHSMSDPGSTYRTRDEISGVRQERDPIERVRKLLLTHEIATEKELKDIEKEIRKEVDEAIAKAKESQMPEPSDLFTNVYVKGFGVEACGADRKEVRAILP

SEQ ID NO: 58911 - protein, 324 aa, Glycine max
  peptide (1)..(324): Ceres Seq. ID no. 14309685
MALMRRMEIAADSLYKAKLIRGFCHLYDGQEAVAVGMEAAITRKDCVITAYRDHCTFLARGGTLIEIFSELMGRRDGCSKGKGGSMHFYRKEGGFYGGHGIVGAQVPLGCGLAFAQKYCKDENVTFSMYGDGAANQGQLFEALNISALWDLPSILVCENNHYGMGTAEWRAAKSPAYYKRGDYVPGLKVDGMDALAVKQACKFAKEFALKNGPIILEMDTYRYHGHSMSDPGSTYRTRDEISGVRQERDPIERVRKLLLTHEIATEKELKDIEKEIRKEVDEAIAKAKESQMPEPSDLFTNVYVKGFGVEACGADRKEVRAILP

SEQ ID NO: 58912 - DNA, 961 bp, Glycine max
  misc_feature (1)..(961): Ceres Seq. ID no. 14308171
atagagaaacagataagggcgctctccgtaccatcttcctaatcctccttacatttgcagtgttcccatgtctcctacccactgaagtcgaacccctatttttcctctccctaatggcttctcaagttcttcttcagcaggcactgtttgcccccaagctaagtttcccttcttcttctcgtaacgtggcgttaatttctagggttccttccaccccaatttcatggcgttgcactcccctcattgctaagcctagtttcgtagtgagagctgacaccaacctcgatggcggtggtgaagccaccgaggatgttccttcggataatgctgaaaaagtttcggaaggcgaagcagaacaagtttcggattctgaagctccgaaatcgcctagaaaaccccgagtcaaactcggagacattatggggatattgaatcagagggcaattgaggcatccgagaagcaaagaccaactccagacattaggactggggatattgtcgaaatcaaattggaggttcctgagaacaagcgtaggttgtccatttataaagggattgtcatctcaaaacaaaatgctggtattcacacgactattcgaatccgaagaatcattgccggcactggggttgagatagtcttcccagtttactcaccaaacatcaaagaaatcaaagtggtaagtcaccgtaaggtcaggagggcaagattgtactatctgagagacaagcttccgagattctccactttcaagtgatactcggataccccacctttcctcacgttattcgtcgaactagtctgctgatccaggataagtgctgcggagctttaatttttttaatttcaatttgttctgttgtagaatacatcatttttcttcccctttgtgtatcttcccttaaatcgaaacaagtgtactgaaccttgatagtattgagaaatttgaagtgtttcttctgc

SEQ ID NO: 58913 - protein, 250 aa, Glycine max
  peptide (1)..(250): Ceres Seq. ID no. 14308172
RETDKGALRTIFLILLTFAVFPCLLPTEVEPLFFLSLMASQVLLQQALFAPKLSFPSSSRNVALISRVPSTPISWRCTPLIAKPSFVVRADTNLDGGGEATEDVPSDNAEKVSEGEAEQVSDSEAPKSPRKPRVKLGDIMGILNQRAIEASEKQRPTPDIRTGDIVEIKLEVPENKRRLSIYKGIVISKQNAGIHTTIRIRRIIAGTGVEIVFPVYSPNIKEIKVVSHRKVRRARLYYLRDKLPRFSTFK

SEQ ID NO: 58914 - protein, 213 aa, Glycine max
  peptide (1)..(213): Ceres Seq. ID no. 14308173
MASQVLLQQALFAPKLSFPSSSRNVALISRVPSTPISWRCTPLIAKPSFVVRADTNLDGGGEATEDVPSDNAEKVSEGEAEQVSDSEAPKSPRKPRVKLGDIMGILNQRAIEASEKQRPTPDIRTGDIVEIKLEVPENKRRLSIYKGIVISKQNAGIHTTIRIRRIIAGTGVEIVFPVYSPNIKEIKVVSHRKVRRARLYYLRDKLPRFSTFK

SEQ ID NO: 58915 - DNA, 1394 bp, Glycine max
  misc_feature (1)..(1394): Ceres Seq. ID no. 14313107
atattgttttgattgttcattcaagttcaaacttgaatttgattcatctgatctaaccaatgaaatcaaaatcgggattcgattgcagttgcaggtctctctatttggtgcttattacttattattaaggtttctttcttctgttgaaatggtctttagtaattatatttctgccaatgaatctcattgtttaattctgattatacctttcccgaaatgcaattagcgtcaaatggtgacaaggaagaatgttcagaaagcgaacccatcttgaatcatcaccatcttcatttgccaccacccggagaatcctccttttcctgtgaaattattcctatttctgctgctgcttccggcgatgatgatttacaaaacgttcgggttgatgagacttgtcatctcgtaaatgcagatcagccacaatgccgaatatgcctcgatattgtaggagaagatttaattgctccatgccattgcaaaggtacgcaaaagtacgtccacagatcatgtctcgataattggagatccaccaaggaggggttcgcgttttctcactgtacagagtgcagagctgtcttcatattacgtgcaaatgtcccaccagatcggtggtggttgagattaaaatttcagttccttgttgctagagatcatgcattcattttcataattgttcagctggttgttgctttcttgggagtgcttgtgtacaaattttatggagatgaactgagggaaatgtttggttatgaagaacatccatatggattttatacaatggctgttctagccattgttttggttggtttgctctatggcttcttcatagcgataatatgtggtcaaagaatcaatgaacgccactaccatgttcttgccaaacaagaattgactaaggaatatgtggttgaagatcgagaacatgtaaagaatgtgcctgaacttgaccccagccatgtgacagagctaaggatgttgggcctttactagttggatgcatcttctgcatagtcacattgaatttgttgtatttgcggcttgtctccatggtccccttcacatttgtagatcacattggtctgttcagagtgatgccccattaatatggctgtttgggcaccaactggcagtgcacagccacatgggtgttgtttattgtactctattttgattctttatttttaatttatatttttctggcgaaacttgtgaaagaaacatgcagttcacctagaaaattgctcttgtgaatcaatgttgtttggtggagtataaaggaaaaaggtgcagatcctatgaacatgagatattttgtatttgtaacttgtataagtcccttgatgtaacttattttacaatattttttttcatttctatacaaaatattataatcg

SEQ ID NO: 58916 - protein, 257 aa, Glycine max
  peptide (1)..(257): Ceres Seq. ID no. 14313108
MQLASNGDKEECSESEPILNHHHLHLPPPGESSFSCEIIPISAAASGDDDLQNVRVDETCHLVNADQPQCRICLDIVGEDLIAPCHCKGTQKYVHRSCLDNWRSTKEGFAFSHCTECRAVFILRANVPPDRWWLRLKFQFLVARDHAFIFIIVQLVVAFLGVLVYKFYGDELREMFGYEEHPYGFYTMAVLAIVLVGLLYGFFIAIICGQRINERHYHVLAKQELTKEYVVEDREHVKNVPELDPSHVTELRMLGLY

SEQ ID NO: 58917 - DNA, 1663 bp, Glycine max
  misc_feature (1)..(1663): Ceres Seq. ID no. 15177648
tcatacgatatggatagggtgttctcagtggacgatatctccgatcacttctggcagccgcctatccctgtctccgccgcccaaacttcctcccagatgagccgcagcgcctccgagtgggccttccaacgcttcctccaggaagcttccgcctccgcaccctctcctccgtcttcttcctccgccgccgacgtcgtattcgtcgagatcgaagatcaacctaaacccgcccctccccctccgtcaaacggcgccgttctccccaatgcccctggtcccgtcccccttgactccgacgaataccaggccttcctcaagagcaagcttaacctcgcatgcgccgccgtcgccatgactaggggatctttggctaaatctcaagacccgtcccctttttctgaaggtggatcacagccgactaatccttctctagttgaatctcagactacttctaaaggatctattccttctgaaaatgatccatctaagttacaagataaagataccaatgtaccagttgggattccttccatacctgccatgcaaaagaaacctgctgttgcaattaggccatctacaagtggatcatcaagagaacagtcagatgatgaggacattgagggagagacatctatgattgacaacacggaccctgctgatgtaaaacgagtaaggaggatgctatccaatagggagtcagcccgacgctgtagaagaagaaagcaggctcatttaactgacctagaaacacaggtttctcaattaagaggtgaaaattctaccttgttaaagcgccttactgatgttagtcagaaatacagcgactctgctgttgacaacagagttttaaaagctgatgttgaaacattaagaacaaaggtaaagctctactttatacttaaacctactggctctttctaacaagttccataggtttggctgacaagatggaggatggtgtccaatgagggtcatcttttacagtgaagaaaagctaaattagaattaatgttgcttcatctgtttggacaaagtttatctgacatgtgtgtttgtcatttcctaccatgttattctcatttttaggtgaagatggccgaagagaccgtcaaaagaattactggattgaacccattgcttcatgccatgtctgatatatcatcactgggcctgccatcatttgatggaagaagcccttcagacacttcagctgatgcagctgttcctgtgcaagatgatccacatcatcacttctatcaacccacatctactaatcctattcccagtcatgatccgatagtcaacaatggattggggggcatttcttcaattgaaaatgtgcagcagaatgctgcagtagtgctaggtgggaacaagatgggtcaaacagcatccctgcagcgggtggctagcttggaacatctacaggagcggattcgtggtggacctccatctaatggggagcagtgactaattagccaaatctcctggatgctttgccaggaaattattctaaaacagttatttctgttggttataactagaggcctattcttctggaatacattgtaattcaattgatggggcacatgatgttggattcaattagtgcaccccgtatttttttaaaaaataatataaaatgaactttactttctagttc

SEQ ID NO: 58918 - protein, 306 aa, Glycine max
  peptide (1)..(306): Ceres Seq. ID no. 15177649
SYDMDRVFSVDDISDHFWQPPIPVSAAQTSSQMSRSASEWAFQRFLQEASASAPSPPSSSSAADVVFVEIEDQPKPAPPPPSNGAVLPNAPGPVPLDSDEYQAFLKSKLNLACAAVAMTRGSLAKSQDPSPFSEGGSQPTNPSLVESQTTSKGSIPSENDPSKLQDKDTNVPVGIPSIPAMQKKPAVAIRPSTSGSSREQSDDEDIEGETSMIDNTDPADVKRVRRMLSNRESARRCRRRKQAHLTDLETQVSQLRGENSTLLKRLTDVSQKYSDSAVDNRVLKADVETLRTKVKLYFILKPTGSF

SEQ ID NO: 58919 - protein, 303 aa, Glycine max
  peptide (1)..(303): Ceres Seq. ID no. 15177650
MDRVFSVDDISDHFWQPPIPVSAAQTSSQMSRSASEWAFQRFLQEASASAPSPPSSSSAADVVFVEIEDQPKPAPPPPSNGAVLPNAPGPVPLDSDEYQAFLKSKLNLACAAVAMTRGSLAKSQDPSPFSEGGSQPTNPSLVESQTTSKGSIPSENDPSKLQDKDTNVPVGIPSIPAMQKKPAVAIRPSTSGSSREQSDDEDIEGETSMIDNTDPADVKRVRRMLSNRESARRCRRRKQAHLTDLETQVSQLRGENSTLLKRLTDVSQKYSDSAVDNRVLKADVETLRTKVKLYFILKPTGSF

SEQ ID NO: 58920 - protein, 274 aa, Glycine max
  peptide (1)..(274): Ceres Seq. ID no. 15177651
MSRSASEWAFQRFLQEASASAPSPPSSSSAADVVFVEIEDQPKPAPPPPSNGAVLPNAPGPVPLDSDEYQAFLKSKLNLACAAVAMTRGSLAKSQDPSPFSEGGSQPTNPSLVESQTTSKGSIPSENDPSKLQDKDTNVPVGIPSIPAMQKKPAVAIRPSTSGSSREQSDDEDIEGETSMIDNTDPADVKRVRRMLSNRESARRCRRRKQAHLTDLETQVSQLRGENSTLLKRLTDVSQKYSDSAVDNRVLKADVETLRTKVKLYFILKPTGSF

SEQ ID NO: 58921 - DNA, 1277 bp, Glycine max
  misc_feature (1)..(1277): Ceres Seq. ID no. 14308571
attactaatcaaaattttgagtgcatctttgattatttctctgttttcttcactacctaccgtctttcatgacaaactgtctagtctttatggcggcatgtgctgattgatgtctcaataagatccaagagaccaagattgtcattaatccggttgattatgatgtagggctttgccaggatcttttaattccagtaaccaactttcataatgaagacaagggctatatggttttacctggagatgtttttgatttgcctattcggaaggacattattcatcgtgttgttaggtggcagcttgcaaaacgacaacaggggactcactcaacaaaaactatcagtgaggtcagtggcactgggagaaaaccttggaatcaaaagggaactggtagagcaaggcatggttcattgcgtgggcctcaggtagtgaagcattctgctcattacttgctagtccatctttattccttctttcttctcatttttttgtgttcttattgtccatttttagcagttgaaattaacaaacttaatgaatggtaacagttcaggggtggtgccaccatgcatggccctaagccccgaagccatgctttcaaagtcaataagaaggttcgacgtctagggctgaagattgctttatcagctcgtgcagcagaaggaaagcttcttgtttttgaggatctggcggttcccacacataaaaccaagaatattgtgaattattacaatcaaatggaggataccaagaaactgctgcttgtagatggcgctatagatgaaaagttaaaattatctacacaaaatctacactatgttaacgtacttccctccattggcttgaatgtctacagcattttgctgcatgatacattggtgatgtcccgagctgctgtgagcaaaattgttgagcgcatgcatactccaataaatcgttgaggctgtaactttttattgtgcttcgcttcatttactcggaaataggaacatttctgtagcaacataaaaagatccaatgagaatatctttggtacgaggtgtctgttttaattacataagttaggcaagttatgccattttgcccatgttgaaggttggaacttaggaacttgatgatcgaaatttgacgttcatgtgattaggtttatcttgttttccggtggttgaatctcatttttcaattctttcacatgcataggatctgataaacctgtacatcattcatgacctagtgtccttcattcatgaatttaaccaatatagtttgtctttggc

SEQ ID NO: 58922 - protein, 124 aa, Glycine max
  peptide (1)..(124): Ceres Seq. ID no. 14308572
MHGPKPRSHAFKVNKKVRRLGLKIALSARAAEGKLLVFEDLAVPTHKTKNIVNYYNQMEDTKKLLLVDGAIDEKLKLSTQNLHYVNVLPSIGLNVYSILLHDTLVMSRAAVSKIVERMHTPINR

SEQ ID NO: 58923 - protein, 105 aa, Glycine max
  peptide (1)..(105): Ceres Seq. ID no. 14308573
MVLPGDVFDLPIRKDIIHRVVRWQLAKRQQGTHSTKTISEVSGTGRKPWNQKGTGRARHGSLRGPQVVKHSAHYLLVHLYSFFLLIFLCSYCPFLAVEINKLNEW

SEQ ID NO: 58924 - protein, 72 aa, Glycine max
  peptide (1)..(72): Ceres Seq. ID no. 14308574
MKTRAIWFYLEMFLICLFGRTLFIVLLGGSLQNDNRGLTQQKLSVRSVALGENLGIKRELVEQGMVHCVGLR

SEQ ID NO: 58925 - DNA, 1160 bp, Glycine max
  misc_feature (1)..(1160): Ceres Seq. ID no. 14309711
aatgattatcaatgtggactaaactaagcttctgtgctacttgtggtcctgtaacaacttcaagtctacaagtacaaggtgatgaatcctgaaatgcaaaattcaaatgttgatcaattctgaccttttcttttgacaagagaaaatttatttaaagatataactcaagggatgtactaatgataatgataatacaattgcatctcctgaggaataccctattatctggatggattattaaaattttacatcatttttttttcttctccgaaatataagcctgatttgatgctaaacagcacatgcatcattgaaagaggccagcagtttgttttattgtttttaaagtttccataatagtattattctttttaaaatttgtttcctgaaaaaagtttttctttttgcttttaccataaagtcaataatggcaaaatctttcgtgaaataagattcccgttcgttcctttttatgcttttccaacttagttcatgtcctttttgagctcggcttccattttaaccttgcttttttcttatatttgtagcctgcaggtggtcaaagtaacatcttatttggtgaagcatccgttgagaagacagcaaagaagatacataaccagaagttcgcggagctgacaggcaataatattttccaaggagatgttcctccaggctcagctgagaagcctctgagcagggctaagctcagagaaatgactggcagtgacatatttgctgatggaaagacagaaatcaaagaccctgtgcgaggtgcccggaaaccccctggtggagagagcagcattgccttggtttaagttatttttaatttacaaaaaatactagcaatatattctctaatatttattttttctgacatactttctattgatagaaattcgcgtgagtcttgctaaatatgtgactctcatccacaaacaagtgaaactcacatgaatttcagtcaatgaaagaaagcagataaaaaaagtattagaaaatgtgttgttagctttcctctttaacttatcccctttgacataggaattctataaattcgtctgaacttccatgtttttctgtagaagggtcagtgtgttcgattatcagcattgtaagtttcaactttcaatgaacgtggcataacctttacattt

SEQ ID NO: 58926 - protein, 48 aa, Glycine max
  peptide (1)..(48): Ceres Seq. ID no. 14309712
MSFLSSASILTLLFSYICSLQVVKVTSYLVKHPLRRQQRRYITRSSRS

SEQ ID NO: 58927 - protein, 35 aa, Glycine max
  peptide (1)..(35): Ceres Seq. ID no. 14309713
MERQKSKTLCEVPGNPLVERAALPWFKLFLIYKKY

SEQ ID NO: 58928 - protein, 34 aa, Glycine max
  peptide (1)..(34): Ceres Seq. ID no. 14309714
MTGSDIFADGKTEIKDPVRGARKPPGGESSIALV

SEQ ID NO: 58929 - DNA, 1128 bp, Glycine max
  misc_feature (1)..(1128): Ceres Seq. ID no. 14311969
gaaaaactacccttccctttcgtcgttctccgtctccctcatttgttcactttctctctctaaatccctaaaccagatctcgcactcgcgctttctctctctaggattcgacaatggcggccgctccctcgcctcgcgaagagaacgtgtacatggcgaagctcgccgagcaggccgagcgctacgaagagatggtggagttcatggagaaggtctccgccgccgccgacaacgaggagctcaccgtcgaggagaggaacctcctctccgtcgcgtacaagaacgtgatcggagcgcgccgcgcctcgtggcgcatcatctcctcgatcgagcagaaggaggagagccgcggcaacgaggaccacgtctccgtcatccgcgactaccgatccaagatcgagtccgagctctccaacatctgcgacggtattctcaagctcctcgactctcgcttcattccctccgcttcctccggcgattccaaggtcttctacctcaagatgaagggagattaccacaggtacctcgccgagttcaagaccggcgccgagcgtaaggaggctgccgagagcactctctctgcatacaaagccgctcaggacattgcaaatgccgaactgcctccaactcatccaattaggcttggccttgcacttaacttctctgtattttactacgaaatccttaactctcccgatcgtgcctgcaaccttgcaaaacaggcttttgatgaagctattgctgaattggatacactgggagaggagtcatacaaggatagcactctgatcatgcaactccttcgtgataacctcaccctttggacctctgacatgcaggatgatggagcagatgaaattaaagaagcagcaccgaaacaggatgaccagtaaaaatattttactgctaattagaattgaacttctcctccatatctttttgaagggagaaggtgtttgttgctaatatctctttggtactgagattttaggcattcatgtttgttatgattgtggatgtactgggccgtttttagtttgtccttccattttcaagtgttttccaaattgcctattttattaaggacgctgaagtttttattatatggaattggaattttaagattct

SEQ ID NO: 58930 - protein, 259 aa, Glycine max
  peptide (1)..(259): Ceres Seq. ID no. 14311970
MAAAPSPREENVYMAKLAEQAERYEEMVEFMEKVSAAADNEELTVEERNLLSVAYKNVIGARRASWRIISSIEQKEESRGNEDHVSVIRDYRSKIESELSNICDGILKLLDSRFIPSASSGDSKVFYLKMKGDYHRYLAEFKTGAERKEAAESTLSAYKAAQDIANAELPPTHPIRLGLALNFSVFYYEILNSPDRACNLAKQAFDEAIAELDTLGEESYKDSTLIMQLLRDNLTLWTSDMQDDGADEIKEAAPKQDDQ

SEQ ID NO: 58931 - protein, 246 aa, Glycine max
  peptide (1)..(246): Ceres Seq. ID no. 14311971
MAKLAEQAERYEEMVEFMEKVSAAADNEELTVEERNLLSVAYKNVIGARRASWRIISSIEQKEESRGNEDHVSVIRDYRSKIESELSNICDGILKLLDSRFIPSASSGDSKVFYLKMKGDYHRYLAEFKTGAERKEAAESTLSAYKAAQDIANAELPPTHPIRLGLALNFSVFYYEILNSPDRACNLAKQAFDEAIAELDTLGEESYKDSTLIMQLLRDNLTLWTSDMQDDGADEIKEAAPKQDDQ

SEQ ID NO: 58932 - protein, 233 aa, Glycine max
  peptide (1)..(233): Ceres Seq. ID no. 14311972
MVEFMEKVSAAADNEELTVEERNLLSVAYKNVIGARRASWRIISSIEQKEESRGNEDHVSVIRDYRSKIESELSNICDGILKLLDSRFIPSASSGDSKVFYLKMKGDYHRYLAEFKTGAERKEAAESTLSAYKAAQDIANAELPPTHPIRLGLALNFSVFYYEILNSPDRACNLAKQAFDEAIAELDTLGEESYKDSTLIMQLLRDNLTLWTSDMQDDGADEIKEAAPKQDDQ

SEQ ID NO: 58933 - DNA, 1480 bp, Glycine max
  misc_feature (1)..(1480): Ceres Seq. ID no. 13594132
aggaaagaaaagaaaaacatggttggtgaaggagaaaagccgaaggcagtgataataggaggtagcatagcagggatatcaagtgcacatgctctcaccttagctggttgggatgtacttgtgcttgagaaaaccacctcacctccaactggaagccccactggtgcaggtcttggactcaattctttgtcccaacaaatcatccactcttggcttccaccacaccaaaaacaactccttcacaacaccactttaacactcaccattgatcagaaccatgcaactgatagtgagaagaagtttagctggacattgacaagagatgagagttttaacttcagagcagcacattgggctgatctccatggccttctgtacaatgcactgccaccaaatgtatttttgtggggtcacctttttctctcagtccatgttgctgatgataagggttcagtcatagtaaaggctaaagtactagaaactggcaagattatagagatagtaggggattttcttgttgcggcagatggttgtctctcttccctccgccagaaatatctccccgattttaaactcagatattctggctattgtgcttggagaggggttcttgatttttcaaaaattgagaattcagaaaccatcaatggtatcagaaaggcataccctgatctaggaaaatgcttgtactttgacttggcctctggcacacacactgtgttgtatgagctgcaaaacaagaagctcaattggatttggtatgtgaatcagcctgagcctgaagttaagggaacatcggtgacaatgaaagtaaacaatgacatgatccagaaaatgcaccaagaagcggaacaagtttggattcctgagttggtaaaggtcataaaggaaacaaaggaccctttcttaaatttcatatatgatagtgatcccttagagaagatcttttgggacaatgtggtattggtaggggatgcagctcaccccacaactcctcactgccttagaagcactaacatgtcaatattggatgcagcagtgttaggcaaatgcatagagaagtggggaccagaaaagcttggatcagctttagaagagtatcagttcgttaggctaccagtcacttccaaggaagttctgtactcaaggcgtcttggccgattgaaacaagggctagttctacctgatagagaaccttttgacccaaagttaattaggccagaggactgccaggagcttctactgaggaacacaccattttttaatgatgagccgttgtcactgctttgataccatcttacatttcttcatctgattgcttatagcagtgagttttatgactgctttgaaaatagatgtcttacttagcaccatccatacatctgtttgcacactgataatattttggaccctttcccataactgatttggtgccttttggcctcaaatttttgtttttgctattaatagttttatcatc

SEQ ID NO: 58934 - protein, 429 aa, Glycine max
  peptide (1)..(429): Ceres Seq. ID no. 13594133
RKEKKNMVGEGEKPKAVIIGGSIAGISSAHALTLAGWDVLVLEKTTSPPTGSPTGAGLGLNSLSQQIIHSWLPPHQKQLLHNTTLTLTIDQNHATDSEKKFSWTLTRDESFNFRAAHWADLHGLLYNALPPNVFLWGHLFLSVHVADDKGSVIVKAKVLETGKIIEIVGDFLVAADGCLSSLRQKYLPDFKLRYSGYCAWRGVLDFSKIENSETINGIRKAYPDLGKCLYFDLASGTHTVLYELQNKKLNWIWYVNQPEPEVKGTSVTMKVNNDMIQKMHQEAEQVWIPELVKVIKETKDPFLNFIYDSDPLEKIFWDNVVLVGDAAHPTTPHCLRSTNMSILDAAVLGKCIEKWGPEKLGSALEEYQFVRLPVTSKEVLYSRRLGRLKQGLVLPDREPFDPKLIRPEDCQELLLRNTPFFNDEPLSLL

SEQ ID NO: 58935 - protein, 423 aa, Glycine max
  peptide (1)..(423): Ceres Seq. ID no. 13594134
MVGEGEKPKAVIIGGSIAGISSAHALTLAGWDVLVLEKTTSPPTGSPTGAGLGLNSLSQQIIHSWLPPHQKQLLHNTTLTLTIDQNHATDSEKKFSWTLTRDESFNFRAAHWADLHGLLYNALPPNVFLWGHLFLSVHVADDKGSVIVKAKVLETGKIIEIVGDFLVAADGCLSSLRQKYLPDFKLRYSGYCAWRGVLDFSKIENSETINGIRKAYPDLGKCLYFDLASGTHTVLYELQNKKLNWIWYVNQPEPEVKGTSVTMKVNNDMIQKMHQEAEQVWIPELVKVIKETKDPFLNFIYDSDPLEKIFWDNVVLVGDAAHPTTPHCLRSTNMSILDAAVLGKCIEKWGPEKLGSALEEYQFVRLPVTSKEVLYSRRLGRLKQGLVLPDREPFDPKLIRPEDCQELLLRNTPFFNDEPLSLL

SEQ ID NO: 58936 - DNA, 1312 bp, Glycine max
  misc_feature (1)..(1312): Ceres Seq. ID no. 14312933
atcaaacactgcacttcatttggttggttcatatctcacttaattttgtgtcctttccatttacatattccacattcattaattttgagaaacatttagtgtatgttacatctggggaaggcttaaagtagatttactttgggtccatggtatccactgacttaaattactttgccaaaccatcattctcaacctcaatccacaaggaaaataattgtaccatagatagaaggctgacatttttaatttgaacctttgattttgagtggtttgtaaaatttaaaccccctcatcctaactaaactttatttgtgaatgtaatcccttctgagacactcataattcatgcatggtgtgcttgtacatttcaggttcaggtacttgcagtaagagaacatattgtaaaactaaaagggaaaaatggccttagatcactttgaggagactgtgcaccaaaaaggaaattggaaatcttccagtgaaatcattgcagattctgatagaaatgcctctggtgactttgactgcaacatctgcctggagtgtgtgcaagatccagtggtgacactttgtggtcatctttattgctggccctgcatatacaaatggcttcattttcaaagcacctctttggatgatgaagaacaacagaggccacaatgtcctgtatgcaaatcagaagtttctcaatcctcccttgttccattatacggccgtggccaaaccacattaccttctaaagggaagccacgtcaagtaggcactgtcataccacaaagacctcatggtccaagaacacttaacactagaagtgtttcacaacctatttctcaaagttaccatccctatagtaatccttatcatcctcaacaacacttcaactcgattccaagcggttacacctcacctatgattagaacaactggttcaatagacaacacatttggaatctttggtgagatgatatatgcaagggtctttggtaaccacgtgtcaaacattcatacatacgccaattcgtacaatctttcggggaccagtaacccaaggatgagaagacatttaatgcaagttgataaatcactcagcagaataagttgtttcctcctttgctgcctagttttgtgtctgctcttattctgattgctacttcattttcatcattagttatagtgcatccttacatagaatacattcactcattgatccagatgtattctatgttagagaagctgcaaattgatgctgagttatgtgtaaattaccaatctctctacgagctatatgaagtgaataatgatattctcatacc

SEQ ID NO: 58937 - protein, 240 aa, Glycine max; identical to SEQ ID NO: 51610
  peptide (1)..(240): Ceres Seq. ID no. 14312934

SEQ ID NO: 58938 - DNA, 1166 bp, Glycine max
  misc_feature (1)..(1166): Ceres Seq. ID no. 15224613
gtagaatatgcatcatcactttggaaaaaagaacctaaaacaaaacatggcacctcaaatttctagaggcagagtccctattgttgttttgctagcctctctagtcctccccctcctttttcaagaatattcttcttcttctgtgttcattgcaagtgcatcagcttcagaatcagatgttgatctgttagaatttcccttaaatttagaatacttggaggctgagtttttcttatttggttccttgggtcatggattggatgtggttgctccaaatttaagtgagggaggaccccctcccattggtgccagattggccagacttgagaacctcatcagggatatcatcttgcagtttggtttgcaggaagttggacacttgagggccataaagagcacagtgagagggttcccaaggccgttacttgatctaagcacagcatcttttgcaaaagtaatgaatagtgcatttgggagacctcttgttcctccctttgacccctatgctaattcgatcaactatctgttagcatcttatgtgattccctatgttggtctcactggttatgttggtgccaatccactgctgcaaaatgctacttccaagaggtttgttgcagggcttctaggagtagagtccgggcaagatgcagttattcgaacattgttgtatgaacgccaagcatcattggtgcaaccatacaaagtgactgtggcagagtttacagatcgcatttcaatgcttaggaacaagctaggaaatgcaggtgtgaaagacgagggtcttgtggtgcctagagtgcaaggtgctgagggtagtgtcacagacaacattctcgctggtgacaaagattcactatcatatcctagaactccagaggaaatattgaggataatatatggaggaggtgatgaacatgttcctggtggtttctaccctaacggagcatgtggtcgcatagctaaatcttacttgaagtacactacttaaagctagagtatgtgttgtagttatatgtgtcttgaaattgttatgcctaccctatcacaataaattattattataataagagagtatgttgcttgatcatatggctacaatttgtaagtgatgattaattaccaataatcgaatctttggtaatatatatttaaaaatcaatatc

SEQ ID NO: 58939 - protein, 327 aa, Glycine max
  peptide (1)..(327): Ceres Seq. ID no. 15224614
MHHHFGKKNLKQNMAPQISRGRVPIVVLLASLVLPLLFQEYSSSSVFIASASASESDVDLLEFPLNLEYLEAEFFLFGSLGHGLDVVAPNLSEGGPPPIGARLARLENLIRDIILQFGLQEVGHLRAIKSTVRGFPRPLLDLSTASFAKVMNSAFGRPLVPPFDPYANSINYLLASYVIPYVGLTGYVGANPLLQNATSKRFVAGLLGVESGQDAVIRTLLYERQASLVQPYKVTVAEFTDRISMLRNKLGNAGVKDEGLVVPRVQGAEGSVTDNILAGDKDSLSYPRTPEEILRIIYGGGDEHVPGGFYPNGACGRIAKSYLKYTT

SEQ ID NO: 58940 - protein, 314 aa, Glycine max
  peptide (1)..(314): Ceres Seq. ID no. 15224615
MAPQISRGRVPIVVLLASLVLPLLFQEYSSSSVFIASASASESDVDLLEFPLNLEYLEAEFFLFGSLGHGLDVVAPNLSEGGPPPIGARLARLENLIRDIILQFGLQEVGHLRAIKSTVRGFPRPLLDLSTASFAKVMNSAFGRPLVPPFDPYANSINYLLASYVIPYVGLTGYVGANPLLQNATSKRFVAGLLGVESGQDAVIRTLLYERQASLVQPYKVTVAEFTDRISMLRNKLGNAGVKDEGLVVPRVQGAEGSVTDNILAGDKDSLSYPRTPEEILRIIYGGGDEHVPGGFYPNGACGRIAKSYLKYTT

SEQ ID NO: 58941 - protein, 177 aa, Glycine max
  peptide (1)..(177): Ceres Seq. ID no. 15224616
MNSAFGRPLVPPFDPYANSINYLLASYVIPYVGLTGYVGANPLLQNATSKRFVAGLLGVESGQDAVIRTLLYERQASLVQPYKVTVAEFTDRISMLRNKLGNAGVKDEGLVVPRVQGAEGSVTDNILAGDKDSLSYPRTPEEILRIIYGGGDEHVPGGFYPNGACGRIAKSYLKYTT

SEQ ID NO: 58942 - DNA, 1293 bp, Glycine max
  misc_feature (1)..(1293): Ceres Seq. ID no. 13581563
aagcctttttttcataaagtgttttaaagaaaaaaaatcatttgggctaaatgaagacagaatatctaaatttatacaatcgtgcatcatggcaaaggtaatttcctagctttagagcaatgtacctcttaaacagtgttaacatcctcataattaagatttattacagtctctcacaaattcttttacaatgtgtccagattcttctgacaatgtatgcattgaagactgttatataagcactggtgatgatctgattgccatcaagagcgggtgggatgagtatggcattgcatatggtcgcccaagcacaaacattatcatccacaggctagttggtaaaactcaaacaagtgggattgctattggaagtgagatgtctggtggtgtatctgaagttcatgcagaagatattcaattctatgattcatataatgcaatcagaataaagacttctcctggcaggggtggttacgttagaaacatctatgtctctaacgtgaccttggctaatgtagatattgctattacgttcactggtttatatggggagcatccagatgatgcttatgacccaaatgctctacctgtaatagaaaaagttacaatcaaggatgtggtaggagaaaatatcaaaactgcaggtcttatagagggtatagaaggtgacaattttgtcaacatttgcctgtcaaacattatccttaacgtgacctcaaactatccatggaactgctcctacgttaaaggatattctgacttagtccagccagaagcttgtgagcctctcaaggagagaatattccctgatcattgttcagattgttactatttgacaaatcaaattcagagttcgaatagtcaaaatagagcaggacaaacttcaggtgacataagaggttgagtggagttgcccaactgtgattgtccatctgcagaaagataccgagaaatgattggtttttgtaacttgtgtgcagtaacaaaataattgagtgatttatcagaaataggaagttggatgatttcatgtcttgctttttctagctacatatggctttggaaaagaaaattgcaaagttttgtgtttntaatgattntaagggaaagaatgtgtttggctattgatagaggtgagatatggctaccctgacataattccctcttgccaaaaatgttatcggacacaggagattttgcagtagtacgaggctggtgcttgttggctttacatcccttttgattgaataaggaatccaataaataaacttcctagaaaggtggaatttacgc

SEQ ID NO: 58943 - protein, 237 aa, Glycine max
  peptide (1)..(237): Ceres Seq. ID no. 13581564
MCPDSSDNVCIEDCYISTGDDLIAIKSGWDEYGIAYGRPSTNIIIHRLVGKTQTSGIAIGSEMSGGVSEVHAEDIQFYDSYNAIRIKTSPGRGGYVRNIYVSNVTLANVDIAITFTGLYGEHPDDAYDPNALPVIEKVTIKDVVGENIKTAGLIEGIEGDNFVNICLSNIILNVTSNYPWNCSYVKGYSDLVQPEACEPLKERIFPDHCSDCYYLTNQIQSSNSQNRAGQTSGDIRG

SEQ ID NO: 58944 - protein, 175 aa, Glycine max
  peptide (1)..(175): Ceres Seq. ID no. 13581565
MSGGVSEVHAEDIQFYDSYNAIRIKTSPGRGGYVRNIYVSNVTLANVDIAITFTGLYGEHPDDAYDPNALPVIEKVTIKDVVGENIKTAGLIEGIEGDNFVNICLSNIILNVTSNYPWNCSYVKGYSDLVQPEACEPLKERIFPDHCSDCYYLTNQIQSSNSQNRAGQTSGDIRG

SEQ ID NO: 58945 - DNA, 369 bp, Glycine max
  misc_feature (1)..(369): Ceres Seq. ID no. 13594143
gtagaaacagaacttcgttgcaaaatatgggtgcttctgacgacaaccccacaactttctccaagttgtcttcaataactttgatgttcttgcactgcccttggttacgcttgtttaccctttatatgcttcaattaaggccatcgagacnnngtctactactgacgatcaacaatggctcacgtattggattctgtattccattctnnnnaatctttgagctcacatttgccaaagttcttgaactgcttcccatttggctttttgccaagttgatattcacttgctggttggttctgcctcacttcaatggggctgcggctgtttataggaattacatcagaccattttatatgaacccccaaatcc

SEQ ID NO: 58946 - protein, 122 aa, Glycine max
  peptide (1)..(122): Ceres Seq. ID no. 13594144
  misc_feature (50)..(50): Xaa is any aa, unknown or other
  misc_feature (51)..(51): Xaa is any aa, unknown or other
  misc_feature (69)..(69): Xaa is any aa, unknown or other
  misc_feature (70)..(70): Xaa is any aa, unknown or other
RNRTSLQNMGASDDNPTTFSKLSSITLMFLHCPWLRLFTLYMLQLRPSRXXLLLTINNGSRIGFCIPFXXIFELTFAKVLELLPIWLFAKLIFTCWLVLPHFNGAAAVYRNYIRPFYMNPQI

SEQ ID NO: 58947 - protein, 114 aa, Glycine max
  peptide (1)..(114): Ceres Seq. ID no. 13594145
  misc_feature (42)..(42): Xaa is any aa, unknown or other
  misc_feature (43)..(43): Xaa is any aa, unknown or other
  misc_feature (61)..(61): Xaa is any aa, unknown or other
  misc_feature (62)..(62): Xaa is any aa, unknown or other
MGASDDNPTTFSKLSSITLMFLHCPWLRLFTLYMLQLRPSRXXLLLTINNGSRIGFCIPFXXIFELTFAKVLELLPIWLFAKLIFTCWLVLPHFNGAAAVYRNYIRPFYMNPQI

SEQ ID NO: 58948 - protein, 95 aa, Glycine max
  peptide (1)..(95): Ceres Seq. ID no. 13594146
  misc_feature (23)..(23): Xaa is any aa, unknown or other
  misc_feature (24)..(24): Xaa is any aa, unknown or other
  misc_feature (42)..(42): Xaa is any aa, unknown or other
  misc_feature (43)..(43): Xaa is any aa, unknown or other
MFLHCPWLRLFTLYMLQLRPSRXXLLLTINNGSRIGFCIPFXXIFELTFAKVLELLPIWLFAKLIFTCWLVLPHFNGAAAVYRNYIRPFYMNPQI

SEQ ID NO: 58949 - DNA, 1283 bp, Glycine max
  misc_feature (1)..(1283): Ceres Seq. ID no. 14309707
aactcaaagaaaagcaaaatgtttttgtacaatttcatcgtgcaggaagtgaagataaaacaaagacaaaaacagcatcaggactacaaccaacttttttagagtcttggacaaaggattggaaatgtaatcccaatatgatcagtttagagtttgaaatatacaaacacaagttcttatcaaacgatttattgggtagagcagtattagacttacaaaattacacattcgtgacaaaaaaaccaaaaatcatcatacttccagttcaattagtcaaacaaaaggtaaaatcaactctcacagatcaaccatctatcgtcattcaaatcacaccagaagattttggttaccatccatcaccatacgtatggacatggtcatatgaacaacaagaacccactttgattatggatcttgccgatgtagtacaagtttcttgctctgaaactgcaacctattttgtaacagagaaaggttcactatacaaattagcaattggagaacatgtaccaataaaaattgaaacattaacacctgttctaaaagtagcagcaggattcgatcatgtgcttttcatttcgaaggataaaacagtgcaaagttttggtgaaaacaattatggacaattgggattggatgattttacatcacgatctattgcatcaacagttcaattggcacctggattatcggatgcagaatctgtttttgcaggtagaaatgtttcattctttgttgcatccaatggagatgcttatgcatgtggtgataattctaaaaatcaattaggattaagaaacaatgagttaattgcgcgtccaaaaattcttgacattaaaaatatatcttgtttacgtacatttaaagactttaccatggcaattagtcatgattcattatactttaccggtatttgtaacggattcgtgtcaaatacatggttgcatgtgttaactggaacaagatttatgtctgttgcaggatggagcgatatttttgctctatcaagagaaggaaaagtgtttaaatgtgatcttgaagaagataaggcagagattgttgaagaattatcaacgaaaaatatcactgaaattgttgctggatttaatcatttaatagctatggaagagaatggtgatgttacttacatacaagaaggacttggagataagttaaagtttttggagtcaaataaggcattatcgattgcagcttctggtactcaaagcatagtagttaccagagatttgtaaaaattacaacattaaatacaaatttgaagc

SEQ ID NO: 58950 - protein, 416 aa, Glycine max
  peptide (1)..(416): Ceres Seq. ID no. 14309708
LKEKQNVFVQFHRAGSEDKTKTKTASGLQPTFLESWTKDWKCNPNMISLEFEIYKHKFLSNDLLGRAVLDLQNYTFVTKKPKIIILPVQLVKQKVKSTLTDQPSIVIQITPEDFGYHPSPYVWTWSYEQQEPTLIMDLADVVQVSCSETATYFVTEKGSLYKLAIGEHVPIKIETLTPVLKVAAGFDHVLFISKDKTVQSFGENNYGQLGLDDFTSRSIASTVQLAPGLSDAESVFAGRNVSFFVASNGDAYACGDNSKNQLGLRNNELIARPKILDIKNISCLRTFKDFTMAISHDSLYFTGICNGFVSNTWLHVLTGTRFMSVAGWSDIFALSREGKVFKCDLEEDKAEIVEELSTKNITEIVAGFNHLIAMEENGDVTYIQEGLGDKLKFLESNKALSIAASGTQSIVVTRDL

SEQ ID NO: 58951 - protein, 371 aa, Glycine max
  peptide (1)..(371): Ceres Seq. ID no. 14309709
MISLEFEIYKHKFLSNDLLGRAVLDLQNYTFVTKKPKIIILPVQLVKQKVKSTLTDQPSIVIQITPEDFGYHPSPYVWTWSYEQQEPTLIMDLADVVQVSCSETATYFVTEKGSLYKLAIGEHVPIKIETLTPVLKVAAGFDHVLFISKDKTVQSFGENNYGQLGLDDFTSRSIASTVQLAPGLSDAESVFAGRNVSFFVASNGDAYACGDNSKNQLGLRNNELIARPKILDIKNISCLRTFKDFTMAISHDSLYFTGICNGFVSNTWLHVLTGTRFMSVAGWSDIFALSREGKVFKCDLEEDKAEIVEELSTKNITEIVAGFNHLIAMEENGDVTYIQEGLGDKLKFLESNKALSIAASGTQSIVVTRDL

SEQ ID NO: 58952 - protein, 281 aa, Glycine max
  peptide (1)..(281): Ceres Seq. ID no. 14309710
MDLADVVQVSCSETATYFVTEKGSLYKLAIGEHVPIKIETLTPVLKVAAGFDHVLFISKDKTVQSFGENNYGQLGLDDFTSRSIASTVQLAPGLSDAESVFAGRNVSFFVASNGDAYACGDNSKNQLGLRNNELIARPKILDIKNISCLRTFKDFTMAISHDSLYFTGICNGFVSNTWLHVLTGTRFMSVAGWSDIFALSREGKVFKCDLEEDKAEIVEELSTKNITEIVAGFNHLIAMEENGDVTYIQEGLGDKLKFLESNKALSIAASGTQSIVVTRDL

SEQ ID NO: 58953 - DNA, 932 bp, Glycine max
  misc_feature (1)..(932): Ceres Seq. ID no. 14312537
gatttaatctacttgatgcttgacaaggctgatgaacagactgacaggcgccttgctaaacatattgtgtccctacactttgagaatcccgagaacgtggaacaggacgtgttggacatttctacattaaccgattatgttagctatgcccgaaagcacatacacccacagctttctgatgaagccgctgaagaattgactagaggttacgtagaaataagaaaaagaggaaattttcctgggagtagcaaaaaggtgataacagcaacaccaaggcagattgagagtctgatacgcctaagtgaagcattggctcggatgcgcttctcagaatgggttgaaaagcatgatgtaatggaggcatttcggcttttggaagttgcaatgcagcagtctgcaacggatcattctactggaactattgacatggatcttattactactggagtttcggcaagtgaaagaatgaggcgagaaagtctgcaacaagcaactcgtaacataatcatggagaaaatgcagattgggggaccatctatgcgcttattggagttattggaagaattgaagaaacaggatactggtagcgaagttcatcttaatgatctaaggaatgcaattgctactctggctacagaaggatttgttaccatgcacggtgacattgtaaaaagatcttgatggcacgagacagtagtgacatcaggggactgtcttatagttattaattatagtgggttactgtttttattctttaaccttcttacccaatcatatgcatccggagttcaatgttacgtacatatttttatatacggtgtcttgtgaatgcatctattggtagttatttggttttatctttttccttatccgaacatctttactgttaggtgtttcattttataattaaacatgtattacctttcttgacg

SEQ ID NO: 58954 - protein, 226 aa, Glycine max
  peptide (1)..(226): Ceres Seq. ID no. 14312538
DLIYLMLDKADEQTDRRLAKHIVSLHFENPENVEQDVLDISTLTDYVSYARKHIHPQLSDEAAEELTRGYVEIRKRGNFPGSSKKVITATPRQIESLIRLSEALARMRFSEWVEKHDVMEAFRLLEVAMQQSATDHSTGTIDMDLITTGVSASERMRRESLQQATRNIIMEKMQIGGPSMRLLELLEELKKQDTGSEVHLNDLRNAIATLATEGFVTMHGDIVKRS

SEQ ID NO: 58955 - protein, 221 aa, Glycine max
  peptide (1)..(221): Ceres Seq. ID no. 14312539
MLDKADEQTDRRLAKHIVSLHFENPENVEQDVLDISTLTDYVSYARKHIHPQLSDEAAEELTRGYVEIRKRGNFPGSSKKVITATPRQIESLIRLSEALARMRFSEWVEKHDVMEAFRLLEVAMQQSATDHSTGTIDMDLITTGVSASERMRRESLQQATRNIIMEKMQIGGPSMRLLELLEELKKQDTGSEVHLNDLRNAIATLATEGFVTMHGDIVKRS

SEQ ID NO: 58956 - protein, 120 aa, Glycine max
  peptide (1)..(120): Ceres Seq. ID no. 14312540
MRFSEWVEKHDVMEAFRLLEVAMQQSATDHSTGTIDMDLITTGVSASERMRRESLQQATRNIIMEKMQIGGPSMRLLELLEELKKQDTGSEVHLNDLRNAIATLATEGFVTMHGDIVKRS

SEQ ID NO: 58957 - DNA, 1311 bp, Glycine max
  misc_feature (1)..(1311): Ceres Seq. ID no. 15172170
ttgatttggttgaccgtctaggacgcaagataataatagatccgacgaaaagttatggaaaggtggccatgataggagttttttcaagcatcgggaccatcattctactctttggtttgtggcggttgcgtaaagttgtaaggaaaaagatagcaaagaaacgcaaagaaaagttcttcaaacaaaatggaggattgttgttagaacaaagactatctactggtgaagttaatgttgacaaaactaaactctttagcttaaaggaattagggaaggccactgatcactttaatataaacagaatacttggaaaaggaggtcaaggtacagtttacaaaggtatgttagtagatggaaaaattgttgcagtgaaaaaatttaaggtcaacggaaatgttgaagaattcatcaacgaatttgtcattctttcacaaattaaccacagaaatgtggttaagttgttgggatgttgtttggagactgaaatccctttgcttgtttatgaattcattcccaatggtaacctttatgaatatttacatggacaaaatgatgagttaccaatgacatgggatatgcgtttgagaattgccactgaagtggctggagctctattttacttgcactcagctgcttctcaacccatttatcatagagatgtgaagtcaacaaatatattattggatgagaagtataaggcaaaagtagcagactttggggcatcaagaatggtttccattgaagccactcacctcactactgcagttcaaggaacttttggatacttagatcctgaatattttcatacaagtcaattgacagagaagagtgatgtctacagctttggagtggttcttgttgaacttttaacaggacaaaaaccaatatcctcagtgaacgaacaaggacttcaaagtttagcttcatattttcttctttgtatggaggaaaatcgtttttttgatattgttgatgcaagagtcatgcaggaagtggagaaagaacacataattgtagttgccaatcttgcaagaagatgcttacagttgaatgggagaaagcgaccaactatgaaagaagtcacattagaattggaaagtatccaaaaactggaaaaccagtgtaatgcacaagagcaacaagaagaacttgagcttgctggaaatgaagatagccaattttgggctgcgtattctacaacttcgactgcagggcaaacttcagacagcaaaacatcaaccttggagattatgcctattcttatcaaataattgttgaattctcttaacttgttttgttgtgtgtaaaatt

SEQ ID NO: 58958 - protein, 422 aa, Glycine max
  peptide (1)..(422): Ceres Seq. ID no. 15172171
DLVDRLGRKIIIDPTKSYGKVAMIGVFSSIGTIILLFGLWRLRKVVRKKIAKKRKEKFFKQNGGLLLEQRLSTGEVNVDKTKLFSLKELGKATDHFNINRILGKGGQGTVYKGMLVDGKIVAVKKFKVNGNVEEFINEFVILSQINHRNVVKLLGCCLETEIPLLVYEFIPNGNLYEYLHGQNDELPMTWDMRLRIATEVAGALFYLHSAASQPIYHRDVKSTNILLDEKYKAKVADFGASRMVSIEATHLTTAVQGTFGYLDPEYFHTSQLTEKSDVYSFGVVLVELLTGQKPISSVNEQGLQSLASYFLLCMEENRFFDIVDARVMQEVEKEHIIVVANLARRCLQLNGRKRPTMKEVTLELESIQKLENQCNAQEQQEELELAGNEDSQFWAAYSTTSTAGQTSDSKTSTLEIMPILIK

SEQ ID NO: 58959 - protein, 400 aa, Glycine max
  peptide (1)..(400): Ceres Seq. ID no. 15172172
MIGVFSSIGTIILLFGLWRLRKVVRKKIAKKRKEKFFKQNGGLLLEQRLSTGEVNVDKTKLFSLKELGKATDHFNINRILGKGGQGTVYKGMLVDGKIVAVKKFKVNGNVEEFINEFVILSQINHRNVVKLLGCCLETEIPLLVYEFIPNGNLYEYLHGQNDELPMTWDMRLRIATEVAGALFYLHSAASQPIYHRDVKSTNILLDEKYKAKVADFGASRMVSIEATHLTTAVQGTFGYLDPEYFHTSQLTEKSDVYSFGVVLVELLTGQKPISSVNEQGLQSLASYFLLCMEENRFFDIVDARVMQEVEKEHIIVVANLARRCLQLNGRKRPTMKEVTLELESIQKLENQCNAQEQQEELELAGNEDSQFWAAYSTTSTAGQTSDSKTSTLEIMPILIK

SEQ ID NO: 58960 - protein, 309 aa, Glycine max; identical to SEQ ID NO: 53298
  peptide (1)..(309): Ceres Seq. ID no. 15172173

SEQ ID NO: 58961 - DNA, 1986 bp, Glycine max
  misc_feature (1)..(1986): Ceres Seq. ID no. 15176298
agatatcgatcgatcaccctctttcataatattcccagctggtcccccaaaaatcaatcaaatggcggcgaaacgattttttgatgattctgatcaagacaacaataataagccaccaggcgataaacggatgagaactacaccaagaccttcttttgcttcggtaataggagaagtggtgatggtgaaaaacttgcagaaccttttctcaggcttggagcccttgcttagaagagtggtgaatgaagagatggagagagtgatgaggcattttagtgtgccacgttcaatattaagtaggtccccttcgttgaggatagaagcagcatcaatggagcaagaatcaaagtatgaactggtgttcagcaagaagctatcggtccctatattcacgggaagcagaatagtggacatagatgggaattccatccacgtgattctggttgacaaaagtggcggtgaagtagtagcggttcccactagtctgggccacccgataaagctagagatagtggtgcttgatggggattttccagctcccaacaacaacaaggaagaatattcatggacgagtgaggagttcaacaaccacatagtgaaggagagaactgggaagaggccattgctcactggagaattgaatctcaccatgagagatgggattgcactaattgaagagattgagttcactgataactctagttggatacgaagcaggaagttcagagttgcagttagggtggctcctgggagtaatcaaactgttcgaattcgtgaaggaatcactgagccatttgttgttaaggatcaccgtggtgaattgtacaagaaacatcacccacctatgctcaacgacgaagtgtggcgcctagagaagattggtaaagacggagctttccacaaaaaattgtccaaagaggggataaacagcgttcaagacttcctcaagttatactttgttgatttccataggctcaaaaagattttgggcgttgggatgtcagataaaatgtgggatgtgacaatcaagcatgcaaagacttgcgagaagggcaacaaatactacgcgtaccgtgggcataattttaccgtctttctgaattccatatgccagttggttagagctgatatcaacggccaaacttttcctggcagagagctaagcaacatgactaggagctatatggaaaaattggtgagagaagcatatgctagatggaatgacttggaagaaattgatgcggctctgttaacccaaggtgaaaccttggaggaatttccaaacaatcatcaggcatcactaatagcatatgatcagaatgactactttggtgataaatctgccgaagttggtaactatgtaccaacccataatgcacaaatgggatgcagcgactggcaagtgaatggaacatttggcacaacatcattcgtgaatggcggcataccttacagcttctcagattcacaatcggacagtgacataaccccctcagttgatgctgccgcaaggtggcattaggaaaattatttagtactttgactttcagctgtaaatacgaattaacagttgaagaatcaaattaggttcagtgacttagtgtgtgaagtcttgttggcccattacataaactgtgtccagcctgccttggcttatattgggctttcttttctttctggttaggcgtagtttattatgaggcccatttcaaggatatgtgcaaagatgaggcctggctcttctgcaaaatatgcaacctgcctttgctgggctaatgttgctatgttttataatttcagctatcacgaaacagaatgatgctttataaatagtgataagataaatgatgcaatcctttgattatactgtatgcattttttgtttatgatttgatttaagagtctcattctgcttttagcttgcaaatgttcatgttctgggactatctattcacacatcacaacaaatgaaattgatccaattcc

SEQ ID NO: 58962 - protein, 506 aa, Glycine max
  peptide (1)..(506): Ceres Seq. ID no. 15176299
DIDRSPSFIIFPAGPPKINQMAAKRFFDDSDQDNNNKPPGDKRMRTTPRPSFASVIGEVVMVKNLQNLFSGLEPLLRRVVNEEMERVMRHFSVPRSILSRSPSLRIEAASMEQESKYELVFSKKLSVPIFTGSRIVDIDGNSIHVILVDKSGGEVVAVPTSLGHPIKLEIVVLDGDFPAPNNNKEEYSWTSEEFNNHIVKERTGKRPLLTGELNLTMRDGIALIEEIEFTDNSSWIRSRKFRVAVRVAPGSNQTVRIREGITEPFVVKDHRGELYKKHHPPMLNDEVWRLEKIGKDGAFHKKLSKEGINSVQDFLKLYFVDFHRLKKILGVGMSDKMWDVTIKHAKTCEKGNKYYAYRGHNFTVFLNSICQLVRADINGQTFPGRELSNMTRSYMEKLVREAYARWNDLEEIDAALLTQGETLEEFPNNHQASLIAYDQNDYFGDKSAEVGNYVPTHNAQMGCSDWQVNGTFGTTSFVNGGIPYSFSDSQSDSDITPSVDAAARWH

SEQ ID NO: 58963 - protein, 486 aa, Glycine max
  peptide (1)..(486): Ceres Seq. ID no. 15176300
MAAKRFFDDSDQDNNNKPPGDKRMRTTPRPSFASVIGEVVMVKNLQNLFSGLEPLLRRVVNEEMERVMRHFSVPRSILSRSPSLRIEAASMEQESKYELVFSKKLSVPIFTGSRIVDIDGNSIHVILVDKSGGEVVAVPTSLGHPIKLEIVVLDGDFPAPNNNKEEYSWTSEEFNNHIVKERTGKRPLLTGELNLTMRDGIALIEEIEFTDNSSWIRSRKFRVAVRVAPGSNQTVRIREGITEPFVVKDHRGELYKKHHPPMLNDEVWRLEKIGKDGAFHKKLSKEGINSVQDFLKLYFVDFHRLKKILGVGMSDKMWDVTIKHAKTCEKGNKYYAYRGHNFTVFLNSICQLVRADINGQTFPGRELSNMTRSYMEKLVREAYARWNDLEEIDAALLTQGETLEEFPNNHQASLIAYDQNDYFGDKSAEVGNYVPTHNAQMGCSDWQVNGTFGTTSFVNGGIPYSFSDSQSDSDITPSVDAAARWH

SEQ ID NO: 58964 - protein, 463 aa, Glycine max
  peptide (1)..(463): Ceres Seq. ID no. 15176301
MRTTPRPSFASVIGEVVMVKNLQNLFSGLEPLLRRVVNEEMERVMRHFSVPRSILSRSPSLRIEAASMEQESKYELVFSKKLSVPIFTGSRIVDIDGNSIHVILVDKSGGEVVAVPTSLGHPIKLEIVVLDGDFPAPNNNKEEYSWTSEEFNNHIVKERTGKRPLLTGELNLTMRDGIALIEEIEFTDNSSWIRSRKFRVAVRVAPGSNQTVRIREGITEPFVVKDHRGELYKKHHPPMLNDEVWRLEKIGKDGAFHKKLSKEGINSVQDFLKLYFVDFHRLKKILGVGMSDKMWDVTIKHAKTCEKGNKYYAYRGHNFTVFLNSICQLVRADINGQTFPGRELSNMTRSYMEKLVREAYARWNDLEEIDAALLTQGETLEEFPNNHQASLIAYDQNDYFGDKSAEVGNYVPTHNAQMGCSDWQVNGTFGTTSFVNGGIPYSFSDSQSDSDITPSVDAAARWH

SEQ ID NO: 58965 - DNA, 1810 bp, Glycine max
  misc_feature (1)..(1810): Ceres Seq. ID no. 14310508
aatgcctagtgaattagctatgaacaatgatgagctacatgtggttatgttcccattccttgcatttggccacattagtccatttgttcagctctccaacaagttgttctctcatggtgttcatgtcactttcttgtcagctgcatccaacattcccagaatcagatcaactcttaatctcaatccagccatcaatgttatctcactaaagttcccaaatggtataaccaacactgctgaattgccacctcacttagctggaaatctcatacacgcccttgacctcactcaagatcaggtgaagtcccttttgttggaactcaaaccccactatgttttctttgactttgcacaacattggctcccaaaattagcttctgaagttggcatcaagtctgttcatttctcagtctactctgccatttctgatgcttacattaccgtgccttctagatttgctgatgttgaaggaagaaacatcacttttgaggatcttaaaaagcctccacctgggtatcctcaaaactctaatatttccctcaaggcctttgaggccatggactttatgttcctcttcacaagatttggtgaaaaaaaccttactggttatgagcgagttttgcaaagccttggtgagtgttcattcatagtgttcaaaacgtgcaaggaaatagaaggaccctacttagactacatagaaacgcaatttcgaaaaccagttttgctatctggtccactagtccccgagccatcaaccgatgtgcttgaggaaaagtggtccaaatggttagatggtttccctgccaaatctgtcatattatgctcctttggcagtgagacatttctgagtgattatcaaatcaaagaactagccagtgggttagaactcactggcttacctttcattttggttctgaatttcccatccaatctctctgccaaagctgagttggagagagcattgccaaaagggtatttggaaagagtgaagaataggggagtggtgcacagtggttggtttcagcagcagcttgtgctgaaacactcaagtgtggggtgctatgtatgccatggtggctttagttcagtgattgaagctatggtcaatgagtgtcaactggtgctgttgcctttcaagggtgaccagtttttcaattctaaactcattgccaatgatttaaaggcaggggtagaggtgaataggagtgatgaagatgggttctttcacaaagaggatatactggaggcattgaaaactgtcatgttggaggataacaaagagcaagggaagcaaataagagaaaaccacatgcaatggagcaagtttttatcaaataaggaaattcagaacaaattcatcacagatctggttgcccagttaaagtctatggcttagtcttgtctcttccaatggaaaataaagtctaccaagactagaaagtataaactatagttcaaaatgatcatattatcatatatcaattgagatatgcgtggtcagtctcgttgttcttgtgattttgctttcccgttgtaggttttattctgtgtctcctttctcccgatcaattaatgcagttaggagattcaccttaaaaaagctaaaaattgcttttgtaacttgaagttattgtattcctactgattttggtcaagaccaagaagttgtcttataatttgtgcacatggtttgttttgaaatttagaaaggaaaaaagaaaagaaaaagtagagcatggaacaaatatcgtttgtaatataggtgaccaataaatgtagaaccattctaaataaatatggctttgaatac

SEQ ID NO: 58966 - protein, 464 aa, Glycine max; identical to SEQ ID NO: 54454
  peptide (1)..(464): Ceres Seq. ID no. 14310509

SEQ ID NO: 58967 - protein, 458 aa, Glycine max; identical to SEQ ID NO: 54455
  peptide (1)..(458): Ceres Seq. ID no. 14310510

SEQ ID NO: 58968 - protein, 449 aa, Glycine max; identical to SEQ ID NO: 54456
  peptide (1)..(449): Ceres Seq. ID no. 14310511

SEQ ID NO: 58969 - DNA, 1104 bp, Glycine max
  misc_feature (1)..(1104): Ceres Seq. ID no. 14310572
aaaaacgtgggagccctgaatcgtgcgtgttttgcgattctgacttgtttttcatttttactttttgggcctttgaaagcttaaaaacctaaacgcccaagactcaaaacaaggcagaaccgctcaactgcgccgtgaaactcttcttctcattcacattcagttgcgcgaagcaccatcaggctctgcaaatgccaatggtggatttggagggcacagaaggttacataccttccacagagtatgtggaagacagcaacgaaacactcattaacttgactgactcaactgagcttttgtttcttaagttgccttcttccaatgattttttatctgacatacatgggcagaaattgtttctcactcttcataatgatggtaaactagccagcttcgaggattcatcaggtaaagtatatgattttgtaagctattctgctcaggagccagacgaaacagtttttgttccctctacagaaccaaaaataggaaagatttcgatgcgagtttccactgtccattaccctggtcctaaagaacttgaaaagctcaattcaactaacgcaaaacatgcacatggaaattcttctggagtcactgggacaacttcatctcgatattttcctatgcaaagtggtggagcagcttcatcaaaaggtagcagacagagaagctctctaactgaagctagtgagccatcaagtatttcaaaaagaagacacgcgtctaaatctaaatccaacttgtccgagacttcacatgagcacagcactggcatttcgtccatgtccccaaatcattctcatgaaggaaaggcaaagagaagaaaacataaggaatagtgtttcctatactcgccattggcctatttaatagtgtaatatttagaggttacattctcccaggcctttaaatatgtccggaaagactagtgctaaacttttatgttgcaaaatgataaatttaaatgtttgcattctcttttttgtcttttttttttgcaaatgttcatttgcttcagttggacaatgttcactgatgtaaggagtaagaccctttcgtgctcctatgtatacttaagggcgatgttaattttgttgtgtt

SEQ ID NO: 58970 - protein, 216 aa, Glycine max
  peptide (1)..(216): Ceres Seq. ID no. 14310573
MPMVDLEGTEGYIPSTEYVEDSNETLINLTDSTELLFLKLPSSNDFLSDIHGQKLFLTLHNDGKLASFEDSSGKVYDFVSYSAQEPDETVFVPSTEPKIGKISMRVSTVHYPGPKELEKLNSTNAKHAHGNSSGVTGTTSSRYFPMQSGGAASSKGSRQRSSLTEASEPSSISKRRHASKSKSNLSETSHEHSTGISSMSPNHSHEGKAKRRKHKE

SEQ ID NO: 58971 - protein, 214 aa, Glycine max
  peptide (1)..(214): Ceres Seq. ID no. 14310574
MVDLEGTEGYIPSTEYVEDSNETLINLTDSTELLFLKLPSSNDFLSDIHGQKLFLTLHNDGKLASFEDSSGKVYDFVSYSAQEPDETVFVPSTEPKIGKISMRVSTVHYPGPKELEKLNSTNAKHAHGNSSGVTGTTSSRYFPMQSGGAASSKGSRQRSSLTEASEPSSISKRRHASKSKSNLSETSHEHSTGISSMSPNHSHEGKAKRRKHKE

SEQ ID NO: 58972 - protein, 113 aa, Glycine max
  peptide (1)..(113): Ceres Seq. ID no. 14310575
MRVSTVHYPGPKELEKLNSTNAKHAHGNSSGVTGTTSSRYFPMQSGGAASSKGSRQRSSLTEASEPSSISKRRHASKSKSNLSETSHEHSTGISSMSPNHSHEGKAKRRKHKE

SEQ ID NO: 58973 - DNA, 689 bp, Glycine max
  misc_feature (1)..(689): Ceres Seq. ID no. 13637980
atctttttcttcttactctagactcttccttttctcttctctgtctaaggggtgccctgagatcacattgaacaatggtgaaggctgtggccgttcttggcagcagtgagggtgtcactggaactattcacttcgttcaggagggaagtggtccaaccaccgtaactggatctcttgctggtcttaagcctggtctccatggtttccatgtccatgccttgggggacactaccaatggttgcctctcaactggatcacatttcaatcctaataacaaggagcatggtgcccctgaggatgagaatcgtcatgctggtgatcttgggaatgttaatgtcggtgatgatggtactgtcagcttcactattactgacagccagattcctctcactggaccaaacaacatcataggaagggcggttgttgtccatgctgatcctgatgatcttgggaaaggtggtcatgagcttagcaaaactactggaaatgctggtggcagagtagcttgtggtatcattggtctgcaaggataaactaatcacatgaagttggaaacgtgctttagatttgtggaataaagtagcacccatttaaacccgtttggttaggtccggtctgtactgctgaattctgtgttttgcttgtattgtatcgacacttgatgcttaatcaaattgttacattgcttg

SEQ ID NO: 58974 - protein, 152 aa, Glycine max
  peptide (1)..(152): Ceres Seq. ID no. 13637981
MVKAVAVLGSSEGVTGTIHFVQEGSGPTTVTGSLAGLKPGLHGFHVHALGDTTNGCLSTGSHFNPNNKEHGAPEDENRHAGDLGNVNVGDDGTVSFTITDSQIPLTGPNNIIGRAVVVHADPDDLGKGGHELSKTTGNAGGRVACGIIGLQG

SEQ ID NO: 58975 - DNA, 1300 bp, Glycine max
  misc_feature (1)..(1300): Ceres Seq. ID no. 13594147
gaactgaacttcatcttctctactgccatggccatttcatctgcatccgatttcataaatgatttgcacagcatatgttatgccttgcaatttcaagatgtgatttgactcaacttctgggatttgagaaattcattccaccctttgcaaacactagtggttcaaacatacttaaaggtgttaactatgcatcaggtggagctggaatacgcattgaaaccggctcggacatgggtgctactatcagcttgggattacagttagcaaatcacagagtcatagtttctgaaattgctacgaaacttggaagtcctgacttagctcgacaataccttgaaaagtgcttgtattatttgaacataggcaacaatgattacatgggcaactacttccgtccccagctctacccagcaagccgcatttatagccttgagcagtatgcacaagctctgattgaagagttatctctgaatttgcaggctttacatgaccttggagcgagaaagtatgtgttggctgggttgggccttataggatgcacaccagctgtgatgcattctcatgggacaaatggatcttgtgttgaagagcataatgctgctacatacgattataataacaagcttaaagctctagtggatcagttcaataacaggttctctgctaattccaaattcatccttatacacaatggatcaaacgcccttgacattgcacatgggtttttggtttcggatgctgcttgctgcccatcagggtgtaatcccaaccaaaagccgtgcaataataggagtgactatgtgttttgggatgaagttcatcccaccgaggcatggaacctagttaatgcaatatcagcttataattctaccattgatccagcctttacttatccaatgaatatcaagcaacttgtagactgtgaagttaagagggaattggagttcaggaatgagtccacttcacagctcagtgccactgaataagttctggctatcacctagtctttcatttggagctaaattaattgagttgaatatgtacgaagtaatggcctgctactgaattgaacgacaaaggggaatgaatcaagcacagttgctgttatggaatccaattcaaaatcattaagccataatgatttggtttcaaaatcctctcctgaaatttgattttgtactgtttatactcttttctttgtttagaaccaatatattgacatgagttatactatttatgtaatatttctttacaacattattatttctctctttcttaatcacatcattcatcttatttc

SEQ ID NO: 58976 - protein, 303 aa, Glycine max
  peptide (1)..(303): Ceres Seq. ID no. 13594148
MLCLAISRCDLTQLLGFEKFIPPFANTSGSNILKGVNYASGGAGIRIETGSDMGATISLGLQLANHRVIVSEIATKLGSPDLARQYLEKCLYYLNIGNNDYMGNYFRPQLYPASRIYSLEQYAQALIEELSLNLQALHDLGARKYVLAGLGLIGCTPAVMHSHGTNGSCVEEHNAATYDYNNKLKALVDQFNNRFSANSKFILIHNGSNALDIAHGFLVSDAACCPSGCNPNQKPCNNRSDYVFWDEVHPTEAWNLVNAISAYNSTIDPAFTYPMNIKQLVDCEVKRELEFRNESTSQLSATE

SEQ ID NO: 58977 - protein, 251 aa, Glycine max
  peptide (1)..(251): Ceres Seq. ID no. 13594149
MGATISLGLQLANHRVIVSEIATKLGSPDLARQYLEKCLYYLNIGNNDYMGNYFRPQLYPASRIYSLEQYAQALIEELSLNLQALHDLGARKYVLAGLGLIGCTPAVMHSHGTNGSCVEEHNAATYDYNNKLKALVDQFNNRFSANSKFILIHNGSNALDIAHGFLVSDAACCPSGCNPNQKPCNNRSDYVFWDEVHPTEAWNLVNAISAYNSTIDPAFTYPMNIKQLVDCEVKRELEFRNESTSQLSATE

SEQ ID NO: 58978 - protein, 202 aa, Glycine max
  peptide (1)..(202): Ceres Seq. ID no. 13594150
MGNYFRPQLYPASRIYSLEQYAQALIEELSLNLQALHDLGARKYVLAGLGLIGCTPAVMHSHGTNGSCVEEHNAATYDYNNKLKALVDQFNNRFSANSKFILIHNGSNALDIAHGFLVSDAACCPSGCNPNQKPCNNRSDYVFWDEVHPTEAWNLVNAISAYNSTIDPAFTYPMNIKQLVDCEVKRELEFRNESTSQLSATE

SEQ ID NO: 58979 - DNA, 1607 bp, Glycine max
  misc_feature (1)..(1607): Ceres Seq. ID no. 15174513
aaaaaacaaacctgtatcatcttcttactctttcgtttgtctctcttctttccctttcccctctctttcgagggtttttctttttctttttttcccccttttttatttttccttttttttttttactttctcttgtttttcagttttgcttccatttcctttgaatccccatttcttgttcctctgcaactctaaccctagaattgaagatgcaaccacagaggttaaggcagcatgccatgttgcaaccatctctctaccaccaccccgctctccttactcctcctcagatagagcctatcttgagtggaaatctgccacctggctttgattcgagttcatgccgcagtgtttatgttggcaacattcatccccaggttacagattcccttcttcaagagcttttttcaactgcaggcgcccttgaaggatgtaaacttattaggaaagagaagtcatcctatggctttgtggactactttgatcgcagttctgctgcatttgccattgtaactctcaatgggaggaatatttttgggcagcctattaaggttaactgggcttatgctagcagccagagagaggatacctcaggtcactttaatatttttgtcggtgaccttagtcctgaggttacagatgcgacattgtatgcttgcttctctgtatatcctagttgttctgatgcaagggtaatgtgggatcagaagacaggccgttccaggggatttggatttgtttcttttcggaatcagcaggatgcccaaagtgctataaatgatttgactggaaaatggcttggaagtagacagattcgttgtaattgggcaaccaaaggggccagtgccagtgatgaaaagcagagttcggattcaaaaattgtcgtggagttgatcaatggatcatccgaagaaggccaggaaacaaccaatgatgacactcccgagaagaatcctcaatataccactgtttatgttggcaatcttgctccggaggttacttctgttgatctccatcaacattttcattctcttaatgccggaattattgaagatgttagggtgcaacgagacaaaggttttgggtttgtgagatacagtacccatgctgaagcagctcttgctatacagatgggtaatgcccgaattctatttggcaaacctatcaagtgttcatggggtagcaagcctactcctctgggaactgcctctactcctcttctgccaccttctgcaaatgtgccgggcttttctctggctggtcttgcagcatatgaacgtcaaatggctttgagtaaaatgggtggtgcacacacccttatgcatcaacaaggtcaacatgccctaaagcatgtagacatgggaatgggtgctactgggactggtttcgatgcaaggttccagaatgttgcaaccacccaacacctagtgtactatcagtaaaatgtgttggtgtgcaactctctgcgataaacaagggaggattaaagtatgtaagaatggttctacaataccgattatttcttccttccctgtccatctgctatgctaacttcatcctcccatttttttcttctgtgcttgtttatgtaatactacagttttttt

SEQ ID NO: 58980 - protein, 410 aa, Glycine max
  peptide (1)..(410): Ceres Seq. ID no. 15174514
MQPQRLRQHAMLQPSLYHHPALLTPPQIEPILSGNLPPGFDSSSCRSVYVGNIHPQVTDSLLQELFSTAGALEGCKLIRKEKSSYGFVDYFDRSSAAFAIVTLNGRNIFGQPIKVNWAYASSQREDTSGHFNIFVGDLSPEVTDATLYACFSVYPSCSDARVMWDQKTGRSRGFGFVSFRNQQDAQSAINDLTGKWLGSRQIRCNWATKGASASDEKQSSDSKIVVELINGSSEEGQETTNDDTPEKNPQYTTVYVGNLAPEVTSVDLHQHFHSLNAGIIEDVRVQRDKGFGFVRYSTHAEAALAIQMGNARILFGKPIKCSWGSKPTPLGTASTPLLPPSANVPGFSLAGLAAYERQMALSKMGGAHTLMHQQGQHALKHVDMGMGATGTGFDARFQNVATTQHLVYYQ

SEQ ID NO: 58981 - protein, 400 aa, Glycine max
  peptide (1)..(400): Ceres Seq. ID no. 15174515
MLQPSLYHHPALLTPPQIEPILSGNLPPGFDSSSCRSVYVGNIHPQVTDSLLQELFSTAGALEGCKLIRKEKSSYGFVDYFDRSSAAFAIVTLNGRNIFGQPIKVNWAYASSQREDTSGHFNIFVGDLSPEVTDATLYACFSVYPSCSDARVMWDQKTGRSRGFGFVSFRNQQDAQSAINDLTGKWLGSRQIRCNWATKGASASDEKQSSDSKIVVELINGSSEEGQETTNDDTPEKNPQYTTVYVGNLAPEVTSVDLHQHFHSLNAGIIEDVRVQRDKGFGFVRYSTHAEAALAIQMGNARILFGKPIKCSWGSKPTPLGTASTPLLPPSANVPGFSLAGLAAYERQMALSKMGGAHTLMHQQGQHALKHVDMGMGATGTGFDARFQNVATTQHLVYYQ

SEQ ID NO: 58982 - protein, 248 aa, Glycine max
  peptide (1)..(248): Ceres Seq. ID no. 15174516
MWDQKTGRSRGFGFVSFRNQQDAQSAINDLTGKWLGSRQIRCNWATKGASASDEKQSSDSKIVVELINGSSEEGQETTNDDTPEKNPQYTTVYVGNLAPEVTSVDLHQHFHSLNAGIIEDVRVQRDKGFGFVRYSTHAEAALAIQMGNARILFGKPIKCSWGSKPTPLGTASTPLLPPSANVPGFSLAGLAAYERQMALSKMGGAHTLMHQQGQHALKHVDMGMGATGTGFDARFQNVATTQHLVYYQ

SEQ ID NO: 58983 - DNA, 537 bp, Glycine max
  misc_feature (1)..(537): Ceres Seq. ID no. 13505109
acgaataagatgcacttccggtcatcattttaccaacatgcagattttgagttggtttctgaatataaatggacgccaaacggttcatccagctggttgaggagaagaagaagaaaattatggagagaaaggaagctcctttgaaatgggagcagaagctggaagctgctgctgaagctaaagagaggaagctgaaggttgcaaagcatacaaaaagatctggctctgatagtgacagcgattatgacagtgatgatgagagtacaaagacaagtaaaagatctcacaggaagcacagaaagcattctcactacgactctggtgaccatgagaaaaggaaagaaaaaagttccaaacggaaaacaaggaaatggtcctctgaatctagtgattatagtagtgatgactctgagagtagctttgaggaggaaagaagaagaaagaagaggcaaagcatgaagctgagagatcggggttcaagatcagattctagcaactatgattctactgctgatgaattaagcaagaggaaaagac

SEQ ID NO: 58984 - protein, 156 aa, Glycine max
  peptide (1)..(156): Ceres Seq. ID no. 13505110
MDAKRFIQLVEEKKKKIMERKEAPLKWEQKLEAAAEAKERKLKVAKHTKRSGSDSDSDYDSDDESTKTSKRSHRKHRKHSHYDSGDHEKRKEKSSKRKTRKWSSESSDYSSDDSESSFEEERRRKKRQSMKLRDRGSRSDSSNYDSTADELSKRKR

SEQ ID NO: 58985 - protein, 139 aa, Glycine max
  peptide (1)..(139): Ceres Seq. ID no. 13505111
MERKEAPLKWEQKLEAAAEAKERKLKVAKHTKRSGSDSDSDYDSDDESTKTSKRSHRKHRKHSHYDSGDHEKRKEKSSKRKTRKWSSESSDYSSDDSESSFEEERRRKKRQSMKLRDRGSRSDSSNYDSTADELSKRKR

SEQ ID NO: 58986 - DNA, 1265 bp, Glycine max
  misc_feature (1)..(1265): Ceres Seq. ID no. 14307496
aatgaattctcgttaaaaatattaaccatgtaggaaaaataattgcttgatatggttattatttataatatattagtttaaataaccactcctagtggttattgtcccttgatggtaaatgtttttatcaagagttctgtttctgaaattctcccttttattatatggttctttttacagggttgcttgtgctataaattctgattaactgatccttgttaactcaatgctgtcatcattcatcaggaagatacacagacctttcacatagtttccttgtgctgtctgcttaagatatgacaaaatttcagtttcctattacagggctcgagtttggttgtaagctcttatgatggtgaagacatacttgtatcatttggaggatacaatggacattacaataatgaggtctatgtccttaaaccaagccacaaatcaaccttgcaatcaaaactaatagaaaaccccattccatacagtgtttctggtgcgcataatgccgcaaatgctacccgagatctggattctgaagcaggccacaaagggattatcaaggaacttgtcatggacagtgttgattcaataaaatcaaaaggtgatgttataacagttctaaaggtcgagaaagaagatttggaatcatcgctctacaaagagaagttgcaaactcttcaactaaagcaagagctttcagaaactaaaactcgtaactctgatctttgcaaggaactccaatcaatacgtggtcagcttgcttctgagcagtcaaggtgtttcaaacttgaggtggaggttgctgaattaagtcagaagctccagacaattgggacactacagaaggaacttgagctcctgcagcggcaaaaagctgcatccgagctggctgccctgaatgcaaagcaaaagcagggttcaggtggtgtatggggttggcttgctggtgctcctccccctacccagaaagaagatgatgggtgatcgcgtgattaaactaactggattaccatgctgcatttagtttcattagcccatttttacatccaatacacttattttttttattcaattctttttttggtgaagggaataaaatttagctttctgtttaggaaaaaccccccgtaggggtcttgcaattgcagtaatacatatttcacatattctgtaattttatttacttgttcaggacagtgcatgttgttgttcccgccaatttgctgatttgtttcgaatccactattgaatgaaaagataagtattcttcc

SEQ ID NO: 58987 - protein, 137 aa, Glycine max
  peptide (1)..(137): Ceres Seq. ID no. 14307497
MDSVDSIKSKGDVITVLKVEKEDLESSLYKEKLQTLQLKQELSETKTRNSDLCKELQSIRGQLASEQSRCFKLEVEVAELSQKLQTIGTLQKELELLQRQKAASELAALNAKQKQGSGGVWGWLAGAPPPTQKEDDG

SEQ ID NO: 58988 - DNA, 1481 bp, Glycine max
  misc_feature (1)..(1481): Ceres Seq. ID no. 15169244
ggttcacatgtcacatatacactacatcttgttctaaaaagccatcatttgctatcctgaggaaacttccattctttccacaatgagcaaacccaaaactcaaagaaaaccaaccattaccaaacatgtcagccaaaaccaaaaccaagaggcacagaaaacagagaaacaaccttcatgggtggtgagaggcctactagcttgtagaaatgtgcaaatccaacaaaatcagccgcagcagaaggaagcaaaatcacccccagaagcaaaagaaaacaggaaaaaacaggaacatagaaagctgcaagaggaacgagtcccagaagaaaacagcaagaaatccaagaagatgaaatgctcaggatcgctttgtaacaacaccaagatcactgcaaagcctgacacagcaaccccagatgttcacaagaaaaggttgttactaagtgggtgcaacaacaagaacgatgcttccagcagatccatgaaagcacctcttaatgaactcaatggaaccgtgtcagcctcttcttcttctttgtcagcatcttcaacttcttctggcggtggttctttcaggggaatgccattcaggagactctccggttgttatgagtgtagaatggtggtagacccagttcttggcttcactagagacccttctctaaggagtagcatttgttcttgccctgactgtggtgagatcatgaaagctgaaagcttggaacatcaccaggctgtcaaacatgcagtttcagaactgggtccagaagacaccagcaaaaacatagttgagataatattccactccagctggctgaagaagcaatctccagtgtgcaaaatagaccgcatcctcaaggtccacaacactcagaaaacaataaccaaattcgaagagtacagagactccataaaagccaaggccacaaagctctccaagaagcaccctcgttgcatagcagacggcaacgagcttctcaggttccactgcacctccttcaattgctccctgggcctaaacggttcctccaacttgtgcaactcgataccacagtgtaacgtgtgcagcataatcaagcacgggttcaaggtcaccggaggagccggtatcttgacgacggcgacgagtggaaaggctcacgacaaggcggcgtgtgtggaggagagtgaggagaagagggcaatgctggtttgtagagtgatagcaggcagggtgaagaagaatgcagaaggtggcatggaggagtatgattctgttgctgttgccggtgctgttggagcttattctaatttggatgagttgcttgtgttcaaccctaaagctatattgccttgctttgttgtaatctatagaggcttttgaaatgtgctgtgagttgaattaatttcgtttcctttgttttgttaattaactcttttaaaagttgtagcatcttcttgtgttaaggatgagtatttgatcggtctcagatcatttttgt

SEQ ID NO: 58989 - protein, 426 aa, Glycine max
  peptide (1)..(426): Ceres Seq. ID no. 15169245
MSKPKTQRKPTITKHVSQNQNQEAQKTEKQPSWVVRGLLACRNVQIQQNQPQQKEAKSPPEAKENRKKQEHRKLQEERVPEENSKKSKKMKCSGSLCNNTKITAKPDTATPDVHKKRLLLSGCNNKNDASSRSMKAPLNELNGTVSASSSSLSASSTSSGGGSFRGMPFRRLSGCYECRMVVDPVLGFTRDPSLRSSICSCPDCGEIMKAESLEHHQAVKHAVSELGPEDTSKNIVEIIFHSSWLKKQSPVCKIDRILKVHNTQKTITKFEEYRDSIKAKATKLSKKHPRCIADGNELLRFHCTSFNCSLGLNGSSNLCNSIPQCNVCSIIKHGFKVTGGAGILTTATSGKAHDKAACVEESEEKRAMLVCRVIAGRVKKNAEGGMEEYDSVAVAGAVGAYSNLDELLVFNPKAILPCFVVIYRGF

SEQ ID NO: 58990 - protein, 337 aa, Glycine max
  peptide (1)..(337): Ceres Seq. ID no. 15169246
MKCSGSLCNNTKITAKPDTATPDVHKKRLLLSGCNNKNDASSRSMKAPLNELNGTVSASSSSLSASSTSSGGGSFRGMPFRRLSGCYECRMVVDPVLGFTRDPSLRSSICSCPDCGEIMKAESLEHHQAVKHAVSELGPEDTSKNIVEIIFHSSWLKKQSPVCKIDRILKVHNTQKTITKFEEYRDSIKAKATKLSKKHPRCIADGNELLRFHCTSFNCSLGLNGSSNLCNSIPQCNVCSIIKHGFKVTGGAGILTTATSGKAHDKAACVEESEEKRAMLVCRVIAGRVKKNAEGGMEEYDSVAVAGAVGAYSNLDELLVFNPKAILPCFVVIYRGF

SEQ ID NO: 58991 - protein, 293 aa, Glycine max
  peptide (1)..(293): Ceres Seq. ID no. 15169247
MKAPLNELNGTVSASSSSLSASSTSSGGGSFRGMPFRRLSGCYECRMVVDPVLGFTRDPSLRSSICSCPDCGEIMKAESLEHHQAVKHAVSELGPEDTSKNIVEIIFHSSWLKKQSPVCKIDRILKVHNTQKTITKFEEYRDSIKAKATKLSKKHPRCIADGNELLRFHCTSFNCSLGLNGSSNLCNSIPQCNVCSIIKHGFKVTGGAGILTTATSGKAHDKAACVEESEEKRAMLVCRVIAGRVKKNAEGGMEEYDSVAVAGAVGAYSNLDELLVFNPKAILPCFVVIYRGF

SEQ ID NO: 58992 - DNA, 2206 bp, Glycine max
  misc_feature (1)..(2206): Ceres Seq. ID no. 15176563
ggtatcaccccagttcaaagaaacttgacaccgattagattaggggcttcgaacaaggagccccgaaacccaaaccctaatctgattcgctttcgattatggcgtctgagagcgcttctcgatcgagttccgcggccgattcgtacattgggagcttgataagcttgacctctaagagtgagatcagatacgaaggtattctctacaacatcaacaccgaagagtccagtattggcctcagaaacgtgcggtcttttggaacagaaggaaggaaaaaggatggcccacaaatccctcccagtgacaaggtttatgagtatatacttttccgtgggactgacatcaaggatttacaggttaaatcttctccacctgtccagcctactccacaagtcaacaatgacccagctattattcagtctcactatcctttcccggtgaccacatctacaagtttgccttctgctgtaagtgggtctttgactgatcctagctctcataccacacaacttggacttcccgggtcaaattttcaagggcccttacctttgtatcaacctggagggaacataggatcgtggggagcttctccacctgctcctaatgcaaatggtggtcggcttgctatgccaccaatgtattggcaaggatattatggtgccccaaatgggcttcctcaattacaccaacaatctttgcttcaaccgccacctggtttatcaatgccttcatctatgcagcagccaatgcagtatcccaattttaccccccctttacctactgtatcttctaatttgcctgaattgccatcatctttgctgcctgtgagtgctagtacccctagtgtaacatctgcttccttgcctcctaatttgcctccagcaccttctgctttgcctcctgctccttcagccttgcctcctgctccttctgctttatctcccgttccttctgcaacgcttgcttctgaaatttttccagtatcagtagcaaataaggcacccaatgtttcaacttccgcagccatgttagcttctaacttaccatcactggctttgctgaccaatcctgctcgagatatcaatgctatagtgccggccatttccagcaaatcgaatgcaatttcaggttcaagcttgccctaccaatctgtatcccagttgtctcctgcagttgttgaatcatcgacttctatccacacagaaacatcagcaccttctttggtaaccccaggacaattattgaagcctggaccaattatagtttcttcggctcagccttcacaagcacctcataaggatgttgaagttgttcaggtatcatcaacatcatctcctgagccatctgtaccagtttctgtggaaactcaaccaccaatactgccattgccagtaacttcacggcccaatcacaggcctggtggagctcctacccaaactcatcatcatggctatagttatagaggacgtggaagaggaagaggaactgggggtttccgctcagtcacaaaattcactgaagattttgatttcacagcaatgaatgagaagttcaaaaaggatgaagtatggggtcatcttggtaaaagtaagtctcattcaaaagacaataacggggaagaaaatgcctttgatgaagattaccaagatgaagacaatgacgatgtatcaaacattgaggttaagcctgtttataacaaggacgacttctttgactcgctctcttccaacatgcatggtaatgcttcacagaatggaaggactcgatactccgaacaaatcaagattgatactgagacgtttggcgattatgtgaggtaccatggtggtcgtgggggccgtggccctggccgtggtggacgtactcgaggtggttattatggaagaggaggagggtatggctactctggacgagggaggggacgcggcatgccaagtcgcactttgtaggtggcagttaatgtttagtcatgaacatggtggagaacaagagcctaggtagccttccattaaagaaccataagtatgttagagattatgcttcattgttgtgttgcctgttatgtgtttgtttcacagaataagtaggacatttttttttctctcgtcatattaccctcttgttactcctctaccacttggtttgatggaaagatgtttgtacaacatattattttagcttatatcaacaggcagaagtttagact

SEQ ID NO: 58993 - protein, 616 aa, Glycine max
  peptide (1)..(616): Ceres Seq. ID no. 15176564
MASESASRSSSAADSYIGSLISLTSKSEIRYEGILYNINTEESSIGLRNVRSFGTEGRKKDGPQIPPSDKVYEYILFRGTDIKDLQVKSSPPVQPTPQVNNDPAIIQSHYPFPVTTSTSLPSAVSGSLTDPSSHTTQLGLPGSNFQGPLPLYQPGGNIGSWGASPPAPNANGGRLAMPPMYWQGYYGAPNGLPQLHQQSLLQPPPGLSMPSSMQQPMQYPNFTPPLPTVSSNLPELPSSLLPVSASTPSVTSASLPPNLPPAPSALPPAPSALPPAPSALSPVPSATLASEIFPVSVANKAPNVSTSAAMLASNLPSLALLTNPARDINAIVPAISSKSNAISGSSLPYQSVSQLSPAVVESSTSIHTETSAPSLVTPGQLLKPGPIIVSSAQPSQAPHKDVEVVQVSSTSSPEPSVPVSVETQPPILPLPVTSRPNHRPGGAPTQTHHHGYSYRGRGRGRGTGGFRSVTKFTEDFDFTAMNEKFKKDEVWGHLGKSKSHSKDNNGEENAFDEDYQDEDNDDVSNIEVKPVYNKDDFFDSLSSNMHGNASQNGRTRYSEQIKIDTETFGDYVRYHGGRGGRGPGRGGRTRGGYYGRGGGYGYSGRGRGRGMPSRTL

SEQ ID NO: 58994 - protein, 440 aa, Glycine max
  peptide (1)..(440): Ceres Seq. ID no. 15176565
MPPMYWQGYYGAPNGLPQLHQQSLLQPPPGLSMPSSMQQPMQYPNFTPPLPTVSSNLPELPSSLLPVSASTPSVTSASLPPNLPPAPSALPPAPSALPPAPSALSPVPSATLASEIFPVSVANKAPNVSTSAAMLASNLPSLALLTNPARDINAIVPAISSKSNAISGSSLPYQSVSQLSPAVVESSTSIHTETSAPSLVTPGQLLKPGPIIVSSAQPSQAPHKDVEVVQVSSTSSPEPSVPVSVETQPPILPLPVTSRPNHRPGGAPTQTHHHGYSYRGRGRGRGTGGFRSVTKFTEDFDFTAMNEKFKKDEVWGHLGKSKSHSKDNNGEENAFDEDYQDEDNDDVSNIEVKPVYNKDDFFDSLSSNMHGNASQNGRTRYSEQIKIDTETFGDYVRYHGGRGGRGPGRGGRTRGGYYGRGGGYGYSGRGRGRGMPSRTL

SEQ ID NO: 58995 - protein, 437 aa, Glycine max
  peptide (1)..(437): Ceres Seq. ID no. 15176566
MYWQGYYGAPNGLPQLHQQSLLQPPPGLSMPSSMQQPMQYPNFTPPLPTVSSNLPELPSSLLPVSASTPSVTSASLPPNLPPAPSALPPAPSALPPAPSALSPVPSATLASEIFPVSVANKAPNVSTSAAMLASNLPSLALLTNPARDINAIVPAISSKSNAISGSSLPYQSVSQLSPAVVESSTSIHTETSAPSLVTPGQLLKPGPIIVSSAQPSQAPHKDVEVVQVSSTSSPEPSVPVSVETQPPILPLPVTSRPNHRPGGAPTQTHHHGYSYRGRGRGRGTGGFRSVTKFTEDFDFTAMNEKFKKDEVWGHLGKSKSHSKDNNGEENAFDEDYQDEDNDDVSNIEVKPVYNKDDFFDSLSSNMHGNASQNGRTRYSEQIKIDTETFGDYVRYHGGRGGRGPGRGGRTRGGYYGRGGGYGYSGRGRGRGMPSRTL

SEQ ID NO: 58996 - DNA, 809 bp, Glycine max
  misc_feature (1)..(809): Ceres Seq. ID no. 15225697
taccgggccccccctcgagtcagctacgtaggccccccccccccttgaaatgttggaagtcaataaaaatttgactgaatttgctatccatggaaacagaatttccttaagttgtttaagcagaataagaaagattttggcaaggaaccaaaaagaagcaaatgaaagagagccaaataagctcaagacggaattatacagacttcaatatgaacaaaagaagattgtcgatgctaaagaaaagctcaaagttcaagaaaaggaaattaacaaagccattgaaactaaggatactttaattaaagatattgaaaaattcaaaaacaatgaaacctataaaaggaaggctttacaagataagattgaagaacaaaagagtgaattatctcgaaagaaaggttttatcagtgataaaaaagatgaattagaaaagatgaaaatcaagcaccaagctgaaatggcagtgttaaaaggggaatatgaaggagccgtgaaaaagaagactgacttagatggtgatttaaagcaaatgcaggaatcaaaggagaagatggaagaggattatatggcaactatcaatcacttgaagggtcaaatcacaaatctcaagaaaaagggagaagaccttaagaagaaagaacaatctcttaatgaagagtttagaatgctcaagatgcattaatattcatattaatcaaaatgaaaacttaagttggtcatttatagatctgttgttattttttttacttttattgtatatggtgaattagttacctttcatactctctaaattcatgaatcaaactatg

SEQ ID NO: 58997 - protein, 210 aa, Glycine max
  peptide (1)..(210): Ceres Seq. ID no. 15225698
MLEVNKNLTEFAIHGNRISLSCLSRIRKILARNQKEANEREPNKLKTELYRLQYEQKKIVDAKEKLKVQEKEINKAIETKDTLIKDIEKFKNNETYKRKALQDKIEEQKSELSRKKGFISDKKDELEKMKIKHQAEMAVLKGEYEGAVKKKTDLDGDLKQMQESKEKMEEDYMATINHLKGQITNLKKKGEDLKKKEQSLNEEFRMLKMH

SEQ ID NO: 58998 - DNA, 1201 bp, Glycine max
  misc_feature (1)..(1201): Ceres Seq. ID no. 15171984
tgaaagactctagcaacaatgaatctgcaggccaactttttgtggatactgctgtatattcacggaatcgttgttttcgtctccctctttcttcaaaagcaggaaaaagatcagttcttctgccaacaaagcgatttaagtgcaaggacttgggtgaagaagacatattcatggcttccttgatctgcaatatggatgttgattgcaaaacgtatctggtctgcaaaacagacttagattgtgtgaaaactatgcattttgatacagaggagaatagtaatgttagtaattccacccaaattccttcagaatttacattgggtactagcacaagtgatgtttcaactacatacttcatgggaaagtcaccattcccatttctggacaaatttatactgtctgttgcctctgtcgggaatataccaggaaacattcatagctggtattatttctcggaatttggattgatggtctacagcatgacaaaaaatagatactgtgagcgaattggcagacagcataaaagcaataatgtgatatatgtggttgatctacgaatggcagtgtattatcagaaatgtcatgatcctgactgcagaggttatcgatctccctcacgtcaaatcccagttcatgtgttctccaatccttcagatgtaattggttcctttgggttgttagatgatgaacagccagtagatgataagttgagacatcaacttgatgacaacaaggagcaaaatcttttacaattcaaagacactgttgaggacaactccaatgattcatggtggctagaagccataagagttgtcgaggatatggaaaataagcaaacaaagacagaggaggtaattgatgaagatgaggagtggtggcaggctgtagaaagtactgcatcccaggttgaacttacctgctccagtcaacaagaactctgcgcaatctaagtcctttggggatttgtacaaagaattttctacttgtgggatcaataaatacttcagataactaaaaaaccagagaagcagcatgttgcacttatctgctgcaaacaaccagaggatcttgtgaattgattctcttgaaggataaaaaaatgctcttgcagaggattcacattcacacacgagctgtaggagcttctctgtaagctgtaaccttttgctatgtatagataaattatcaagccagttctttt

SEQ ID NO: 58999 - protein, 315 aa, Glycine max
  peptide (1)..(315): Ceres Seq. ID no. 15171985
KDSSNNESAGQLFVDTAVYSRNRCFRLPLSSKAGKRSVLLPTKRFKCKDLGEEDIFMASLICNMDVDCKTYLVCKTDLDCVKTMHFDTEENSNVSNSTQIPSEFTLGTSTSDVSTTYFMGKSPFPFLDKFILSVASVGNIPGNIHSWYYFSEFGLMVYSMTKNRYCERIGRQHKSNNVIYVVDLRMAVYYQKCHDPDCRGYRSPSRQIPVHVFSNPSDVIGSFGLLDDEQPVDDKLRHQLDDNKEQNLLQFKDTVEDNSNDSWWLEAIRVVEDMENKQTKTEEVIDEDEEWWQAVESTASQVELTCSSQQELCAI

SEQ ID NO: 59000 - protein, 259 aa, Glycine max
  peptide (1)..(259): Ceres Seq. ID no. 15171986
MASLICNMDVDCKTYLVCKTDLDCVKTMHFDTEENSNVSNSTQIPSEFTLGTSTSDVSTTYFMGKSPFPFLDKFILSVASVGNIPGNIHSWYYFSEFGLMVYSMTKNRYCERIGRQHKSNNVIYVVDLRMAVYYQKCHDPDCRGYRSPSRQIPVHVFSNPSDVIGSFGLLDDEQPVDDKLRHQLDDNKEQNLLQFKDTVEDNSNDSWWLEAIRVVEDMENKQTKTEEVIDEDEEWWQAVESTASQVELTCSSQQELCAI

SEQ ID NO: 59001 - protein, 252 aa, Glycine max
  peptide (1)..(252): Ceres Seq. ID no. 15171987
MDVDCKTYLVCKTDLDCVKTMHFDTEENSNVSNSTQIPSEFTLGTSTSDVSTTYFMGKSPFPFLDKFILSVASVGNIPGNIHSWYYFSEFGLMVYSMTKNRYCERIGRQHKSNNVIYVVDLRMAVYYQKCHDPDCRGYRSPSRQIPVHVFSNPSDVIGSFGLLDDEQPVDDKLRHQLDDNKEQNLLQFKDTVEDNSNDSWWLEAIRVVEDMENKQTKTEEVIDEDEEWWQAVESTASQVELTCSSQQELCAI

SEQ ID NO: 59002 - DNA, 1465 bp, Glycine max
  misc_feature (1)..(1465): Ceres Seq. ID no. 14308103
attgaaatctgataccatgaacaaagatgctatgatcagatcagatgatgctgaatttggagaagcagatcaagatgagcaaaaatatgtagatccattggataaatttctccctcccccatcaaaaactaaatgctctgaggagttacaaagaaaaataaacaaattcctggagtataagaaggctggaaaaagttttaatgcagaagttcgcaacaggaaggactatcgaaaccctgacttcttactgcatgcagtgaggtaccaggatattgatcaaatagggtcttgcttcagtaaagatgtatttgaccctcatggatatgatccaagtgatttctatgatgaaatagaagctgatatgaggcgcgaaagtgagaggaaagagcaagaaaagaagaaagcacagaaggttgaatttatttcggggggtgcacaaccgggaattgtagctagcgcttctaggattagcatgcccattgcaggtgcttctgctgtgactgcaagtggtttgcctttggtgcctcctacagccgattctattaatcgggatggtagacagaataaaaaatcaaaatgggataaggtattcatctaaacaaatgcaatagcaactttagggacattcttcattgtgcttaagaaatttttgtgaaagataggtggatggtgataaaaaaaatcctctgccctctgcggggcaggattctgtatctactattggggttcatgcagccattttatctgctgctaatgccggcggtggatatatgcaatttgcgtaagttgataaacaaccatgaactttcatatgcattctacttctatcttttgattctggttatgctttcaatttctaagatttgattttgggttgacacgttttattgtgtagacattttttaggtgttcgcatttttccaatttgaacttatcaaatctactgaaaaaactagaatctaaattaacatattacttgcagagatttccaaatttaaatattgattttgaatagtcagtcatctatacttaagaaacgtgtttgatgttatttcatgaaattgacagtcaaatggatggaatatccagttctgacaattggcaattagctgatatagttatgtttgatacaataatctcattttgttgaacaggcaacaaaaacgacgggaggctgaggagaaaagatccactgaaaggaggttagagagaaggtcgtgagccattcagtgtggggctgtagtatcgaacattgcggataagctgtggcagagatttctctgaaacattttgtctgttaaataactttggcaatgatcgcagacactgtatatctcgaacttgaaaagaaatttcctgctccaaccgtgcccttagctggaataattcttccaattccagtacttgtgtcccatgatatggttgattgatcggttcgttgctaatgcctaatttttatttgatt

SEQ ID NO: 59003 - protein, 198 aa, Glycine max
  peptide (1)..(198): Ceres Seq. ID no. 14308104
LKSDTMNKDAMIRSDDAEFGEADQDEQKYVDPLDKFLPPPSKTKCSEELQRKINKFLEYKKAGKSFNAEVRNRKDYRNPDFLLHAVRYQDIDQIGSCFSKDVFDPHGYDPSDFYDEIEADMRRESERKEQEKKKAQKVEFISGGAQPGIVASASRISMPIAGASAVTASGLPLVPPTADSINRDGRQNKKSKWDKVFI

SEQ ID NO: 59004 - protein, 193 aa, Glycine max
  peptide (1)..(193): Ceres Seq. ID no. 14308105
MNKDAMIRSDDAEFGEADQDEQKYVDPLDKFLPPPSKTKCSEELQRKINKFLEYKKAGKSFNAEVRNRKDYRNPDFLLHAVRYQDIDQIGSCFSKDVFDPHGYDPSDFYDEIEADMRRESERKEQEKKKAQKVEFISGGAQPGIVASASRISMPIAGASAVTASGLPLVPPTADSINRDGRQNKKSKWDKVFI

SEQ ID NO: 59005 - protein, 188 aa, Glycine max
  peptide (1)..(188): Ceres Seq. ID no. 14308106
MIRSDDAEFGEADQDEQKYVDPLDKFLPPPSKTKCSEELQRKINKFLEYKKAGKSFNAEVRNRKDYRNPDFLLHAVRYQDIDQIGSCFSKDVFDPHGYDPSDFYDEIEADMRRESERKEQEKKKAQKVEFISGGAQPGIVASASRISMPIAGASAVTASGLPLVPPTADSINRDGRQNKKSKWDKVFI

SEQ ID NO: 59006 - DNA, 1415 bp, Glycine max
  misc_feature (1)..(1415): Ceres Seq. ID no. 14308156
aaacagagtgctatttgaaaaattgttctctcaccgtgaaagagagagagaggttaggctatggctgatgagagcgttgttgagtccccagtgaagaggcagagagatgatggtgaagaaaatggtgtctctgtttccatggacgcggagggtggcaaagaccctcttagtaacggtttatcatctgtgattcctgggtggttctctgaaatcagtgcaatgtggcctggagaggctcactccttgaaggtggaaaagattttgtttcaaggaaagtcagaataccaaaatgtcatggtcttccagtcatcaacatatggcaaggttcttgttttggatggagtaattcagctaacagaaagggatgaatgtgcctaccaagaaatgatcactcatcttcctctttgctctattccaaaccctaaaaaggttttggttatcggtggaggtgatggaggggtcatacgagaagtagcacgccattcttcagttgaaaagatagacatttgtgaaattgacaagatggttgttgatgtctccaaacaatacttccctgatgtagctgttgggtatgatgatcctcgtgtgacacttcatattggtgatggagttgcatttttgaaggaagttccagaaggaacttatgatgctgttatagtggattcatccgaccctattggtcctgctcaggagctttttgaaaagcccttctttgcgtcagttgcaaaggctctttgtcccggtggagttgtgtgtactcaggcagaaagcatttggcttcatatggatataattgaggacattgtggccaattgtcgccagatttttaaaggctctgtcaactatgcttggactactgttcctacatacccaagtgggatgattggttttatgctttgctcaactgagggaccacctgttgatttcaagcatccagttaatcccatagatgaaaatgagagtcagaagtcagtaagaccactgaaattttacaactctgagattcatacagcagctttctgtttgccgtcatttgcaaagaggaagattagttctaaagcaaattaaaaagattttcagaacctttgaaggagctcaagtggctgttgtagaagtccaacattcatccttgctgtattggtccatctatcaatgagccttggaataagtcagattaaatttggcattgaatagttaagtttatttctggaaatcaattagcaatcggattaagagtctaggcaatcctaaacggggtttaaaagtgatggcaattatcattatcaacccaagaattacctgttttataatctatctttatattcttattaataagttggagaggggaccaatcgattgacatgattaaatcaactttgaatgccgatcactatcaattggatgccataattttc

SEQ ID NO: 59007 - protein, 335 aa, Glycine max
  peptide (1)..(335): Ceres Seq. ID no. 14308157
MADESVVESPVKRQRDDGEENGVSVSMDAEGGKDPLSNGLSSVIPGWFSEISAMWPGEAHSLKVEKILFQGKSEYQNVMVFQSSTYGKVLVLDGVIQLTERDECAYQEMITHLPLCSIPNPKKVLVIGGGDGGVIREVARHSSVEKIDICEIDKMVVDVSKQYFPDVAVGYDDPRVTLHIGDGVAFLKEVPEGTYDAVIVDSSDPIGPAQELFEKPFFASVAKALCPGGVVCTQAESIWLHMDIIEDIVANCRQIFKGSVNYAWTTVPTYPSGMIGFMLCSTEGPPVDFKHPVNPIDENESQKSVRPLKFYNSEIHTAAFCLPSFAKRKISSKAN

SEQ ID NO: 59008 - protein, 309 aa, Glycine max
  peptide (1)..(309): Ceres Seq. ID no. 14308158
MDAEGGKDPLSNGLSSVIPGWFSEISAMWPGEAHSLKVEKILFQGKSEYQNVMVFQSSTYGKVLVLDGVIQLTERDECAYQEMITHLPLCSIPNPKKVLVIGGGDGGVIREVARHSSVEKIDICEIDKMVVDVSKQYFPDVAVGYDDPRVTLHIGDGVAFLKEVPEGTYDAVIVDSSDPIGPAQELFEKPFFASVAKALCPGGVVCTQAESIWLHMDIIEDIVANCRQIFKGSVNYAWTTVPTYPSGMIGFMLCSTEGPPVDFKHPVNPIDENESQKSVRPLKFYNSEIHTAAFCLPSFAKRKISSKAN

SEQ ID NO: 59009 - protein, 282 aa, Glycine max
  peptide (1)..(282): Ceres Seq. ID no. 14308159
MWPGEAHSLKVEKILFQGKSEYQNVMVFQSSTYGKVLVLDGVIQLTERDECAYQEMITHLPLCSIPNPKKVLVIGGGDGGVIREVARHSSVEKIDICEIDKMVVDVSKQYFPDVAVGYDDPRVTLHIGDGVAFLKEVPEGTYDAVIVDSSDPIGPAQELFEKPFFASVAKALCPGGVVCTQAESIWLHMDIIEDIVANCRQIFKGSVNYAWTTVPTYPSGMIGFMLCSTEGPPVDFKHPVNPIDENESQKSVRPLKFYNSEIHTAAFCLPSFAKRKISSKAN

SEQ ID NO: 59010 - DNA, 1587 bp, Glycine max
  misc_feature (1)..(1587): Ceres Seq. ID no. 15169415
atgaatatgatcatgaaagtattgctgctgatatttctgagctactctgtagcatactcctcatctgcgtttgagtctacaatgcacactaataattgggctgttttggtctgcacgtctcgcttctggtttaattatcggcatatggccaataccctgtcattgtataggacagttaaacggctaggaataccggatgagaggattatactcatgctagcagatgacatggcatgtaatgctagaaacaagtaccctgcccaagtttttaataatgaaaaccatatacttaatctgtatggggataatgttgaggtagactatcgtggctatgaagtgacagtggaaaactttttacgggtacttactggacgtcatgagacatctgttccaaggtccaaacgacttcttagtgatgagggaagtcatattcttctgtatatgacagggcatggaggtgatgagtttttgaagtttcaggattcagaagagcttcaaagtcacgatttagctgatgctgtgaagcaaatgaaagagaagcgcaggtttaaggagcttctgataatggtggacacctgccaagcctctactcttttttcccagcttcattcaccaggtgttttggcaattggaagtagtatgaaaggagaaaattcatattcacatcatttggattcagatgttggcgtttcagttgttgatcgttttacattttacactcttgctttctttgagaggctgaatatgtatgacaatgcttcgttgagcagccttttcaattcatataatccaaatttgttgatgtcgactgcatattacagaatggatatataccaacgctatttaaaggaggtacctgtgacaaacttctttggttctgtaatgaaaacgatacatactgattcagcctacagatcccggtcaaataaaaaaattgaggaagctaaaagcaatatgtctttggatgaatcaatctctgacagtgactcggatgacgaggatcaatttaataatttaactgctgagaaatatctctggtatagtgttggaccactatggagtgctattctcagcaatgccaatacttctgaaagcatcgatactttggtgtgctatggactgcttttaatgcttcctttgctgatattttccacatggctgtcaaagtaaagattggggaaatattccgtaagtttgttagcagagcagacacatttctttgatgctgctagatggcaccgttgcttgaaatgcaatttcacccgaaaaagcagattatttggctgcataatatgtgggacgcaaactactggtagagcagcttcatagttgttgcctatcagctgtattctgttagctattgcttttgccttggtgcagtttattctggtagccattggtgatgttggcttgctgctgctgtcatgtttcgccttgtattttgatgatgattatgattatgattgcaaactgtaaaatttttgtaaaacctcgctctatttttagatattatgttgatttccaacattagaacactgctcttttaagaactcggaaatgaaaatgcttgatcattttatctacttg

SEQ ID NO: 59011 - protein, 389 aa, Glycine max
  peptide (1)..(389): Ceres Seq. ID no. 15169416
MNMIMKVLLLIFLSYSVAYSSSAFESTMHTNNWAVLVCTSRFWFNYRHMANTLSLYRTVKRLGIPDERIILMLADDMACNARNKYPAQVFNNENHILNLYGDNVEVDYRGYEVTVENFLRVLTGRHETSVPRSKRLLSDEGSHILLYMTGHGGDEFLKFQDSEELQSHDLADAVKQMKEKRRFKELLIMVDTCQASTLFSQLHSPGVLAIGSSMKGENSYSHHLDSDVGVSVVDRFTFYTLAFFERLNMYDNASLSSLFNSYNPNLLMSTAYYRMDIYQRYLKEVPVTNFFGSVMKTIHTDSAYRSRSNKKIEEAKSNMSLDESISDSDSDDEDQFNNLTAEKYLWYSVGPLWSAILSNANTSESIDTLVCYGLLLMLPLLIFSTWLSK

SEQ ID NO: 59012 - protein, 387 aa, Glycine max
  peptide (1)..(387): Ceres Seq. ID no. 15169417
MIMKVLLLIFLSYSVAYSSSAFESTMHTNNWAVLVCTSRFWFNYRHMANTLSLYRTVKRLGIPDERIILMLADDMACNARNKYPAQVFNNENHILNLYGDNVEVDYRGYEVTVENFLRVLTGRHETSVPRSKRLLSDEGSHILLYMTGHGGDEFLKFQDSEELQSHDLADAVKQMKEKRRFKELLIMVDTCQASTLFSQLHSPGVLAIGSSMKGENSYSHHLDSDVGVSVVDRFTFYTLAFFERLNMYDNASLSSLFNSYNPNLLMSTAYYRMDIYQRYLKEVPVTNFFGSVMKTIHTDSAYRSRSNKKIEEAKSNMSLDESISDSDSDDEDQFNNLTAEKYLWYSVGPLWSAILSNANTSESIDTLVCYGLLLMLPLLIFSTWLSK

SEQ ID NO: 59013 - protein, 385 aa, Glycine max
  peptide (1)..(385): Ceres Seq. ID no. 15169418
MKVLLLIFLSYSVAYSSSAFESTMHTNNWAVLVCTSRFWFNYRHMANTLSLYRTVKRLGIPDERIILMLADDMACNARNKYPAQVFNNENHILNLYGDNVEVDYRGYEVTVENFLRVLTGRHETSVPRSKRLLSDEGSHILLYMTGHGGDEFLKFQDSEELQSHDLADAVKQMKEKRRFKELLIMVDTCQASTLFSQLHSPGVLAIGSSMKGENSYSHHLDSDVGVSVVDRFTFYTLAFFERLNMYDNASLSSLFNSYNPNLLMSTAYYRMDIYQRYLKEVPVTNFFGSVMKTIHTDSAYRSRSNKKIEEAKSNMSLDESISDSDSDDEDQFNNLTAEKYLWYSVGPLWSAILSNANTSESIDTLVCYGLLLMLPLLIFSTWLSK

SEQ ID NO: 59014 - DNA, 1435 bp, Glycine max
  misc_feature (1)..(1435): Ceres Seq. ID no. 14309678
aaaacgaatctgaaaaagatggatctgaaaccgaaaccctaaaaccaatcatggatccatttccctttccacatttagctaccacgaaacgtaattttaatttctctctcaagagtcattttccgatgaaacgcaccgttcggcccctcttcgcgctcctcctcctcctcgtcttcgctgccaccctcacctcacgcgccgtcctccgccgcggcatcctctccatcgagctcgaatcccgcgtccggatccgccgccctccgccgcagctcaactccacgctcctccaccacgccgccgtcgaaatcggcgaggagaagttcaagcaagagattcagagcctcctcgacggcaacttcggcagccaagcgcgccaccgcaccttcgtctcctggcgccgcttcatccaccatgaccgcggcggcgccgaaggcgccgtggccaacctcccggggacgctccgctcgccgctcttctatcgctactggctcgacttccggaaggtcctccacgactggttccggaagcgacgattccaacccggtatcatgtccgagttgactcggtcaattaagcttccaattgattcacacaacaacaacaaactacaaaccaataacaaaaataaaaacaaatactcttcttgtgccgtagttggaaacagtggaattttgctgaatagaaactacggtagtgaaattgattcccatgaggttgtgataaggttaaacaatgctagggttgatcactttgaaaccaaggttgggaaaaaaactagcatttcattcatgaatagtaacatcttgcatttgtgtgctagaaggggagggtgcttttgccacccttatggtgataacgttccaattgtaatgtacatttgtcaagccgtgcatttcttggactacactgtgtgcaatgcttctcacaaggctcctttgttggtcactgatcctaggtttgatgtgttgtgtgcgaggattgtgaagtactattcgttgaagaggtttgtggaggagagtgggaagggtttggagaagtggggtgaggctcatgatggttctctttttcactactcttcagggatgcaggctgtgatactggctttggggatttgtgatagggttagcatttttgggtttgggaaattggcttctgctaagcaccattaccacactaaccagaaggctgagcttcacttgcatgattatgaggctgagtatgcgttttatagggaccttgtggatgggaatagggctataccgtttcttgaggacaggtttaaggttcctcctgttgttatgtatcagtgataggtgctgaactgctactgctgcaagtggtggtggtggagggcatctgtgacttgttgttctgttattgtaatacttgtgaaatgcacagatagtggaaaaagcaaaaaatactgattcaagac

SEQ ID NO: 59015 - protein, 435 aa, Glycine max
  peptide (1)..(435): Ceres Seq. ID no. 14309679
NESEKDGSETETLKPIMDPFPFPHLATTKRNFNFSLKSHFPMKRTVRPLFALLLLLVFAATLTSRAVLRRGILSIELESRVRIRRPPPQLNSTLLHHAAVEIGEEKFKQEIQSLLDGNFGSQARHRTFVSWRRFIHHDRGGAEGAVANLPGTLRSPLFYRYWLDFRKVLHDWFRKRRFQPGIMSELTRSIKLPIDSHNNNKLQTNNKNKNKYSSCAVVGNSGILLNRNYGSEIDSHEVVIRLNNARVDHFETKVGKKTSISFMNSNILHLCARRGGCFCHPYGDNVPIVMYICQAVHFLDYTVCNASHKAPLLVTDPRFDVLCARIVKYYSLKRFVEESGKGLEKWGEAHDGSLFHYSSGMQAVILALGICDRVSIFGFGKLASAKHHYHTNQKAELHLHDYEAEYAFYRDLVDGNRAIPFLEDRFKVPPVVMYQ

SEQ ID NO: 59016 - protein, 419 aa, Glycine max
  peptide (1)..(419): Ceres Seq. ID no. 14309680
MDPFPFPHLATTKRNFNFSLKSHFPMKRTVRPLFALLLLLVFAATLTSRAVLRRGILSIELESRVRIRRPPPQLNSTLLHHAAVEIGEEKFKQEIQSLLDGNFGSQARHRTFVSWRRFIHHDRGGAEGAVANLPGTLRSPLFYRYWLDFRKVLHDWFRKRRFQPGIMSELTRSIKLPIDSHNNNKLQTNNKNKNKYSSCAVVGNSGILLNRNYGSEIDSHEVVIRLNNARVDHFETKVGKKTSISFMNSNILHLCARRGGCFCHPYGDNVPIVMYICQAVHFLDYTVCNASHKAPLLVTDPRFDVLCARIVKYYSLKRFVEESGKGLEKWGEAHDGSLFHYSSGMQAVILALGICDRVSIFGFGKLASAKHHYHTNQKAELHLHDYEAEYAFYRDLVDGNRAIPFLEDRFKVPPVVMYQ

SEQ ID NO: 59017 - protein, 394 aa, Glycine max
  peptide (1)..(394): Ceres Seq. ID no. 14309681
MKRTVRPLFALLLLLVFAATLTSRAVLRRGILSIELESRVRIRRPPPQLNSTLLHHAAVEIGEEKFKQEIQSLLDGNFGSQARHRTFVSWRRFIHHDRGGAEGAVANLPGTLRSPLFYRYWLDFRKVLHDWFRKRRFQPGIMSELTRSIKLPIDSHNNNKLQTNNKNKNKYSSCAVVGNSGILLNRNYGSEIDSHEVVIRLNNARVDHFETKVGKKTSISFMNSNILHLCARRGGCFCHPYGDNVPIVMYICQAVHFLDYTVCNASHKAPLLVTDPRFDVLCARIVKYYSLKRFVEESGKGLEKWGEAHDGSLFHYSSGMQAVILALGICDRVSIFGFGKLASAKHHYHTNQKAELHLHDYEAEYAFYRDLVDGNRAIPFLEDRFKVPPVVMYQ

SEQ ID NO: 59018 - DNA, 1251 bp, Glycine max
  misc_feature (1)..(1251): Ceres Seq. ID no. 14308152
ataacagagcacaccaacaccaacatcaacattctcattctctctcttttttctttcagttttggctttgatctttcaagttcaatggctggagatatagggagagccttgcctcctcctgattcagaagaattctcaaccttgttcaaccaactcctccacaattctcccccactaggaatggaccccaatcattcaccttctgatttcaccccacacaacaccaccatcaacatcaacagcaacaacaacaacaacactgttccttcctctccctcaaatttcaatttctctgacccccatcattacatccctgcctctgatgccaccaccttcaagcaacacaacatcaaccacaacaacaatcacacccctgatttcacttcttctcatgttgagaagagtgtggaggcatcgaaacctgtcccaccaccacgttcttcgtcaaagaggagtagagctgcagagttccataatttgtctgaaaagagaaggaggagtaggattaacgagaaaatgaaagccttacagaatttaattccaaattccaacaagacagacaaagcttcaatgctagatgaggccatagaatatttaaagcagctccagcttcaagtgcaaatgttaatgatgagaaatggtttgagcttgcatccaatgtctttgccaggaggactaagacctatgataatgcctcagactggattgaatcttgatgggagtaatggatttcagaattctacctgtgcaattgcctcatcttcaaatgatgaaagcttggtgcggcatgcctttagttttccaaagcaatgcagcatctcaaataagtctattggtgtaccctccgtgaaaaacatagcaacttcggatacctcatccacttttcatccctctattaaggatgcactctacggcaacatgccacaaccgtttatggatacaacaaagattggaaaaccctctccagacgtgtcttaaacagctcgatttcattgagggagaaaagaattttttagatggcaagtcgcctcgtaaaagggtagctttgttcaggcattataatctacatttaaatctgctgactatatgacactccattgggttgttcctggtgcagtttaatttgtagcagtttgacagagtctttgtgccattgttgacacttgcataaaaatgtacaagtattttataacttcatcaattgcaaaatgcagctaatgaacattctgcaacatgttgtgactgacttgt

SEQ ID NO: 59019 - protein, 325 aa, Glycine max
  peptide (1)..(325): Ceres Seq. ID no. 14308153
ITEHTNTNINILILSLFSFSFGFDLSSSMAGDIGRALPPPDSEEFSTLFNQLLHNSPPLGMDPNHSPSDFTPHNTTININSNNNNNTVPSSPSNFNFSDPHHYIPASDATTFKQHNINHNNNHTPDFTSSHVEKSVEASKPVPPPRSSSKRSRAAEFHNLSEKRRRSRINEKMKALQNLIPNSNKTDKASMLDEAIEYLKQLQLQVQMLMMRNGLSLHPMSLPGGLRPMIMPQTGLNLDGSNGFQNSTCAIASSSNDESLVRHAFSFPKQCSISNKSIGVPSVKNIATSDTSSTFHPSIKDALYGNMPQPFMDTTKIGKPSPDVS

SEQ ID NO: 59020 - protein, 297 aa, Glycine max
  peptide (1)..(297): Ceres Seq. ID no. 14308154
MAGDIGRALPPPDSEEFSTLFNQLLHNSPPLGMDPNHSPSDFTPHNTTININSNNNNNTVPSSPSNFNFSDPHHYIPASDATTFKQHNINHNNNHTPDFTSSHVEKSVEASKPVPPPRSSSKRSRAAEFHNLSEKRRRSRINEKMKALQNLIPNSNKTDKASMLDEAIEYLKQLQLQVQMLMMRNGLSLHPMSLPGGLRPMIMPQTGLNLDGSNGFQNSTCAIASSSNDESLVRHAFSFPKQCSISNKSIGVPSVKNIATSDTSSTFHPSIKDALYGNMPQPFMDTTKIGKPSPDVS

SEQ ID NO: 59021 - protein, 265 aa, Glycine max
  peptide (1)..(265): Ceres Seq. ID no. 14308155
MDPNHSPSDFTPHNTTININSNNNNNTVPSSPSNFNFSDPHHYIPASDATTFKQHNINHNNNHTPDFTSSHVEKSVEASKPVPPPRSSSKRSRAAEFHNLSEKRRRSRINEKMKALQNLIPNSNKTDKASMLDEAIEYLKQLQLQVQMLMMRNGLSLHPMSLPGGLRPMIMPQTGLNLDGSNGFQNSTCAIASSSNDESLVRHAFSFPKQCSISNKSIGVPSVKNIATSDTSSTFHPSIKDALYGNMPQPFMDTTKIGKPSPDVS

SEQ ID NO: 59022 - DNA, 1389 bp, Glycine max
  misc_feature (1)..(1389): Ceres Seq. ID no. 14312328
gaagagagagcgcattaccaaaccccccaaagaacacgttcactctcgattttgccttgcaaattgcgatttctctgcagtttcttccatcctccaactctgacctttcttgacgcgattttggtttttgtcaacttcttattgaaacccttcttcagtcttctcccatttccagagttcttataaattgatgctttttacaagtctttctgaacattccgtttccttcctccaggaaaagttagcgtgtccttaggtcacataggattttgagaaatttactttttaatttgcctctgaattaattctgcaagaagagagataatgtctggttcaaagaaatctcctttgaaggttgctaagcctagctctgctgaatcttggacgaatccatttgattctgatgatgagggaaaggatagcaaaaaatatagttcctctagaaaaacttcttcggagcgcgcacttgctacactggaagttaacaccaacccctttgatgatgatattgatgccaataagaaatcttcatcaacttcgtatgcctttcaatctgccaaccggaacaggtataagaatgattttcgtgactctggtggattagagaatcaatcggttcaagaactggagagttatgctgtttacaaggctgaagagactacaaattcagtcaacaattgtttgaagatagcagagaacataagagaggatgctaccaagacactagtcacccttgaacaacagggtgaacaaattaccaggagtcaccatgttgctgctgacattgatcacgatttaagtcggggagaaaagctcttgggaagccttggtggcctcttctccaaaacttggaaaccaaagaagacacgagcaataaccggccctgttattgttggagatgatccggtcaggagaaaggacaatcacttggagcagagagacaagttgggactgacctctgcacccaaagggcagtccaagctacggaccccccctccagaaccaacaaatgcacttgaaaaagttgaggttgaaaaaaagaagcaagatgatgcactatcagatttaagtgatctgttgggagagcttaaagacatggctgttgacatgggatccgagattgagaggcataacaaagccctgaatcatctatacgatgatgtggatgagttgaatttccgagtgaaaggtgctaatcaacgtggccgtcgtttgctcggaaaataagattgattgatttcatcattgtgtttttctctttgtatccatcatctggtttaatgaaggcaatcttttcatttagtttatacttgtgttgcattatatataaaatatgcaacagattaaataagtctgggtgcaatactacataattcaatttgttgattt

SEQ ID NO: 59023 - protein, 300 aa, Glycine max
  peptide (1)..(300): Ceres Seq. ID no. 14312329
MSGSKKSPLKVAKPSSAESWTNPFDSDDEGKDSKKYSSSRKTSSERALATLEVNTNPFDDDIDANKKSSSTSYAFQSANRNRYKNDFRDSGGLENQSVQELESYAVYKAEETTNSVNNCLKIAENIREDATKTLVTLEQQGEQITRSHHVAADIDHDLSRGEKLLGSLGGLFSKTWKPKKTRAITGPVIVGDDPVRRKDNHLEQRDKLGLTSAPKGQSKLRTPPPEPTNALEKVEVEKKKQDDALSDLSDLLGELKDMAVDMGSEIERHNKALNHLYDDVDELNFRVKGANQRGRRLLGK

SEQ ID NO: 59024 - DNA, 1157 bp, Glycine max
  misc_feature (1)..(1157): Ceres Seq. ID no. 14304136
attcacattcatcacaactcacctcacccagctagctagcttcataaggttaattagatttttttcgtggaaacaaagatctcaatacttgtgatatcatgacgatgatgagcagcaacaacaacaacaacaacaacaacgttggagaatttggagacaccactctgactaaggtttttgttgggggcttagcttgggagactccgaaggatgccctcaaagaccactttgagaagtatggtgagatccttgaagctgtcatcatttccgataagcacactgccaaatccaaaggctatggctttgtgactttcaaggaggctgaggctgccaagaaggcttgtgaggattcagcaactctcgttatcaatggccgtcgagcaaattgcaatcttgcttgcctaggtgctcgtcgcccaaggtcttcttccaatgtttcaccacctccacaaccacaaggaggatcaaacggtggagtagtgaagaacaatgcatcaagcccaccagccattaatcacgtgcagccatattattatccagtgaggacaactgctgctctgccattccataatcacactcttcctttctatgggtatgcgcctacctacattgtgacggacgtaaactacaattacaatcagaaactgtgctatggtagcggtgggacctacatgaatgggcagcatgtgtacccgaggcaggctattgtgggtgccaacacactgatgccaatgtaccctctttatcagtatcatcatccaacggagaccataggtgtaccagctcacaacttttatccaacggcatcatgggccccaatgaccatcatgtccaagccatcgtctatcgttcctcatacaggtacagttggcacaggtgagtgctttaaaagggttgtctgagaggagcttggttggctaaataacagcagagggagggaaaatggtggtggtggccgcacagagcaacattattatctgatctgtcttggctttactttccttttttttgttgttgtctttaaatattgtttcatttttagttgttaatcttaggcattttgttgttgatgagattctttcattctctttttctgtctaacatctcagcatgtgctgtgcacagttacattcagttgaaattatcgatttgttctc

SEQ ID NO: 59025 - protein, 267 aa, Glycine max
  peptide (1)..(267): Ceres Seq. ID no. 14304137
MTMMSSNNNNNNNNVGEFGDTTLTKVFVGGLAWETPKDALKDHFEKYGEILEAVIISDKHTAKSKGYGFVTFKEAEAAKKACEDSATLVINGRRANCNLACLGARRPRSSSNVSPPPQPQGGSNGGVVKNNASSPPAINHVQPYYYPVRTTAALPFHNHTLPFYGYAPTYIVTDVNYNYNQKLCYGSGGTYMNGQHVYPRQAIVGANTLMPMYPLYQYHHPTETIGVPAHNFYPTASWAPMTIMSKPSSIVPHTGTVGTGECFKRVV

SEQ ID NO: 59026 - protein, 265 aa, Glycine max
  peptide (1)..(265): Ceres Seq. ID no. 14304138
MMSSNNNNNNNNVGEFGDTTLTKVFVGGLAWETPKDALKDHFEKYGEILEAVIISDKHTAKSKGYGFVTFKEAEAAKKACEDSATLVINGRRANCNLACLGARRPRSSSNVSPPPQPQGGSNGGVVKNNASSPPAINHVQPYYYPVRTTAALPFHNHTLPFYGYAPTYIVTDVNYNYNQKLCYGSGGTYMNGQHVYPRQAIVGANTLMPMYPLYQYHHPTETIGVPAHNFYPTASWAPMTIMSKPSSIVPHTGTVGTGECFKRVV

SEQ ID NO: 59027 - protein, 264 aa, Glycine max
  peptide (1)..(264): Ceres Seq. ID no. 14304139
MSSNNNNNNNNVGEFGDTTLTKVFVGGLAWETPKDALKDHFEKYGEILEAVIISDKHTAKSKGYGFVTFKEAEAAKKACEDSATLVINGRRANCNLACLGARRPRSSSNVSPPPQPQGGSNGGVVKNNASSPPAINHVQPYYYPVRTTAALPFHNHTLPFYGYAPTYIVTDVNYNYNQKLCYGSGGTYMNGQHVYPRQAIVGANTLMPMYPLYQYHHPTETIGVPAHNFYPTASWAPMTIMSKPSSIVPHTGTVGTGECFKRVV

SEQ ID NO: 59028 - DNA, 1413 bp, Glycine max
  misc_feature (1)..(1413): Ceres Seq. ID no. 13581611
aaagtgggaagaaatagttaagtagcacggtaggcgcagtaggccacagtcacacacagcctttgcctttgcctttgctgttcagtgctcccactcccagtccgggccgaggcagaaaatatcggaaactaacctttcacactcacacatccatcgtcatatctgaattggcaactcattattaaatcaattacgaaaacgaagaaacccaacaaaacaatggtagtagcttagctaattgcctaattgaatgaatctcaatggaacctcctctcatcaacgactccacattctcttccgctaacccttccttgtccgagatttggccctctcattttcccacagaccacactcccagtaacaagagacacctctccccctcgactgattgtggcagcaataaacatatcaaatcatcaggatcaggatcccaggatcaaaacggtgccttgaaggcgggtgaagtggacgcgacttcagtagccggtaacaagttacccgaacaaacggcgaaacctagttcttccgagcagccacctaagcaagactatatacacgtgcgagctagaagaggccaagccaccgatagccacagtctcgctgagagagctaggagagaaaagatcagtgagaggatgaaaattcttcaagatatagttcccggctgcaacaaggtaattggtaaagcacttgtgctggatgagataattaattatatccagtcactgcagcatcaggttgagttcctttctatgaagcttgaggcagttaattcgagattgagcatgagccctactattgaatgttttccttcaaaagaagttggcactcagccatttgaccttgccggaataatatttggatcacaaccggccaggggatatgctcaaggatcacagccgggatggctgcatatgcagatagctggtggttttgagaaagcaacataatttgagggaggttcattgggaatgacagaccaatcagtgtggttggttttccattgaaaaggaaaaagtcacttggctggttggttagcatgcgctgctctattaacaacctagtcaattgatgcaaaatgttgtaaggtctgtatgttctttgtcatagtatgatatcaatagtaagaaatgcatctaatttccttgcgcatcatctgactgggaacgtagtgtttcaccatgttagcaattgaaataatcttattgtggtttagttttcgtttcaaaactctggtgtggtaggattcttctctcctgatttgttctatcacaattcatatatgattagcaagatattattcgcgttagggacagtatgaaaattgccccaaggtcgtaattgagtccttgtctgaagttcaaatgtttgattgcgactaaacaagtaatatgttaatgtcaaatgtttgag

SEQ ID NO: 59029 - protein, 229 aa, Glycine max
  peptide (1)..(229): Ceres Seq. ID no. 13581612
MEPPLINDSTFSSANPSLSEIWPSHFPTDHTPSNKRHLSPSTDCGSNKHIKSSGSGSQDQNGALKAGEVDATSVAGNKLPEQTAKPSSSEQPPKQDYIHVRARRGQATDSHSLAERARREKISERMKILQDIVPGCNKVIGKALVLDEIINYIQSLQHQVEFLSMKLEAVNSRLSMSPTIECFPSKEVGTQPFDLAGIIFGSQPARGYAQGSQPGWLHMQIAGGFEKAT

SEQ ID NO: 59030 - DNA, 1470 bp, Glycine max
  misc_feature (1)..(1470): Ceres Seq. ID no. 14308107
aaaaaagttctattccttcgtctgcaaccctagctttccgttgtttgcaaatctatggctggtgaatctgataaacccgaaaacaccctctcttgtgctaactgtggcaaacctgcgaatcttcagtgtccaaaatgtatggaattgaagcttcctcgagaaggtgctgccttctgctctcaggattgtttcaagtcttcatggagctcgcacaaatcagtgcatctgaaggcaaaactatccccacctggcacacaaaattcagactcacttgatgaaggttggttatattgtttgaagagagggcaggctcgaacgccaaagcttcctcactttgattggacaggaccactgcagccatatcccatttctagtaaacggattgtcccagatcaaattgataaacctgattgggctggtgatggaacacccaaaattgagcccaatagtagtctacagcataccattgaggtcaaaactccagatcaaatagagagaatgagggaaacttgtcggattgcaagggaggtgttggatgcagctgctcggattattcagcctggtgtgacgactgatgagattgacagagttgttcatgaggcaactattgctgcaggaggatatccatcgcctctcaattaccatttcttccctaaatcttgctgcacgtcagttaatgaagtaatctgtcatggaattcctgatgcaaggaagcttgaggatggtgacattgtaaatgttgatgtcactgtgtactataaaggtgttcatggtgatctcaatgaaacatactttgtgggaaatgttgatgaagagtctctccaactagtaaaatgcacatatgagtgcctggagaaggcaatatccattgttaaacctgggatacgattccgtgagattggtgaagtcattaatcgtcatgcttcaatgtctggattctcggtggtaaaatcttattgtggtcatggaattggagagctcttccattgtgcaccaaacattcctcattattcaagaaataaagcagttggtgtgatgaaggctggacagacctttacaattgaaccaatgatcaatgccggtgtctggcgtgatcgaatgtggcctgatggatggactgctgttacagcggatggtaaacgaagtgctcaatttgagcacactcttttggtgacagagactggtgttgaagttttaacagggcggttgcagacatcacccaatgtttttccttggctaggttcataattgggtgaatcatggagacagatgctggcagtgtctaaataccatacaattattagacgacatttctttgatctatttctctgattgcctcctttgggtatcatgtttgtaagttatacaaaaaacagaagcaaattcaattgagtttaggtgaaaagtatgcttaatgatatgtttgtgtaattgaagaaaatttaattttagaattttgtcttgctttcc

SEQ ID NO: 59031 - protein, 397 aa, Glycine max
  peptide (1)..(397): Ceres Seq. ID no. 14308108
MAGESDKPENTLSCANCGKPANLQCPKCMELKLPREGAAFCSQDCFKSSWSSHKSVHLKAKLSPPGTQNSDSLDEGWLYCLKRGQARTPKLPHFDWTGPLQPYPISSKRIVPDQIDKPDWAGDGTPKIEPNSSLQHTIEVKTPDQIERMRETCRIAREVLDAAARIIQPGVTTDEIDRVVHEATIAAGGYPSPLNYHFFPKSCCTSVNEVICHGIPDARKLEDGDIVNVDVTVYYKGVHGDLNETYFVGNVDEESLQLVKCTYECLEKAISIVKPGIRFREIGEVINRHASMSGFSVVKSYCGHGIGELFHCAPNIPHYSRNKAVGVMKAGQTFTIEPMINAGVWRDRMWPDGWTAVTADGKRSAQFEHTLLVTETGVEVLTGRLQTSPNVFPWLGS

SEQ ID NO: 59032 - protein, 369 aa, Glycine max
  peptide (1)..(369): Ceres Seq. ID no. 14308109
MELKLPREGAAFCSQDCFKSSWSSHKSVHLKAKLSPPGTQNSDSLDEGWLYCLKRGQARTPKLPHFDWTGPLQPYPISSKRIVPDQIDKPDWAGDGTPKIEPNSSLQHTIEVKTPDQIERMRETCRIAREVLDAAARIIQPGVTTDEIDRVVHEATIAAGGYPSPLNYHFFPKSCCTSVNEVICHGIPDARKLEDGDIVNVDVTVYYKGVHGDLNETYFVGNVDEESLQLVKCTYECLEKAISIVKPGIRFREIGEVINRHASMSGFSVVKSYCGHGIGELFHCAPNIPHYSRNKAVGVMKAGQTFTIEPMINAGVWRDRMWPDGWTAVTADGKRSAQFEHTLLVTETGVEVLTGRLQTSPNVFPWLGS

SEQ ID NO: 59033 - protein, 249 aa, Glycine max
  peptide (1)..(249): Ceres Seq. ID no. 14308110
MRETCRIAREVLDAAARIIQPGVTTDEIDRVVHEATIAAGGYPSPLNYHFFPKSCCTSVNEVICHGIPDARKLEDGDIVNVDVTVYYKGVHGDLNETYFVGNVDEESLQLVKCTYECLEKAISIVKPGIRFREIGEVINRHASMSGFSVVKSYCGHGIGELFHCAPNIPHYSRNKAVGVMKAGQTFTIEPMINAGVWRDRMWPDGWTAVTADGKRSAQFEHTLLVTETGVEVLTGRLQTSPNVFPWLGS

SEQ ID NO: 59034 - DNA, 1302 bp, Glycine max
  misc_feature (1)..(1302): Ceres Seq. ID no. 15177611
agaatattcttcttcctccaccgcgattagggttttcggattttcactttactctcacttcttccaccctcgtcacctgcaattgatttttttttcttccaatcgataattgaagaacacgacattccaattcctctctcgattcgtttcgctagctcgataatcaaaagtgcctggtgattcggagttgtttgtgaaaatgagaaggcaggggcactatggggatccatctgccaacacttgtgttggtggtggccagatgcatcatatggctggtcaaaggggggaggccaagtcgggtaattttgaaggacggctagaggcctttactccagaaagagagaatccgtatggaaattccaagccggagggtcagtggagatgggagatggatgaatcgaagatgtccaattcaatggcatctcgaatgtttaatgaaggtcaaggggttgatgcttcaaagccctattttcaagggcagagccggaacaatagtgattccagatctcaggctcatgaagaagatatggatgttagatatgaaggagaacatttatcacaatcttttgaaggtcttgagcagaattttcatgatgacatcattaaactcaccaaagaacagaatgatgctgaagatgcagcatatgccagacacagagagaaaataaatgcaatcaatgctcagtatgaagaaaaactagcagcactccgagctcagcatagcagccgcagagctgaatttcttcaaagggaatcacatgctacgcaacagcagtaccagcaaatcataagggatccttacctcggtggtggcatggcaccccgagaccctcatgcaccccgagaccctcatgcaccccgagatcctcatggttacaacaatgtgaatgattcaggtgcaggtggagaagtgcaacgaggctattctgccgatcactttgatccttaccgagagagagctcgatttcttgggggtggtagagatcaaggatttgaacctagaggcccatatcctggtggccgtgtctatgacactggttcacgctactacaattgagttttgacccaaaggtttatctccattttgggtttctactgcaggtgaaaatgcttaaattgacataatttatgctttgtcatcttaccatctttttactaccctgtttatggaaattaacgtttcttagcggctgttatttatatagatcaacattggagttgcacaccgttatattggtgttgtgcattaaaacgtaggatatttgttgtttgtgtttatgaaaaccaataacattcaacacc

SEQ ID NO: 59035 - protein, 285 aa, Glycine max
  peptide (1)..(285): Ceres Seq. ID no. 15177612
MRRQGHYGDPSANTCVGGGQMHHMAGQRGEAKSGNFEGRLEAFTPERENPYGNSKPEGQWRWEMDESKMSNSMASRMFNEGQGVDASKPYFQGQSRNNSDSRSQAHEEDMDVRYEGEHLSQSFEGLEQNFHDDIIKLTKEQNDAEDAAYARHREKINAINAQYEEKLAALRAQHSSRRAEFLQRESHATQQQYQQIIRDPYLGGGMAPRDPHAPRDPHAPRDPHGYNNVNDSGAGGEVQRGYSADHFDPYRERARFLGGGRDQGFEPRGPYPGGRVYDTGSRYYN

SEQ ID NO: 59036 - protein, 265 aa, Glycine max
  peptide (1)..(265): Ceres Seq. ID no. 15177613
MHHMAGQRGEAKSGNFEGRLEAFTPERENPYGNSKPEGQWRWEMDESKMSNSMASRMFNEGQGVDASKPYFQGQSRNNSDSRSQAHEEDMDVRYEGEHLSQSFEGLEQNFHDDIIKLTKEQNDAEDAAYARHREKINAINAQYEEKLAALRAQHSSRRAEFLQRESHATQQQYQQIIRDPYLGGGMAPRDPHAPRDPHAPRDPHGYNNVNDSGAGGEVQRGYSADHFDPYRERARFLGGGRDQGFEPRGPYPGGRVYDTGSRYYN

SEQ ID NO: 59037 - protein, 262 aa, Glycine max
  peptide (1)..(262): Ceres Seq. ID no. 15177614
MAGQRGEAKSGNFEGRLEAFTPERENPYGNSKPEGQWRWEMDESKMSNSMASRMFNEGQGVDASKPYFQGQSRNNSDSRSQAHEEDMDVRYEGEHLSQSFEGLEQNFHDDIIKLTKEQNDAEDAAYARHREKINAINAQYEEKLAALRAQHSSRRAEFLQRESHATQQQYQQIIRDPYLGGGMAPRDPHAPRDPHAPRDPHGYNNVNDSGAGGEVQRGYSADHFDPYRERARFLGGGRDQGFEPRGPYPGGRVYDTGSRYYN

SEQ ID NO: 59038 - DNA, 1051 bp, Glycine max
  misc_feature (1)..(1051): Ceres Seq. ID no. 15227118
aactgggcccatagaattgttaatttctctgatcccattgtgaatttgtggggatctgaattgcggaggaagatgattcagcttctgttcacggtgatattttcggaggcttcgatgatagcgttgctgctgttcaagacccctttgaggaagctcgtgataatgggcttggatcggttgaagcgaggtcgtggacccttgatggtgaagaccgttgcagggaccgttctcgtggtgttgttgtcgagtgtgtatagcatgttgaagattcagaagcgtgggatccaagagggtgctgttgttaaccccaccgatcaggttcttatggccaagcacctcctcgaagcaacgctcatggttgctgtccttttccttgcacttatgatagacagactacatcattacataagagaactgcggattcgaagaaaaggcatggaagctgtgaagaaacaaaccagagggactgaagatgggaaagttgcaaattcagaagaaattaagtctgtggaggaagaaagagccagattgagagctgaacttagccgccttgaatctgaactacagtcaaaaacaaaagacgtagatggtgctgaagccaatatagctgctctgagaaaacaatctgaggggttccttcttgagtatgatcgcttacttgaggaaaaccagaacctccgcaaccaactacaatccttggacaggaaattgtcacattcaggttccaagaagaatatgtaagaaaattgcaggtaagaatggcttcttttgtatactcttaaggaattccatggcagtttgttgataacagcttgtcaatccctgtaagcttgctcctaaaggaatacgattttcacttttgagttgaatttggttcaattttgttctgacaaattgtgaatttttttttagtgataacagaaaatatagtgctgatttgtttttttctgcacataatgtaacttctgcaacttctgttccactatttaagattcgacaactgaagggatgtgcccacgattattgtttgatgtcaaaaaaaaaaaaaaaa

SEQ ID NO: 59039 - protein, 246 aa, Glycine max
  peptide (1)..(246): Ceres Seq. ID no. 15227119
NWAHRIVNFSDPIVNLWGSELRRKMIQLLFTVIFSEASMIALLLFKTPLRKLVIMGLDRLKRGRGPLMVKTVAGTVLVVLLSSVYSMLKIQKRGIQEGAVVNPTDQVLMAKHLLEATLMVAVLFLALMIDRLHHYIRELRIRRKGMEAVKKQTRGTEDGKVANSEEIKSVEEERARLRAELSRLESELQSKTKDVDGAEANIAALRKQSEGFLLEYDRLLEENQNLRNQLQSLDRKLSHSGSKKNM

SEQ ID NO: 59040 - protein, 222 aa, Glycine max
  peptide (1)..(222): Ceres Seq. ID no. 15227120
MIQLLFTVIFSEASMIALLLFKTPLRKLVIMGLDRLKRGRGPLMVKTVAGTVLVVLLSSVYSMLKIQKRGIQEGAVVNPTDQVLMAKHLLEATLMVAVLFLALMIDRLHHYIRELRIRRKGMEAVKKQTRGTEDGKVANSEEIKSVEEERARLRAELSRLESELQSKTKDVDGAEANIAALRKQSEGFLLEYDRLLEENQNLRNQLQSLDRKLSHSGSKKNM

SEQ ID NO: 59041 - protein, 208 aa, Glycine max
  peptide (1)..(208): Ceres Seq. ID no. 15227121
MIALLLFKTPLRKLVIMGLDRLKRGRGPLMVKTVAGTVLVVLLSSVYSMLKIQKRGIQEGAVVNPTDQVLMAKHLLEATLMVAVLFLALMIDRLHHYIRELRIRRKGMEAVKKQTRGTEDGKVANSEEIKSVEEERARLRAELSRLESELQSKTKDVDGAEANIAALRKQSEGFLLEYDRLLEENQNLRNQLQSLDRKLSHSGSKKNM

SEQ ID NO: 59042 - protein, 192 aa, Glycine max
  peptide (1)..(192): Ceres Seq. ID no. 15227122
MGLDRLKRGRGPLMVKTVAGTVLVVLLSSVYSMLKIQKRGIQEGAVVNPTDQVLMAKHLLEATLMVAVLFLALMIDRLHHYIRELRIRRKGMEAVKKQTRGTEDGKVANSEEIKSVEEERARLRAELSRLESELQSKTKDVDGAEANIAALRKQSEGFLLEYDRLLEENQNLRNQLQSLDRKLSHSGSKKNM

SEQ ID NO: 59043 - DNA, 1325 bp, Glycine max
  misc_feature (1)..(1325): Ceres Seq. ID no. 13594168
atttttcactacttcacttgactagtccaattatctgatgccatatcaaaaccatgtctgacccttctaccctcttaccctcctcccaccaccaccacaaccaccatgtgccactcatccaaggcggcgccaccgcaccctcctcctcctccaccaccctagcccgagaataccgcaagggcaactggaccatccaagagaccctcattctcaccactgcaaaaaagctcgacgacgagcgcaggctcaaaacccctgctgcatgtagcacctccaccaccaccaccagaaccagcggcgagctccggtggaaatgggtggagaactattgctggagccatggctgcttgcgaagccagaaccaatgcaacgacaaatgggacaacctcctccgcgattacaaaaaggttcgcgactacgagtccaaatcaaacgacaacgacaacaacaacaacaaacacttcccttcttattggaccctcaacaaacaacaacgtaaggaacagaacctcccctccaacatggtcttcgaagtctaccaaaccatcgccgatgtcctccaacgaaaacaaacacaatcccaaagacaacatcaacaacctctggctattccattagttacttcctcaccctcaccacttcaaacacttccaccacctcctctaccaccaccgccgcctccgccacctcctcctccgccagttagctccaccactccggtaggctcagagagatcggaatcatcaggaactgagcacagtgaggatgatgatgatgggtcggaatcaaaacgtaggaaagttaagaaccttggttcaagaataatgcaaagtgcatcggtgttggcacgagctcttaggagttgtgaggagaagaaggagaaacggcaccgtgaaatgattgagctggagcaaaggaggattcagatggaggaagctcggaatgaggttcaccggcaaggcatcgcgacccttgtcgccgccgtcaccaacctttccggtgccattgagtcactcattaataattctgaacgccatggccaaagataattaattaatatggcaccatataataataataatatatgcttcctcgcctagctagcagtttattattattatgtgattgatcagaaaatcatataatatctatcggccattctttccctcttcaaattcaattgttgtctaatatttttgagtcggttttaccaccaattgatttctcatgattatatgtcagcagctgatatgtgatcgatccatatggtatatgtttcattattctttggtggagatcaaaccaagccctaacattgattgttt

SEQ ID NO: 59044 - protein, 331 aa, Glycine max
  peptide (1)..(331): Ceres Seq. ID no. 13594169
MSDPSTLLPSSHHHHNHHVPLIQGGATAPSSSSTTLAREYRKGNWTIQETLILTTAKKLDDERRLKTPAACSTSTTTTRTSGELRWKWVENYCWSHGCLRSQNQCNDKWDNLLRDYKKVRDYESKSNDNDNNNNKHFPSYWTLNKQQRKEQNLPSNMVFEVYQTIADVLQRKQTQSQRQHQQPLAIPLVTSSPSPLQTLPPPPLPPPPPPPPPPPPVSSTTPVGSERSESSGTEHSEDDDDGSESKRRKVKNLGSRIMQSASVLARALRSCEEKKEKRHREMIELEQRRIQMEEARNEVHRQGIATLVAAVTNLSGAIESLINNSERHGQR

SEQ ID NO: 59045 - protein, 175 aa, Glycine max
  peptide (1)..(175): Ceres Seq. ID no. 13594170
MVFEVYQTIADVLQRKQTQSQRQHQQPLAIPLVTSSPSPLQTLPPPPLPPPPPPPPPPPPVSSTTPVGSERSESSGTEHSEDDDDGSESKRRKVKNLGSRIMQSASVLARALRSCEEKKEKRHREMIELEQRRIQMEEARNEVHRQGIATLVAAVTNLSGAIESLINNSERHGQR

SEQ ID NO: 59046 - DNA, 1278 bp, Glycine max
  misc_feature (1)..(1278): Ceres Seq. ID no. 15175857
gtactcaaaccctaatccccaataaaaacacactcaaaaacccttttttttttcttattcatcctctagttcttctttgacattcacaatgccttcaattccagaagagccattgttggcaccgaacccggaccggttctgcatgttcccaatccaatatcctcaaatctgggaaatgtacaagaaagccgaagcctcgttctggacggcggaggaggtggacctctcgcaggacctccgccactgggactccctgaccgacggcgagcgccacttcgtcagtcacgtcctcgccttcttcgccgcctccgacggcatcgtacttgagaacctcgctgggcgcttcacgaaggaaatccaaatccccgaggcccgcgccttctacggcttccagatcgccatcgagaacattcactccgagatgtacagcctcctcctcgaaacctacatcaaggactcctcccagaagagccacctcttccgcgccatcgacaccatcccgtgcgttaccaagaaagcccagtgggccctacgctggatcgattcttccgactccttcgccgagcgtctcgttgccttcgcatgtgtggaaggtatcttcttctccggaagcttctgcgctgtcttctggctcaaaaaacgtggactcatgcccgggctcactttctcaaatgaactaatatcacgcgatgaaggtcttcattgtgatttcgcgtgtcttttatactctctgctgagacagaagctcaccgaggagcgcgtaagggagattgtgaaggacgcggtggacattgaacgggagtttgtgtgcgacgcgcttccctgcgcgttggtggggatgaacggtgatttgatgagccagtacattgaatttgttgcggatcggttgctgggtgcgctagggtgcgggaaggtgtacaatgttcagaatccgttcgattggatggagctgatttctctgcaggggaagaccaacttcttcgagaagcgcgtcggggaatatcagaaggcttctgttatgtccagcttgaacgggaacggtggtgggaaccacgtgttcaagatggatgaggatttctaatttattattatgggaatgagaattaggtttaggggcgaatgctgataatgatagtatttctgtattgttaaatatatttacgtttttttttcttttttacttttttagcatactatttattttttttgtaatggttattgttcatttgttgtttttgatctctctccttcagcaatgggatgctaaattatactttc

SEQ ID NO: 59047 - protein, 330 aa, Glycine max
  peptide (1)..(330): Ceres Seq. ID no. 15175858
MPSIPEEPLLAPNPDRFCMFPIQYPQIWEMYKKAEASFWTAEEVDLSQDLRHWDSLTDGERHFVSHVLAFFAASDGIVLENLAGRFTKEIQIPEARAFYGFQIAIENIHSEMYSLLLETYIKDSSQKSHLFRAIDTIPCVTKKAQWALRWIDSSDSFAERLVAFACVEGIFFSGSFCAVFWLKKRGLMPGLTFSNELISRDEGLHCDFACLLYSLLRQKLTEERVREIVKDAVDIEREFVCDALPCALVGMNGDLMSQYIEFVADRLLGALGCGKVYNVQNPFDWMELISLQGKTNFFEKRVGEYQKASVMSSLNGNGGGNHVFKMDEDF

SEQ ID NO: 59048 - protein, 312 aa, Glycine max
  peptide (1)..(312): Ceres Seq. ID no. 15175859
MFPIQYPQIWEMYKKAEASFWTAEEVDLSQDLRHWDSLTDGERHFVSHVLAFFAASDGIVLENLAGRFTKEIQIPEARAFYGFQIAIENIHSEMYSLLLETYIKDSSQKSHLFRAIDTIPCVTKKAQWALRWIDSSDSFAERLVAFACVEGIFFSGSFCAVFWLKKRGLMPGLTFSNELISRDEGLHCDFACLLYSLLRQKLTEERVREIVKDAVDIEREFVCDALPCALVGMNGDLMSQYIEFVADRLLGALGCGKVYNVQNPFDWMELISLQGKTNFFEKRVGEYQKASVMSSLNGNGGGNHVFKMDEDF

SEQ ID NO: 59049 - protein, 301 aa, Glycine max
  peptide (1)..(301): Ceres Seq. ID no. 15175860
MYKKAEASFWTAEEVDLSQDLRHWDSLTDGERHFVSHVLAFFAASDGIVLENLAGRFTKEIQIPEARAFYGFQIAIENIHSEMYSLLLETYIKDSSQKSHLFRAIDTIPCVTKKAQWALRWIDSSDSFAERLVAFACVEGIFFSGSFCAVFWLKKRGLMPGLTFSNELISRDEGLHCDFACLLYSLLRQKLTEERVREIVKDAVDIEREFVCDALPCALVGMNGDLMSQYIEFVADRLLGALGCGKVYNVQNPFDWMELISLQGKTNFFEKRVGEYQKASVMSSLNGNGGGNHVFKMDEDF

SEQ ID NO: 59050 - DNA, 1111 bp, Glycine max
  misc_feature (1)..(1111): Ceres Seq. ID no. 14311256
ataagaagataattggaagattgaagaaggagtgattgtaatctggaaggatgaggagtactattgttttacgattgggaagacgtgcgcgtattccattccaacgagcattagcaacgcagagtaacaataataacactctggtgtttatccctctccctcgctgcctcagcgcaacgcggtcgtttcactttcagcgcaattcaccgtttggattctccagcgggcatgggcaacgcaggagcatgttcatccaaacgcagcccacgccaaatccctcgtctctcatgttttatcccggcaagcccgtcatggaagttggaagctccgacttcccaaaccctcgttctgcaatgaactctcccctcgccaaatcgctcttcgcaatcgacggcgttactcgcgttttctttggatctgatttcgttaccgttacgaaatcggaagaggctgcgtgggaattcctcaagcctgaagtcttcgccgccattatggatttctactcctccgctcagcctctctttttagattctcaagccgccgcggccatggatacagctattcaccaagatgattctgaaacagttgcaatgatcaaggaattgttagagactcgaattcgacctgcagtgcaagatgatggcggggacattgaatatagaggttttgacctagatactggaatagtaaaacttagaatgcaaggggcatgcagtggctgcccaagttcatcagtgactctgaaatcaggcattgaaaatatgctgatgcattatgttcctgaggtcaaaggtgtggaacaagaattggatgctgaggatgatggagcagcattaagtggagaaattaaatagttgaacttttttttgttttttctcaaaattgctacttgcatttagtctcttcatgcatgcattttcgcactcaacagagacttagaagtacaacagcagtacatgatggaaacaaaaaaaggtgtgagtctacacaaaaaatatattgaataagtcgtgagttggatacattatagtatggcatgaaatcatcgttccatgctagttggatcttcctgacatagatgaaagtaatttatgacacgatgccattacat

SEQ ID NO: 59051 - protein, 267 aa, Glycine max
  peptide (1)..(267): Ceres Seq. ID no. 14311257
MRSTIVLRLGRRARIPFQRALATQSNNNNTLVFIPLPRCLSATRSFHFQRNSPFGFSSGHGQRRSMFIQTQPTPNPSSLMFYPGKPVMEVGSSDFPNPRSAMNSPLAKSLFAIDGVTRVFFGSDFVTVTKSEEAAWEFLKPEVFAAIMDFYSSAQPLFLDSQAAAAMDTAIHQDDSETVAMIKELLETRIRPAVQDDGGDIEYRGFDLDTGIVKLRMQGACSGCPSSSVTLKSGIENMLMHYVPEVKGVEQELDAEDDGAALSGEIK

SEQ ID NO: 59052 - protein, 202 aa, Glycine max
  peptide (1)..(202): Ceres Seq. ID no. 14311258
MFIQTQPTPNPSSLMFYPGKPVMEVGSSDFPNPRSAMNSPLAKSLFAIDGVTRVFFGSDFVTVTKSEEAAWEFLKPEVFAAIMDFYSSAQPLFLDSQAAAAMDTAIHQDDSETVAMIKELLETRIRPAVQDDGGDIEYRGFDLDTGIVKLRMQGACSGCPSSSVTLKSGIENMLMHYVPEVKGVEQELDAEDDGAALSGEIK

SEQ ID NO: 59053 - protein, 188 aa, Glycine max
  peptide (1)..(188): Ceres Seq. ID no. 14311259
MFYPGKPVMEVGSSDFPNPRSAMNSPLAKSLFAIDGVTRVFFGSDFVTVTKSEEAAWEFLKPEVFAAIMDFYSSAQPLFLDSQAAAAMDTAIHQDDSETVAMIKELLETRIRPAVQDDGGDIEYRGFDLDTGIVKLRMQGACSGCPSSSVTLKSGIENMLMHYVPEVKGVEQELDAEDDGAALSGEIK

SEQ ID NO: 59054 - DNA, 1263 bp, Glycine max
  misc_feature (1)..(1263): Ceres Seq. ID no. 14311832
actggattgcaccgtctcttttctttcccctttgttaggaacaacaccacgccacctttgtttacgaactcgtcgacttgatgactcatcacaacgccaccaccaccgcctaacgacctagagcaccttctctctcctctaattggccattgcttaagttgacttgctgcgaaggttgctttgatcatttgaagcgcctgaaaatcgttgtgcgaattttgagggttctgttcttgtaatccgaaaatggccgcgattcggaggcgggtgtggcagttatcttcaatcgcaggtttcggggcttcgagatcggaagtgtcgtcgtcattgtcgtcgtcccaaagagcaattttcgatccattttctgtttcggggaccagacacttttcccaagtggtgaaatccaaccgcaagcacttgttcctcgttgacaccttggcccttgttaggagactggaaggggaaggagtgccctcgaagcaagccgaggcgataaccgctgccataactgaggttttgaatgacagtctcgaaaatgtgtctcagtcgttggtatcaaaggcgcagatgcagaaaattgaaatgatgcaagaatccaacctgtctaagtttaaagcggaggtgcagagctcacagggacaccatttttctctcttacaacacgagactgagaagcttaggaatgatatagagaagatgcgtaatgagttgaggtatgagatagacaaagtcactgctgggcagcgattagatttgaaccttgaaagggggagaataagggaggaattgtctaatcagaatgctgaaactaacaacctgacaaacaaacttgatagagagatccattctttaagagcacaactggaagcagccaaatatgatgtcataaaatattgcataggaacacttgtttcgatttctgctgttggtcttgctgttttacgcatattgatgtaaatggattgtattccgattaacatccacaaagatgaggtgaaaaagaatcaagggtagctccgtagctgcattgaagatttatcttctgtcagagaaacaattgcattacaatactagtacaacttttttttttggtccatactagtggagctgaaaggaacgagctccaatcaggcacgaattgggcctgttttttaagccccattctatattcttttgttaatttatttgacatgccctttgggatatttgtgcaatttatgcgtggctgtatggtatgagtacaatacaagcaccttggattat

SEQ ID NO: 59055 - protein, 236 aa, Glycine max
  peptide (1)..(236): Ceres Seq. ID no. 14311833
MAAIRRRVWQLSSIAGFGASRSEVSSSLSSSQRAIFDPFSVSGTRHFSQVVKSNRKHLFLVDTLALVRRLEGEGVPSKQAEAITAAITEVLNDSLENVSQSLVSKAQMQKIEMMQESNLSKFKAEVQSSQGHHFSLLQHETEKLRNDIEKMRNELRYEIDKVTAGQRLDLNLERGRIREELSNQNAETNNLTNKLDREIHSLRAQLEAAKYDVIKYCIGTLVSISAVGLAVLRILM

SEQ ID NO: 59056 - protein, 129 aa, Glycine max
  peptide (1)..(129): Ceres Seq. ID no. 14311834
MQKIEMMQESNLSKFKAEVQSSQGHHFSLLQHETEKLRNDIEKMRNELRYEIDKVTAGQRLDLNLERGRIREELSNQNAETNNLTNKLDREIHSLRAQLEAAKYDVIKYCIGTLVSISAVGLAVLRILM

SEQ ID NO: 59057 - protein, 124 aa, Glycine max
  peptide (1)..(124): Ceres Seq. ID no. 14311835
MMQESNLSKFKAEVQSSQGHHFSLLQHETEKLRNDIEKMRNELRYEIDKVTAGQRLDLNLERGRIREELSNQNAETNNLTNKLDREIHSLRAQLEAAKYDVIKYCIGTLVSISAVGLAVLRILM

SEQ ID NO: 59058 - DNA, 1576 bp, Glycine max
  misc_feature (1)..(1576): Ceres Seq. ID no. 14311804
aagataaattgggccgatttggacacacaccccgtcatcttcttcttgttctgtgccgcactctcgctcgcagttacagaaaccatgacgacggtggtgcccacctccgaagaagacgctgccctctctgttgtccgattcgcctctgaactcgcctgggccgatgccggtcccgaggttgctgagcctcaagttagtagactctgcatggaggctgaagagtttatcgttatgggaaaatggttggaactagcatcattgatgattacctctgctgaattggttttctcaaaggtttctgaaacagatatagagtccatcttcactatcatctgcaatcttgtgaccaagactgagaatccagatgaagtgatggagattgtaaaagttataactgcaaaaataattcagcagccaaacgaaaagcctgctgtgcgattgaagactttgatcaatctgtacaatcttttggagactccatactgccagttttatgtctacatgaaggcattgaatttagctgttaatgggaaagtcacagaatacattataccttcattcaaaaagatagatagcttcttgaaagagtggaaaattgggatacctgaacagagagagctctttctcactatctctaatattttgaaggaaaataaaagcatgtcaaaggatgcttttaagttcctgagcaattatctgtcgaccttttcgggagaagatgcacatgttttgagtgaagccaaggaggaggccgcacgtgcaattgaggaatttgtcagagctcctgacatatatcagtgtgatttgcttgacttgcctgctgttgggcaactggagaaggatgccaaatatgctctgttatatcagcttcttaagatttttcttacccagaggctagatgcatacttagaatatcaagctgcaaattccaccttgttgaaaaactatggccttgtgcctgaagaatgcatttccaaaatgaggctgatgtcattgatggatcttacctctgatggttctggccaaattccatatgaacttattagggacacacttcagatcaatgatgatgaagtggaactatgggtggttagagcaataactgccaagttaattgactgtaagatggaccaaatgcatcaatcagtagttgttagtcatcctactgatcgtgtgtttggtcagcaccaatggcaagcactgagaacaaagctagcgacatggagaggaaacattgcaaatgttatcagtaccattcaggccaacaaaataacggaggatgggtctcaggcagcccaaggtttggtagttaggtgagaggacgttttcaactgaagcaattctctgaagcatctagattttatcccggtgaagttttttttaatcttaaaacagagaaggaaaaaattttactccccaactttgtgacagaaccattttgttttaagcttttccattttgatgttatgtttgaccagcctcacgatagcgttgagtatattatacctgtggactgttgtcctagtagctcctaggaatcaatatacagctatttaacttttagtgttttctgaac

SEQ ID NO: 59059 - protein, 438 aa, Glycine max
  peptide (1)..(438): Ceres Seq. ID no. 14311805
KINWADLDTHPVIFFLFCAALSLAVTETMTTVVPTSEEDAALSVVRFASELAWADAGPEVAEPQVSRLCMEAEEFIVMGKWLELASLMITSAELVFSKVSETDIESIFTIICNLVTKTENPDEVMEIVKVITAKIIQQPNEKPAVRLKTLINLYNLLETPYCQFYVYMKALNLAVNGKVTEYIIPSFKKIDSFLKEWKIGIPEQRELFLTISNILKENKSMSKDAFKFLSNYLSTFSGEDAHVLSEAKEEAARAIEEFVRAPDIYQCDLLDLPAVGQLEKDAKYALLYQLLKIFLTQRLDAYLEYQAANSTLLKNYGLVPEECISKMRLMSLMDLTSDGSGQIPYELIRDTLQINDDEVELWVVRAITAKLIDCKMDQMHQSVVVSHPTDRVFGQHQWQALRTKLATWRGNIANVISTIQANKITEDGSQAAQGLVVR

SEQ ID NO: 59060 - protein, 410 aa, Glycine max
  peptide (1)..(410): Ceres Seq. ID no. 14311806
MTTVVPTSEEDAALSVVRFASELAWADAGPEVAEPQVSRLCMEAEEFIVMGKWLELASLMITSAELVFSKVSETDIESIFTIICNLVTKTENPDEVMEIVKVITAKIIQQPNEKPAVRLKTLINLYNLLETPYCQFYVYMKALNLAVNGKVTEYIIPSFKKIDSFLKEWKIGIPEQRELFLTISNILKENKSMSKDAFKFLSNYLSTFSGEDAHVLSEAKEEAARAIEEFVRAPDIYQCDLLDLPAVGQLEKDAKYALLYQLLKIFLTQRLDAYLEYQAANSTLLKNYGLVPEECISKMRLMSLMDLTSDGSGQIPYELIRDTLQINDDEVELWVVRAITAKLIDCKMDQMHQSVVVSHPTDRVFGQHQWQALRTKLATWRGNIANVISTIQANKITEDGSQAAQGLVVR

SEQ ID NO: 59061 - protein, 369 aa, Glycine max
  peptide (1)..(369): Ceres Seq. ID no. 14311807
MEAEEFIVMGKWLELASLMITSAELVFSKVSETDIESIFTIICNLVTKTENPDEVMEIVKVITAKIIQQPNEKPAVRLKTLINLYNLLETPYCQFYVYMKALNLAVNGKVTEYIIPSFKKIDSFLKEWKIGIPEQRELFLTISNILKENKSMSKDAFKFLSNYLSTFSGEDAHVLSEAKEEAARAIEEFVRAPDIYQCDLLDLPAVGQLEKDAKYALLYQLLKIFLTQRLDAYLEYQAANSTLLKNYGLVPEECISKMRLMSLMDLTSDGSGQIPYELIRDTLQINDDEVELWVVRAITAKLIDCKMDQMHQSVVVSHPTDRVFGQHQWQALRTKLATWRGNIANVISTIQANKITEDGSQAAQGLVVR

SEQ ID NO: 59062 - DNA, 1187 bp, Glycine max
  misc_feature (1)..(1187): Ceres Seq. ID no. 14308225
aagccagagaaagagaaggaaccaacaacaaagagcagagagaaagagaggaccattccaaccctaatttctctgctaaaccctagttgtttggcatttcctctcttctccctcgtaaatcttctcccattccctccggtagctttccagatccaaataaatcatggttttctgggtttttggctacggttcactggtgtggaaccctggattcgattacgacgagaagattattggtttcatcaaggactacagacgcgtgtttgatttagcgtgcattgatcaccggggaacgcctgaaaacccagcgagaacttgcacattggaggagaaagaaggggctatttgctggggagctgcttattgtgttcgaggaggccctgaaaaggaaaaattggctatgcagtatttggagcgacgggaatgtgaatatgacagaaagactcttgtaaacttcttcaaggaaggagattcactgcatcctactttaactgatgtaatagtattcacatctactccagacaaagtgaacaacaaatactacctgggacctgctccacttgaagacatggctaggcaaatagcaactgcatacggcccttgcggaaacaacagggattacattttccttctagaaaaggccatgcatgatattggccatgaggatgacttggtgatagagcttgccaatgaagtgaagaaagtacttggagtgggaaatgtagtaccaaaggagaagaaacaggttggagcagcacaacttccacaccctcctcatgtgccaatccctacccttcaactgctcccgctgccagaacctattgctttggatagctgacgcggaaactgacgctgagttcggcaactaaactgatttactgcggaccctactaaccctaattcaaattttaaataacatcacatatattcctcttcgcctagttttagcggcttcttcagccattcccttgagatattgcttaaattcagtgaggcgcaatattttgaattggaatgaatgttcgcagatgttataattgaaaaagttcaatttttctatttatttcgtttacggcaatcttacagagttttttttccaccagttctgcatcccaatcttacggagttatttatagcttttaattgctggtacttcgaaatgaataatattacttctgttttgagcg

SEQ ID NO: 59063 - protein, 224 aa, Glycine max
  peptide (1)..(224): Ceres Seq. ID no. 14308226
MVFWVFGYGSLVWNPGFDYDEKIIGFIKDYRRVFDLACIDHRGTPENPARTCTLEEKEGAICWGAAYCVRGGPEKEKLAMQYLERRECEYDRKTLVNFFKEGDSLHPTLTDVIVFTSTPDKVNNKYYLGPAPLEDMARQIATAYGPCGNNRDYIFLLEKAMHDIGHEDDLVIELANEVKKVLGVGNVVPKEKKQVGAAQLPHPPHVPIPTLQLLPLPEPIALDS

SEQ ID NO: 59064 - protein, 145 aa, Glycine max
  peptide (1)..(145): Ceres Seq. ID no. 14308227
MQYLERRECEYDRKTLVNFFKEGDSLHPTLTDVIVFTSTPDKVNNKYYLGPAPLEDMARQIATAYGPCGNNRDYIFLLEKAMHDIGHEDDLVIELANEVKKVLGVGNVVPKEKKQVGAAQLPHPPHVPIPTLQLLPLPEPIALDS

SEQ ID NO: 59065 - DNA, 1402 bp, Glycine max
  misc_feature (1)..(1402): Ceres Seq. ID no. 14308433
gtcacaagttctttcactggaaggagaacaagaagaaaaaaccgacacaaagatctagtcctagctagaatcaaacaggggcgatctcaccttcaagaacacatcgccatggcaaggaacttgcttcttgtgctttttgcagtagccaccctcctccatggctcagcagcccaaaccagacacatggtcggtgatgccacgggctggatcatccctgctggcggcgctgccacctacaccgcctgggcttccaacaaaaccttcaccgtaaacgacactctcgtgttcaacttcgccaccggccaacacaacgtggccaaggtaacgaaatcggctttcgacgcgtgcaacggcgggagcgccgttttcaccctgacctccggtccagcgaccgtgaccctgaacgaaacaggggagcaatactacatttgctccgttggatcacactgttccgctggccagaaactggcaattaacgttaacagagcttcttctaccggtccttcccctgcacctcaacccagaggaagtggttctccaccaagggctagccctgtccccacacaagcaccacaagccagtagccccactcctccaccaaggtctgcaccagcacctgcttttggtccatcctctgaaccagctactttcattgttggagaaaccgctggctggattgttcctggcaacgcttccttttacacagcttgggcctctggcaaaaacttcagggttggagacgtccttgtgttcaactacgcatcaaatacacacaacgtagaggaggttacaaaggccaacttcgatgcttgcagctcagcctctcctattgccactttcaccactccacctgcgagagtgaccctcaacaaatctggtcaacatttcttcatctgtggaattccagggcactgtttgggaggtcaaaagcttgccatcaacgtcaccggcagcagcaccgccaccccaccttccgccgcggccccccccaccactccttctagcccttctccagccggtgctgtcactcctcccccacagaactctggtgctgcatctcttggagttgttggagtatttgccaccctgctttcagttgccgccacttttttctattagatactccacgagattattctagtcaggagcttccgagtcatcatcatcgctctttgattgtgtttcatgaattcagtttttttcttatttttttgaggatgacaataaagttagctttaatttaatttctcttcatcggctacagttttggttttttgttatgtttttgagtaaaaataaattggtacggtgtgaatatgttaacaagtgtatttctttgatagttaacatcgttgtattacagtgcatatatttggaattggagataaaaaatatttgtgac

SEQ ID NO: 59066 - protein, 372 aa, Glycine max
  peptide (1)..(372): Ceres Seq. ID no. 14308434
VTSSFTGRRTRRKNRHKDLVLARIKQGRSHLQEHIAMARNLLLVLFAVATLLHGSAAQTRHMVGDATGWIIPAGGAATYTAWASNKTFTVNDTLVFNFATGQHNVAKVTKSAFDACNGGSAVFTLTSGPATVTLNETGEQYYICSVGSHCSAGQKLAINVNRASSTGPSPAPQPRGSGSPPRASPVPTQAPQASSPTPPPRSAPAPAFGPSSEPATFIVGETAGWIVPGNASFYTAWASGKNFRVGDVLVFNYASNTHNVEEVTKANFDACSSASPIATFTTPPARVTLNKSGQHFFICGIPGHCLGGQKLAINVTGSSTATPPSAAAPPTTPSSPSPAGAVTPPPQNSGAASLGVVGVFATLLSVAATFFY

SEQ ID NO: 59067 - protein, 336 aa, Glycine max
  peptide (1)..(336): Ceres Seq. ID no. 14308435
MARNLLLVLFAVATLLHGSAAQTRHMVGDATGWIIPAGGAATYTAWASNKTFTVNDTLVFNFATGQHNVAKVTKSAFDACNGGSAVFTLTSGPATVTLNETGEQYYICSVGSHCSAGQKLAINVNRASSTGPSPAPQPRGSGSPPRASPVPTQAPQASSPTPPPRSAPAPAFGPSSEPATFIVGETAGWIVPGNASFYTAWASGKNFRVGDVLVFNYASNTHNVEEVTKANFDACSSASPIATFTTPPARVTLNKSGQHFFICGIPGHCLGGQKLAINVTGSSTATPPSAAAPPTTPSSPSPAGAVTPPPQNSGAASLGVVGVFATLLSVAATFFY

SEQ ID NO: 59068 - protein, 311 aa, Glycine max
  peptide (1)..(311): Ceres Seq. ID no. 14308436
MVGDATGWIIPAGGAATYTAWASNKTFTVNDTLVFNFATGQHNVAKVTKSAFDACNGGSAVFTLTSGPATVTLNETGEQYYICSVGSHCSAGQKLAINVNRASSTGPSPAPQPRGSGSPPRASPVPTQAPQASSPTPPPRSAPAPAFGPSSEPATFIVGETAGWIVPGNASFYTAWASGKNFRVGDVLVFNYASNTHNVEEVTKANFDACSSASPIATFTTPPARVTLNKSGQHFFICGIPGHCLGGQKLAINVTGSSTATPPSAAAPPTTPSSPSPAGAVTPPPQNSGAASLGVVGVFATLLSVAATFFY

SEQ ID NO: 59069 - DNA, 1476 bp, Glycine max
  misc_feature (1)..(1476): Ceres Seq. ID no. 14308168
aaagtagagagaagagaagcaattaccccttttcataaaaccctagcaagtaaaaaccgtcccttttcgtttctgttctctgtgcttcgaaaaccctaactaaactcgcgtggtagctccaatgggaggaaagaggaagaagagcgatgatgatgatgacgtggaagcagaagcagaagcttcaggttggaagaagaaaacgagaacgacgtcggagagagagaaggagaagaaggagccattgcgtccttcgatgataaagaacaaggagaagcgatcggagctgcacgcgaaactgaagcaccagaagaagctcgagaagcgcgccaaggccaaggctcgggacgctgctctcaagaaagctctcgagctcggcgaggagcctccagagaagaaggtccctcgcactatcgagaacacgagggaactcgacgagaccgtttgcaagcccgatgacgaagagttatttgctggaaatgatgctgatgaatttggtccaattttgaatcagcaacaaactcccaagatattaatcaccacttgccgcttccattctactaggggacctgcttttatatcagagttgctttcagttataccaaatgcacattacttcaagagaggaacatatgatctgaaaaagattgtagaatatgcaaagaagaaggacttcacttctattatagttgttcacaccaatcgtagggaaccagatgctcttttaatcataggtgtacctgatgggcctactgctcatttcaagctctcgaaacttgttttgcgcaaggatatcaagaatcatggaaatccaaccggtcacaagcccgagcttgtattgaataacttcacaacacgtctagggcatcgagttggaaggttgatacagtcacttttcccacaagatccagaatttaaaggccggcgagtagtcactttccacaaccagagagacttcatattcttccggcatcatcggtatatttttgaaaccaaagaagttaaaaaagcagagtccaaaggtaaaaaggacaaagatggcgagagtgagaatgttcctgaacagaaaacaattgcccgacttcaggaatgtggtcctcgtttcacattaaaattgattagcctgcagcatggaacatttgacaccaagggtggggaatatgagtgggttcacaagccggaaatggacactagccgaaggaggttcttcctatgacttgtttgggaaggttgcattttggacatcttttttgctggaaataggttttatccggtgaagagggttaattatcttgaggttgttgggatctttcaacttaattctggtgtatcatttttttatttttttttattgggggctaaagtcctatcatctctgtaagccgtgagcaattttgaccttacatctattggtggttgaggaagagataacaaaggtttcttataagcaaatatataagcaattttgtattatggtcc

SEQ ID NO: 59070 - protein, 363 aa, Glycine max
  peptide (1)..(363): Ceres Seq. ID no. 14308169
MGGKRKKSDDDDDVEAEAEASGWKKKTRTTSEREKEKKEPLRPSMIKNKEKRSELHAKLKHQKKLEKRAKAKARDAALKKALELGEEPPEKKVPRTIENTRELDETVCKPDDEELFAGNDADEFGPILNQQQTPKILITTCRFHSTRGPAFISELLSVIPNAHYFKRGTYDLKKIVEYAKKKDFTSIIVVHTNRREPDALLIIGVPDGPTAHFKLSKLVLRKDIKNHGNPTGHKPELVLNNFTTRLGHRVGRLIQSLFPQDPEFKGRRVVTFHNQRDFIFFRHHRYIFETKEVKKAESKGKKDKDGESENVPEQKTIARLQECGPRFTLKLISLQHGTFDTKGGEYEWVHKPEMDTSRRRFFL

SEQ ID NO: 59071 - protein, 319 aa, Glycine max
  peptide (1)..(319): Ceres Seq. ID no. 14308170
MIKNKEKRSELHAKLKHQKKLEKRAKAKARDAALKKALELGEEPPEKKVPRTIENTRELDETVCKPDDEELFAGNDADEFGPILNQQQTPKILITTCRFHSTRGPAFISELLSVIPNAHYFKRGTYDLKKIVEYAKKKDFTSIIVVHTNRREPDALLIIGVPDGPTAHFKLSKLVLRKDIKNHGNPTGHKPELVLNNFTTRLGHRVGRLIQSLFPQDPEFKGRRVVTFHNQRDFIFFRHHRYIFETKEVKKAESKGKKDKDGESENVPEQKTIARLQECGPRFTLKLISLQHGTFDTKGGEYEWVHKPEMDTSRRRFFL

SEQ ID NO: 59072 - DNA, 1150 bp, Glycine max
  misc_feature (1)..(1150): Ceres Seq. ID no. 14308198
ttttcctaaatacacacacaaaaccggttcctctcttaaccctctgaaagccaaaagagaaaaaaaaaatgcagccccaccagaaccctcccgcactggattccgacccgcagctcccgcagatcaaaatccaccaccctgcctccccacgccaccatcacccttcctccgccggcgccgcgacccccacccccaccgccggcgcgcgtcgcaaaatcggcgtggccgtcgacctctccgacgagagcgcctacgcggtccgctgggccgtgcagcactacatccgccccggcgacgccgtgatcctgctccacgtcagcgctaccaacgtcctcttcggcgccgactggggctccatcgacctctccatcaacaccgaccccaactccgacgaggatgccgtcagcgccgtcaacaacagcaacgaccacaacagcaagcgcaagctggaggacgacttcgacgcctttacggcgtccaaggcggcggatctcgcgaaaccgttacgggaattgcagattccgttcaagatccatatcgtgaaggatcatgacatgaaggagaggctttgcttggaggtggagaggcttgggctgagtgctgttattatggggagtagaggctttggcgctgtgaggcgtggcagcgatgggaagcttgggagtgttagtgattactgcgttcatcactgtgtttgtcctgttgtggtggtgcgttatcccgatgataaggatgcggtcgcggcggccaccacggccgagcccgtggtggcggtcaaggacggagacgagggcgaggccgtcgtccagccggtgccgcataagaaagaggattagttggagccaactcatcacttcaaccctatctctgaagagtgtttctgatccgaagagataggtggaaatatggttgtagagtgctctctttctcttcctgtcaggttgtacttagagcatttcctgcatatgaactgtggaaagattatggatgattttgtatggcttgatatgatctcggttccattaggctttggacgattgtttttagttccgaagtggtctatactctttcatttagatgtacaagtttgcctgtgactgtttttggggttattttcttcccatatgatgtgggaaatcggattaaaaag

SEQ ID NO: 59073 - protein, 255 aa, Glycine max
  peptide (1)..(255): Ceres Seq. ID no. 14308199
MQPHQNPPALDSDPQLPQIKIHHPASPRHHHPSSAGAATPTPTAGARRKIGVAVDLSDESAYAVRWAVQHYIRPGDAVILLHVSATNVLFGADWGSIDLSINTDPNSDEDAVSAVNNSNDHNSKRKLEDDFDAFTASKAADLAKPLRELQIPFKIHIVKDHDMKERLCLEVERLGLSAVIMGSRGFGAVRRGSDGKLGSVSDYCVHHCVCPVVVVRYPDDKDAVAAATTAEPVVAVKDGDEGEAVVQPVPHKKED

SEQ ID NO: 59074 - protein, 183 aa, Glycine max
  peptide (1)..(183): Ceres Seq. ID no. 14308200
FPKYTHKTGSSLNPLKAKREKKNAAPPEPSRTGFRPAAPADQNPPPCLPTPPSPFLRRRRDPHPHRRRASQNRRGRRPLRRERLRGPLGRAALHPPRRRRDPAPRQRYQRPLRRRLGLHRPLHQHRPQLRRGCRQRRQQQQRPQQQAQAGGRLRRLYGVQGGGSRETVTGIADSVQDPYREGS

SEQ ID NO: 59075 - DNA, 886 bp, Glycine max
  misc_feature (1)..(886): Ceres Seq. ID no. 13594206
ataagtatttcattttcagcgttccatgggttgggtttggaccaatccatagccgaagaagagaaaaaagagacaaggaccgtcttgagttaatttgattcagtgtagcagccagcagccataagcaacgcaacaattccatttccagtttctgattcgtcacgtcagacaaaggaaggggttagggtgtgacctgagatcaaaatgttgcggaggcttctctcttctcacctcaaaaccctagcctcctccgccgccgccgccgccaccgccactccccgatctgcttccgcctccgccagattcgccgctctctctcgctcctgcctctacttctcaacccaatccgaggatgctactgcgatcaaaaagaaggttgaggacataatgccaatcgctactggccacgagcgcgaggagcttcaggctgagctcgagggaaggaatattcttgaaatagaccatcccgaaggtccattcggcacaaaggaagcacctgctgttgtcaaatcttactatgataaaaggatagtcggatgcccaggaggtgaaggtgaggatgagcatgatgttgtctggttttggctggagaaagacaagccccatgaatgtccagtgtgcgcacagtattttgttcttgaagtggtaggacctggtggaccacccgatggacatggtgatgatgatcaccattgattgcatccttcaattaaatctggaataaattctggaaagatggagagacattgtttagcatacactctggcctttcaaaatcctgtggcctaagtttgattttgatttgtctataccttattgtgtcacaacttttgagatagaaagtttatgcgattatttgaacgcaggatgctcatttgcttgagct

SEQ ID NO: 59076 - protein, 163 aa, Glycine max
  peptide (1)..(163): Ceres Seq. ID no. 13594207
MLRRLLSSHLKTLASSAAAAATATPRSASASARFAALSRSCLYFSTQSEDATAIKKKVEDIMPIATGHEREELQAELEGRNILEIDHPEGPFGTKEAPAVVKSYYDKRIVGCPGGEGEDEHDVVWFWLEKDKPHECPVCAQYFVLEVVGPGGPPDGHGDDDHH

SEQ ID NO: 59077 - protein, 102 aa, Glycine max
  peptide (1)..(102): Ceres Seq. ID no. 13594208
MPIATGHEREELQAELEGRNILEIDHPEGPFGTKEAPAVVKSYYDKRIVGCPGGEGEDEHDVVWFWLEKDKPHECPVCAQYFVLEVVGPGGPPDGHGDDDHH

SEQ ID NO: 59078 - DNA, 1903 bp, Glycine max
  misc_feature (1)..(1903): Ceres Seq. ID no. 15226493
aaactatcaaataataatgtatgtggtgtttagttaactggtaagtaagggaaggtagaaattgaggagattgaattgcaatagcaatgagtgtgtcttcaaattcgaaggaatcgatggaattatgcatatttgatttgcggagaggccaacacgaaggccaagagctcgataagattctcttcttcttccccgccggtttgcccttttcaaagcaactctccgtcattggcctcagcgaaggactcatcactttcactagaatcttctcgccagaggctgcctgcgacgtcatcgaagcagaaagacattctcatgttttctacgaggccgaacccgatatctggatagtcatggttgccgacaaaagcaatgattcagaacctatatggagagttgatgcattaagaaaagttctcaaggaaattcactcactttttgtcatgtttcatggatctattagagcaatgctggagaaagaacccggcggaggactaacaagacggcatttgtatacctttatcatggattatctgagggattttcttgcggggaaaaagctccttttaccttcattccgtgattgcttaaaggaacgtggaactgttcagatgctgacaataggtcgcgaggctgcaattgaggttcagtcccttgtcagggtgcttgaatcttcttctggaaacactccctgctactctttggttttatttcaagacctgctagtgtccacaagtctatctcctgatgacaccataaatttattcacatatgctgtgctaaggttgactccccatgctctatcttctggaacaagttcctggtcctacttacggaaaggaagttctgcatccaatgttgccactgagtctaacatggcccatccaagctctttgtctgaaagtttttatggctcatctgatatgtcctctggtgaagataaccactatcatgttgtgaggcccttacagagtgacaaatggtctaaaggaaaagatggttatcttgtcactgatttatggggtgcagaagttggtacgtgggtgtttgcctctccaacagtttggcttcaacatacaggagagaaaatgtatctttgtgtttatcagcatagaagccttactttgatgcttctgattcctgtatcatccattcctaacggggagcaaggtgtgtcggcagtgaggcagcaagttgttgaaaatgcatcacttaaaatattgaaagttgaagagaaactatcgaaaggatggggtggagataatgcttatcacgttagtgggtaccgctacttacttgtagatggtgatagaaatgtatccagggcttctccagcaacaaaagttacaactttaacaaaggagtccttacttgctatgaataagcttaggcaagaggtggagttagagaagagtagagcaaaactggatagccgtaattgtgaaaaagacttagaggtgtgcattagagcaaaaaataatgcatgggttatttctcgagtcacaagagggaaggagctttacatggttctagagaaagctaatgaaacccttctatatgcttcagatgctgttgagaagtttagcgacaggtattgcaatggaacattttctctggactaaagaaaaccaagcatgtgcgaccgaggaatagcacgttaggtcttctaactgtttacccagtaaagtcgggaagttttccactgttgatttttctcaccgggaaattcaagaatggaagaaagaatgctactctgtgtatatctctctgtatattaagtgtaatttgtttatacttgttaaagggtgctttatcaaatcttgtcaccggtaactttctttttaatccgaaattgggtcagttccgagagaaattgttttccaaaaagtttcatttatttcac

SEQ ID NO: 59079 - protein, 511 aa, Glycine max
  peptide (1)..(511): Ceres Seq. ID no. 15226494
MSVSSNSKESMELCIFDLRRGQHEGQELDKILFFFPAGLPFSKQLSVIGLSEGLITFTRIFSPEAACDVIEAERHSHVFYEAEPDIWIVMVADKSNDSEPIWRVDALRKVLKEIHSLFVMFHGSIRAMLEKEPGGGLTRRHLYTFIMDYLRDFLAGKKLLLPSFRDCLKERGTVQMLTIGREAAIEVQSLVRVLESSSGNTPCYSLVLFQDLLVSTSLSPDDTINLFTYAVLRLTPHALSSGTSSWSYLRKGSSASNVATESNMAHPSSLSESFYGSSDMSSGEDNHYHVVRPLQSDKWSKGKDGYLVTDLWGAEVGTWVFASPTVWLQHTGEKMYLCVYQHRSLTLMLLIPVSSIPNGEQGVSAVRQQVVENASLKILKVEEKLSKGWGGDNAYHVSGYRYLLVDGDRNVSRASPATKVTTLTKESLLAMNKLRQEVELEKSRAKLDSRNCEKDLEVCIRAKNNAWVISRVTRGKELYMVLEKANETLLYASDAVEKFSDRYCNGTFSLD

SEQ ID NO: 59080 - protein, 501 aa, Glycine max
  peptide (1)..(501): Ceres Seq. ID no. 15226495
MELCIFDLRRGQHEGQELDKILFFFPAGLPFSKQLSVIGLSEGLITFTRIFSPEAACDVIEAERHSHVFYEAEPDIWIVMVADKSNDSEPIWRVDALRKVLKEIHSLFVMFHGSIRAMLEKEPGGGLTRRHLYTFIMDYLRDFLAGKKLLLPSFRDCLKERGTVQMLTIGREAAIEVQSLVRVLESSSGNTPCYSLVLFQDLLVSTSLSPDDTINLFTYAVLRLTPHALSSGTSSWSYLRKGSSASNVATESNMAHPSSLSESFYGSSDMSSGEDNHYHVVRPLQSDKWSKGKDGYLVTDLWGAEVGTWVFASPTVWLQHTGEKMYLCVYQHRSLTLMLLIPVSSIPNGEQGVSAVRQQVVENASLKILKVEEKLSKGWGGDNAYHVSGYRYLLVDGDRNVSRASPATKVTTLTKESLLAMNKLRQEVELEKSRAKLDSRNCEKDLEVCIRAKNNAWVISRVTRGKELYMVLEKANETLLYASDAVEKFSDRYCNGTFSLD

SEQ ID NO: 59081 - protein, 422 aa, Glycine max
  peptide (1)..(422): Ceres Seq. ID no. 15226496
MVADKSNDSEPIWRVDALRKVLKEIHSLFVMFHGSIRAMLEKEPGGGLTRRHLYTFIMDYLRDFLAGKKLLLPSFRDCLKERGTVQMLTIGREAAIEVQSLVRVLESSSGNTPCYSLVLFQDLLVSTSLSPDDTINLFTYAVLRLTPHALSSGTSSWSYLRKGSSASNVATESNMAHPSSLSESFYGSSDMSSGEDNHYHVVRPLQSDKWSKGKDGYLVTDLWGAEVGTWVFASPTVWLQHTGEKMYLCVYQHRSLTLMLLIPVSSIPNGEQGVSAVRQQVVENASLKILKVEEKLSKGWGGDNAYHVSGYRYLLVDGDRNVSRASPATKVTTLTKESLLAMNKLRQEVELEKSRAKLDSRNCEKDLEVCIRAKNNAWVISRVTRGKELYMVLEKANETLLYASDAVEKFSDRYCNGTFSLD

SEQ ID NO: 59082 - DNA, 955 bp, Glycine max
  misc_feature (1)..(955): Ceres Seq. ID no. 13594139
acatgccaaaattaacacccctgaatttcacactccctctcccaaactcatcatcctataatacaaagggtttggaatatatatcaaatatcaaaatacatcacaacatcaaaatggcctcaattgttactatggccaccattgtcacattagtcctcgcactagcatgttgtggcatgtctgccccgacctcagtgccgaaaaccactgcagcggccccggccccggagagcaatggctgcttgatggcactagcaaacatgtcagattgtctgacctatgttgaggatgggagtaagttgtcaaagcccgacaaagggtgctgccctgagttggcagggttggttgatagcaaccccatttgcttgtgtgagatgctaggcaaacctgactctattggcatcaaaattgatttgaacaaagccctcaagcttccttctgtttgtggagtgaccactccccctgttagcacctgtttccgctgtgggagtccccgtgtccttgcctccatcaatgagtgaaggtccaagtattgcaccgggagccttcagtccttcaaatgcagatgctgcgaatcctgcttcaagtcctaactctgcttctagtcctgcaggtgggctaggcccttcgtccgaggatgctgctgccagcccttctcaaaacaaaaatgaagtttcagccattcacccttctgctttgactaatttcttttttggccttttcactttatttgtctctgtattcttctgattttacacacatttattctgtgtcattattttagtggatattttatttcctcattatttgtatgttgtgagccactttgattaaagcttttgttgtaattttatgcactgttgcaatattgttactgtcattattagtgagccatacactttaattaggaacttcatgcctgcatttttacgccggagatattcattttttttgg

SEQ ID NO: 59083 - protein, 172 aa, Glycine max
  peptide (1)..(172): Ceres Seq. ID no. 13594140
MPKLTPLNFTLPLPNSSSYNTKGLEYISNIKIHHNIKMASIVTMATIVTLVLALACCGMSAPTSVPKTTAAAPAPESNGCLMALANMSDCLTYVEDGSKLSKPDKGCCPELAGLVDSNPICLCEMLGKPDSIGIKIDLNKALKLPSVCGVTTPPVSTCFRCGSPRVLASINE

SEQ ID NO: 59084 - protein, 135 aa, Glycine max
  peptide (1)..(135): Ceres Seq. ID no. 13594141
MASIVTMATIVTLVLALACCGMSAPTSVPKTTAAAPAPESNGCLMALANMSDCLTYVEDGSKLSKPDKGCCPELAGLVDSNPICLCEMLGKPDSIGIKIDLNKALKLPSVCGVTTPPVSTCFRCGSPRVLASINE

SEQ ID NO: 59085 - protein, 129 aa, Glycine max
  peptide (1)..(129): Ceres Seq. ID no. 13594142
MATIVTLVLALACCGMSAPTSVPKTTAAAPAPESNGCLMALANMSDCLTYVEDGSKLSKPDKGCCPELAGLVDSNPICLCEMLGKPDSIGIKIDLNKALKLPSVCGVTTPPVSTCFRCGSPRVLASINE

SEQ ID NO: 59086 - DNA, 1529 bp, Glycine max
  misc_feature (1)..(1529): Ceres Seq. ID no. 14312270
accataacgtgacaccaaattctcattctggcgcgcgtcctcacatccccacagttaccactattcctcttttcttcatcatcatcttcttcttcttcttcttcttcttcttgcatttacatcaactcttctcccaacccataaaaaaaaaaaaaaaagttcgtattttccctcccatgatcgaccctcatggtcacagactccaagcccatcattccccggcgcggcctcgtcgtcggcaactactgtcatgacgtcctccaccgcgacggcgagaccgtcgccgagaccctcggcggcgccgcctccttcatctccgttatcctcgatgccctctcccttcccttccacaccgtctccaaggtgggccccaacttcgcctacaccgccgacacatcgaatcaccccccgttaataatcccaacctcccaaaccacgctcttccacgctcacttcggttcgggccacccggaccgcctcctgaaccgcgtccgatcctgcgattcaatccaacccaccgacctcccggaccaacaaccccggttcgggttcggactcgcggtcggggtcggcggtgagattctcccggagacagtggaaaaaatgctctcgatctgcgaccacgtgttcgtggacattcaggctctgattcgcaggttcgacaacatcaacggtcgcgtgagccacgtggcgctaagagagagcgggttcttccacctcttgccgcgtgtggcgtttctcaaggcttctgcggatgaggccgtttttattgacgtggaggaggtgaggaagtggtgttgcgtggtcgtcacgcacgggaaggatggttgcgaggtgttttgtgaaaacggtgcgtttaaggtggcgccgttcgaggctgatcaggttgatcccaccggcgccggggactgttttctcggcgggtttgcggcggggattgtgaggggcctggccgtgcctgatgcggctctgttggggaacttctttggatccattgctgtggcgcaagtgggaccgcccaagcttgacttcaacttgattcagatggttaaggatgagatgcacaaaaggaagctgcaggatattcccttcttagaaagaagagatgagtcgccagggtttcagaagccacctgaacaagatcaattctatgcatctcttgttactgccaaagccataattacttgccagattcaagaatctggtcggaatctgctaagctctcctaaagtgtttgagcaaaataatgcaaagacaagactttcactggcttctgtgcacgaggaaccaattccaagcgttgatggtaaaccctaacatgggatggttggagttccaaatctcactgtaactctccagtgcccttccttttcatatcaaaaatagagatttcttagcatccaggaatctgtcaatttatggtgccttttccacacctagtctcacgtgcagcctaatttgtagttctacttgtaccaaattactaataaattattcttaaaaagaaaatcgagattgaaattccattc

SEQ ID NO: 59087 - protein, 375 aa, Glycine max
  peptide (1)..(375): Ceres Seq. ID no. 14312271
MVTDSKPIIPRRGLVVGNYCHDVLHRDGETVAETLGGAASFISVILDALSLPFHTVSKVGPNFAYTADTSNHPPLIIPTSQTTLFHAHFGSGHPDRLLNRVRSCDSIQPTDLPDQQPRFGFGLAVGVGGEILPETVEKMLSICDHVFVDIQALIRRFDNINGRVSHVALRESGFFHLLPRVAFLKASADEAVFIDVEEVRKWCCVVVTHGKDGCEVFCENGAFKVAPFEADQVDPTGAGDCFLGGFAAGIVRGLAVPDAALLGNFFGSIAVAQVGPPKLDFNLIQMVKDEMHKRKLQDIPFLERRDESPGFQKPPEQDQFYASLVTAKAIITCQIQESGRNLLSSPKVFEQNNAKTRLSLASVHEEPIPSVDGKP

SEQ ID NO: 59088 - protein, 237 aa, Glycine max
  peptide (1)..(237): Ceres Seq. ID no. 14312272
MLSICDHVFVDIQALIRRFDNINGRVSHVALRESGFFHLLPRVAFLKASADEAVFIDVEEVRKWCCVVVTHGKDGCEVFCENGAFKVAPFEADQVDPTGAGDCFLGGFAAGIVRGLAVPDAALLGNFFGSIAVAQVGPPKLDFNLIQMVKDEMHKRKLQDIPFLERRDESPGFQKPPEQDQFYASLVTAKAIITCQIQESGRNLLSSPKVFEQNNAKTRLSLASVHEEPIPSVDGKP

SEQ ID NO: 59089 - DNA, 1737 bp, Glycine max
  misc_feature (1)..(1737): Ceres Seq. ID no. 13594209
aaaaaattaacattgaattttgacctgttacataagagtttgggatcaagaatcatggtgaatcacctatctttctataaataccacaaaattgaagctgaacgcatgagttctaatatatcattcaaaagtttttgaaatgttgtcaccccttcttctatttctatgcctaactcttcctttgtttttgttgtccttcttcaaataccgtaaaaccttcaagaatccaccacttccaccaggtcctagaggccttcccataatagggaatcttcatcaactagatagtccttctcttcatgagcagctatggcatctctcaaagaaatatggtcctttattttcccttcaatttggattaaggccagccatagttgtttcctctccaaaattggccaaagaggtaatgaaagacaatgaccttgagtgctgtggacgacctaaattactaggccaacagaaactaacctataatgggttagacatgggattttcctcatacgatagttattggagagaaatcagaaaaatttgtgttgtccatgtccttagctccaaacgtgtccaaagctttacctcaataagacattttgaggtcaagcagatgataaaaaaaatatctaggcatgcctcatcttcaaaagttacaaatttaaatgaagtgcttatatcccttattagtactattgtatgtagaattgttttggggagaaggtatgaagaggagggatctgaaggtagcagattccataagttgttcaatgagtgtgaagctatgttgggtaacttctttgtttcagattatattcctttcatgggttggattgataaactcaggggactggatgcacgtcttgaacgcaatttcaaggagatggataagttctaccaagaagccattgatgaacacatgaattctaagaaaaaaactccagaggaagaggatttagttgatgtcttacttcaactgaaagagaacaacacgtttcccatagatctcaccaatgataacatcaaagcagtgctcttgaacttacttgtaggagctacaggtacaactgaagtcacaacaatctgggccatgactgaactaataaaaaatccaagcattatgaagaaagtgcaagaagaaattagaggcttaagtggtaagaaagatttcttggatgaagatgatattcaaaagttttcctacttaagggcagtgataaaagagacacttagattgcacttaccagcaccactacttataccaagagaaacaaataaaaaatgcatgttagatggctacgaaattccagccaagacattattatatgtgaatgcttgggcaattcatagagatcctaaggcttggaaagatccagaagagtttatacctgagaggtttttaaattgcgacatagatctttatggacaagattttgagtttattccattcggtgctggtcgtagattgtgccctggtatgaatatggcatttgctgcattggatcttatacttgctaatcttctttattcctttgactgggaattgccccaaggaatgaaaaaggaagacattgatactgaagtgttgccaggagttacacagcataagaagaatcctctgtgtgttgtggccaagtgctatatgtaaaatccaaaagtcgtaactactgctgaaaaaaataaaataaaataattaatgattgtactcttccaacgaagattattaaataaagatgtaagccctcc

SEQ ID NO: 59090 - protein, 499 aa, Glycine max; identical to SEQ ID NO: 53070
  peptide (1)..(499): Ceres Seq. ID no. 13594210

SEQ ID NO: 59091 - protein, 410 aa, Glycine max; identical to SEQ ID NO: 53071
  peptide (1)..(410): Ceres Seq. ID no. 13594211

SEQ ID NO: 59092 - protein, 384 aa, Glycine max; identical to SEQ ID NO: 53072
  peptide (1)..(384): Ceres Seq. ID no. 13594212

SEQ ID NO: 59093 - DNA, 940 bp, Glycine max
  misc_feature (1)..(940): Ceres Seq. ID no. 14308320
gtactgcttacattgagaaattagattgaaaatcaaattcatctctatccattaatattcaatactcttttttctttttttctggctcctttggcctctgttctgtgttcagtcttcaaccacctcaacacatagacgacgcgccacttgtttttgctccaaaccgccctctgattcccgaacccaatgacttctccgctggtggcggagggcgccgccgtcacggcgttccgatcggtgatgctccgggtgcagcaggcggcggagagatccgggtccaaacccgaccgggtccgggtcgtggcggtttccaagacgaaacccgtcactctgattcaacaactctacgacgccggtcaccgacacttcggcgaaaactacgtccaagaaatcattgaaaaagctcctcagcttcccccagacgttgagtggcatttcattgggcatttgcaaagcaacaaagtcaaaacacttttgggtggagttccaaatctggccatggttgagagtgtggacaatcagaagatagcaaataatcttgaccgtatggtatcaacccttggaagaaatcctctgaaggttttggtgcaagtaaatacaagtggagaagaatccaaatctggtattgatccttccgattgtgttgagcttgcaaaacatgtgaaattgagctgcccaaacctagtgttctctggcctaatgacgataggaatgccagactatacctcaactccacagaactttcagacactatcaaattgcagaactgaagtatgcaaggcacttgaaatgcccgaggaggaatgtgaactgtcaatgggcatgtctggtgattttgagttagcgattgaaatgggtagtaccaatgtaagaattggatccacaatatttggaccgagggagtatgcaaagaaacagtaatagcaagaagttgtaatcc

SEQ ID NO: 59094 - protein, 244 aa, Glycine max
  peptide (1)..(244): Ceres Seq. ID no. 14308321
MTSPLVAEGAAVTAFRSVMLRVQQAAERSGSKPDRVRVVAVSKTKPVTLIQQLYDAGHRHFGENYVQEIIEKAPQLPPDVEWHFIGHLQSNKVKTLLGGVPNLAMVESVDNQKIANNLDRMVSTLGRNPLKVLVQVNTSGEESKSGIDPSDCVELAKHVKLSCPNLVFSGLMTIGMPDYTSTPQNFQTLSNCRTEVCKALEMPEEECELSMGMSGDFELAIEMGSTNVRIGSTIFGPREYAKKQ

SEQ ID NO: 59095 - protein, 226 aa, Glycine max
  peptide (1)..(226): Ceres Seq. ID no. 14308322
MLRVQQAAERSGSKPDRVRVVAVSKTKPVTLIQQLYDAGHRHFGENYVQEIIEKAPQLPPDVEWHFIGHLQSNKVKTLLGGVPNLAMVESVDNQKIANNLDRMVSTLGRNPLKVLVQVNTSGEESKSGIDPSDCVELAKHVKLSCPNLVFSGLMTIGMPDYTSTPQNFQTLSNCRTEVCKALEMPEEECELSMGMSGDFELAIEMGSTNVRIGSTIFGPREYAKKQ

SEQ ID NO: 59096 - protein, 140 aa, Glycine max
  peptide (1)..(140): Ceres Seq. ID no. 14308323
MVESVDNQKIANNLDRMVSTLGRNPLKVLVQVNTSGEESKSGIDPSDCVELAKHVKLSCPNLVFSGLMTIGMPDYTSTPQNFQTLSNCRTEVCKALEMPEEECELSMGMSGDFELAIEMGSTNVRIGSTIFGPREYAKKQ

SEQ ID NO: 59097 - DNA, 1861 bp, Glycine max
  misc_feature (1)..(1861): Ceres Seq. ID no. 14310527
acaattcctcaaatcacagcgaggaagaaacatcattttctcatgatagcagtatggaactgacagaaaatactagtgatgatccaatgccagaactgcacaatcctactacgctcaaagaaagatgtcttgagtctcttgattttcctggaaccgagacagtcaagaatatgcctgcctttggagctactgaagaacacttgagtggaaagcaaagtttagctggcagttatgataatgaggagaagatatcaagtgacagtgataatatttatcttgtagagatcaaagatactacctcaagttccttaaatgagccagttgaaattataagaagcagtcatgaggaggctccaaccaatgaaacagtcaatgatgttccagaagatttgctatccagtgtgaatacagaaaatccagatatcaaatctgagtcacctggaagagatgttgaaaccaagaatctgaatggtgataatggggaaaaaatttccatgtccaaaagtttagtcctagaaggtttagttagatcactcagatctaatttgattggttcaggagcacctgtaaacgaaccaactgccaacaacagaaaagaaggaattgaaaatgttaaacaggaaactgagactcttgaagagttccctacaaaggaacaatctgaagctcatattagtgctgttgtagaacctgagacccctgtagagaaacagaataacacaggattgtggtacttggtgtataagcacatggtatcaaatatggatgaaaacaattccgagtcactaattgatggggcagatgaaaaagagtcagggtttgatgggagcagaacaagaggagcttccttctctcatgaaagtacacccgtgactgatgaagagatgaaatttaaggaccatgtcgtagctgatccagaagttgcacgccaacagaatgaagccatcaagatggtagaagaagcaattgattcaattcttccagatgatcaggatgacttatcagacaaggaatcactcactgacagcacaatttcagacaactccaaacaatccaacagaactgaaagagtatacagtgaaggcctgaaccaaaaagaagaacagatggaatccgggaacggaatgatccaaaaacaagaagaatcagcaccaaaggagcaaaacaaaacaaaccagaaaatgtctacaagctggagcaatcttaaaaaagtgatcctgcttaggagattcatcaagtcattggaaaaagtaaggaaattcaacccaagagggcctagatatctacctctagagcctgattcagaagctgaaaaagttaacttaaggcatcaagacatggaagaacgaaaaggtacggaagaatggatgcttgattatgcacttcgacaggttgtttccaaattaacccctgctaggaaaagaaaagtggagctgctggtggaagcttttgaaacagtcatgccaactataaaaacttgaaactgggcaaactggcaaagagtggaatagctttgtatgcaaaaaaaattcaagctgaaaggtcaacaaggagatgtatatgatcataatcatttgggatgtcagcagttttttgttttgtggaaactgtgtctggtgtcatatattttttatagtctcttaggaggaaacttagagtatagaatgtttcatgattcagcaacaacaaaattcaatatagggatatttccccctttttttaacctttcatatctctcttggtgttctcaggtggatgttttgtatgaaagatttgcattacaaataccatagacaatctttaaatgtcatgatgtatgtcttttgtgtggaacataatagaatggcctaatccgtattgc

SEQ ID NO: 59098 - protein, 492 aa, Glycine max
  peptide (1)..(492): Ceres Seq. ID no. 14310528
NSSNHSEEETSFSHDSSMELTENTSDDPMPELHNPTTLKERCLESLDFPGTETVKNMPAFGATEEHLSGKQSLAGSYDNEEKISSDSDNIYLVEIKDTTSSSLNEPVEIIRSSHEEAPTNETVNDVPEDLLSSVNTENPDIKSESPGRDVETKNLNGDNGEKISMSKSLVLEGLVRSLRSNLIGSGAPVNEPTANNRKEGIENVKQETETLEEFPTKEQSEAHISAVVEPETPVEKQNNTGLWYLVYKHMVSNMDENNSESLIDGADEKESGFDGSRTRGASFSHESTPVTDEEMKFKDHVVADPEVARQQNEAIKMVEEAIDSILPDDQDDLSDKESLTDSTISDNSKQSNRTERVYSEGLNQKEEQMESGNGMIQKQEESAPKEQNKTNQKMSTSWSNLKKVILLRRFIKSLEKVRKFNPRGPRYLPLEPDSEAEKVNLRHQDMEERKGTEEWMLDYALRQVVSKLTPARKRKVELLVEAFETVMPTIKT

SEQ ID NO: 59099 - protein, 475 aa, Glycine max
  peptide (1)..(475): Ceres Seq. ID no. 14310529
MELTENTSDDPMPELHNPTTLKERCLESLDFPGTETVKNMPAFGATEEHLSGKQSLAGSYDNEEKISSDSDNIYLVEIKDTTSSSLNEPVEIIRSSHEEAPTNETVNDVPEDLLSSVNTENPDIKSESPGRDVETKNLNGDNGEKISMSKSLVLEGLVRSLRSNLIGSGAPVNEPTANNRKEGIENVKQETETLEEFPTKEQSEAHISAVVEPETPVEKQNNTGLWYLVYKHMVSNMDENNSESLIDGADEKESGFDGSRTRGASFSHESTPVTDEEMKFKDHVVADPEVARQQNEAIKMVEEAIDSILPDDQDDLSDKESLTDSTISDNSKQSNRTERVYSEGLNQKEEQMESGNGMIQKQEESAPKEQNKTNQKMSTSWSNLKKVILLRRFIKSLEKVRKFNPRGPRYLPLEPDSEAEKVNLRHQDMEERKGTEEWMLDYALRQVVSKLTPARKRKVELLVEAFETVMPTIKT

SEQ ID NO: 59100 - protein, 464 aa, Glycine max
  peptide (1)..(464): Ceres Seq. ID no. 14310530
MPELHNPTTLKERCLESLDFPGTETVKNMPAFGATEEHLSGKQSLAGSYDNEEKISSDSDNIYLVEIKDTTSSSLNEPVEIIRSSHEEAPTNETVNDVPEDLLSSVNTENPDIKSESPGRDVETKNLNGDNGEKISMSKSLVLEGLVRSLRSNLIGSGAPVNEPTANNRKEGIENVKQETETLEEFPTKEQSEAHISAVVEPETPVEKQNNTGLWYLVYKHMVSNMDENNSESLIDGADEKESGFDGSRTRGASFSHESTPVTDEEMKFKDHVVADPEVARQQNEAIKMVEEAIDSILPDDQDDLSDKESLTDSTISDNSKQSNRTERVYSEGLNQKEEQMESGNGMIQKQEESAPKEQNKTNQKMSTSWSNLKKVILLRRFIKSLEKVRKFNPRGPRYLPLEPDSEAEKVNLRHQDMEERKGTEEWMLDYALRQVVSKLTPARKRKVELLVEAFETVMPTIKT

SEQ ID NO: 59101 - DNA, 1271 bp, Glycine max
  misc_feature (1)..(1271): Ceres Seq. ID no. 14310543
attttttcttcatcatccaccactttatttgtcacttgctttcatgcaattaacacttctaccaccttttttcattttctcactctcttcactaaaatgagtgacacacaccaacctttcatgtccgtacaaccacccatgaagctccacaaccacccatttaacccacaagcctcaagctcaaattttgacggcgacccaccatgcaaaaccgccggaaaaacaaaaccacctcacacgaagctcctccgggtcattctcaccgaccacgacgccaccgattctgactcctccggcgacgacgaagacccaaaaaacacaaaaaaacacaaaaaggtgaaaagacaaattacccacatcaccataaaccttccctttttctcaaaatccccaactccaacatcaacaccttcttcttcttcgcttgacccgacccgttcgacccgacccaagaaacgactcggcgtccctcgccgccggaacaagttccgcggcgtccggcagcgaccatggggacggtggacggcagaaatccgtgacccgactcagagaaaacgggtctggctcggaaccttcgacacggcggaggaagccgccgccgtgtacgacgaggccgcggtgaagctcaagggccctaacgccgtcaccaacttccccctctccgccgccggaaacacggaacatgatacccctccgccggagacggtgttctccggcgaaggtctttcatctccgacgtccgttctcacttactgcgacggagactcgacgccgttcgacggttttcgttacggcgaggtcgacgcgttcgggtttgagtttgacatcgacgcgccgtttagtttaacggccgttaacttaggggtgctgagtcagcggttcgggaaggaagagtttggcgagtttgacccgaacgagttcttgacgtggccgagttaaggggcttctttgtcatttcgcgaaatatccagggactggtttagtaattctactaaagttctttttgtcgtattgttttgtcctacgtggaattccaaaactaccctcgtgactaaagagtttttgtgcagcttagaagagtgttagagtgctagagagcaatagagtgagaacaatttcgtaatggaagtggaagagaattttgtcctatgttaatttgtgtaattaagccttaattgtattgttatggagaaagaggatatgatggaaagtattagaaggattctattgtagtttcttatataattttataaagtaaaaatgttagtatt

SEQ ID NO: 59102 - protein, 312 aa, Glycine max
  peptide (1)..(312): Ceres Seq. ID no. 14310544
IFSSSSTTLFVTCFHAINTSTTFFHFLTLFTKMSDTHQPFMSVQPPMKLHNHPFNPQASSSNFDGDPPCKTAGKTKPPHTKLLRVILTDHDATDSDSSGDDEDPKNTKKHKKVKRQITHITINLPFFSKSPTPTSTPSSSSLDPTRSTRPKKRLGVPRRRNKFRGVRQRPWGRWTAEIRDPTQRKRVWLGTFDTAEEAAAVYDEAAVKLKGPNAVTNFPLSAAGNTEHDTPPPETVFSGEGLSSPTSVLTYCDGDSTPFDGFRYGEVDAFGFEFDIDAPFSLTAVNLGVLSQRFGKEEFGEFDPNEFLTWPS

SEQ ID NO: 59103 - protein, 280 aa, Glycine max
  peptide (1)..(280): Ceres Seq. ID no. 14310545
MSDTHQPFMSVQPPMKLHNHPFNPQASSSNFDGDPPCKTAGKTKPPHTKLLRVILTDHDATDSDSSGDDEDPKNTKKHKKVKRQITHITINLPFFSKSPTPTSTPSSSSLDPTRSTRPKKRLGVPRRRNKFRGVRQRPWGRWTAEIRDPTQRKRVWLGTFDTAEEAAAVYDEAAVKLKGPNAVTNFPLSAAGNTEHDTPPPETVFSGEGLSSPTSVLTYCDGDSTPFDGFRYGEVDAFGFEFDIDAPFSLTAVNLGVLSQRFGKEEFGEFDPNEFLTWPS

SEQ ID NO: 59104 - protein, 272 aa, Glycine max
  peptide (1)..(272): Ceres Seq. ID no. 14310546
MSVQPPMKLHNHPFNPQASSSNFDGDPPCKTAGKTKPPHTKLLRVILTDHDATDSDSSGDDEDPKNTKKHKKVKRQITHITINLPFFSKSPTPTSTPSSSSLDPTRSTRPKKRLGVPRRRNKFRGVRQRPWGRWTAEIRDPTQRKRVWLGTFDTAEEAAAVYDEAAVKLKGPNAVTNFPLSAAGNTEHDTPPPETVFSGEGLSSPTSVLTYCDGDSTPFDGFRYGEVDAFGFEFDIDAPFSLTAVNLGVLSQRFGKEEFGEFDPNEFLTWPS

SEQ ID NO: 59105 - DNA, 1749 bp, Glycine max
  misc_feature (1)..(1749): Ceres Seq. ID no. 15177963
acaataacaactcgataagaacacaataaactccttcctcatttctcatttctcattcaacaccatggcaagaaaaaccaagtccattttcttggccttcttactactatgctctttctcactgggggtagtggtagtagcccaagaggaggcaatagcaaaatccgaaagtgaagcattaggggaaccagagaaaagagaaacacttgaaatcatcattggtggaggtggttcacctgctccttctccctctccccctacatattgcccacctcctccaccaaaaccactgagccggttggagaaagcaaaacgtgttcttctcaaattcaaaaccacaatcgacgaccccaattgttacacgcaaaactggagccaggacacagacgcgtgtaaattcaatggggtacgatgcgccaatttcccagacgatcagcagcgagcagtagctggacttgacctaaacggagcaaaactcgccactaaaaacggtggcaatttgcccctcacgggtctcctcgacagcatacccgagttaacattcttccacgttaactccaacaacttctccttcgtcggtggcttccccaacaacattaccaggttccgtttcttcttcgagcttgatctcagtaacaacaaagtcagtggcaagttcccaacgcaagcaattcagaacaaccagttagtcttcctggacctcaggttcaaccagctcaccgggcccattgacccgaaactcttcgagagggacctggacgtgatttttgtgaacaacaacaagttcacggggtacctcccggagaatttcgggtccacgccggcccggtacctcacgtttgcccacaacagcctctcgggctcgctccctaagagcgtgggctacgcgccgaacctcaccgaggttctcttcttgaagaaccagttcgaagggtgtctgcccttcgaaatcggttacctcaagaaggccgtagtgtttgatataagtgaaaatctcttgaccggtcccatcccgctctccttcggatgcctgaagaaaattcaatttctcaatttggcgcacaacaagctctacggctgtgttcccgacaacctttgccaaattccttctatccgcaacaatgggaatctctctttggcgaacaattatttcaacgaaattggaccttcgtgttggagtttgataaaatccaaggttttggatgtgtcaggaaactgcattccggggcttcctaaccaaaagtctcccaaagaatgctaccagttttacaaaacaaagaaaacatgtccgaacccgaattcattttactacgttccgtgcaaatcgtactgggggaggcagagcaagcccactagtccaccttctgagccagtgacttacaagactctcaaaccacatcgtctcagattgtgatcagatatcataggatagctcatattagtcccttgtgcaggcgggactttgcctttgtgttgggtttcattttttatttttctcacaacaatcctctggtcagatagaaacctctcctctgatgcgttgattcaaatcctgttcactggtttcatattattactgtggttatgtttgtatgtttttctttcatgattagctgttgttattttgtattttgtatgccccgtgaataagcgctgtcgtggagttgggcatcttgactattacaagtttggtgtcactcaaatgtaatttcccaagttgtcgaataaaattggtactatatttggacg

SEQ ID NO: 59106 - protein, 449 aa, Glycine max
  peptide (1)..(449): Ceres Seq. ID no. 15177964
MARKTKSIFLAFLLLCSFSLGVVVVAQEEAIAKSESEALGEPEKRETLEIIIGGGGSPAPSPSPPTYCPPPPPKPLSRLEKAKRVLLKFKTTIDDPNCYTQNWSQDTDACKFNGVRCANFPDDQQRAVAGLDLNGAKLATKNGGNLPLTGLLDSIPELTFFHVNSNNFSFVGGFPNNITRFRFFFELDLSNNKVSGKFPTQAIQNNQLVFLDLRFNQLTGPIDPKLFERDLDVIFVNNNKFTGYLPENFGSTPARYLTFAHNSLSGSLPKSVGYAPNLTEVLFLKNQFEGCLPFEIGYLKKAVVFDISENLLTGPIPLSFGCLKKIQFLNLAHNKLYGCVPDNLCQIPSIRNNGNLSLANNYFNEIGPSCWSLIKSKVLDVSGNCIPGLPNQKSPKECYQFYKTKKTCPNPNSFYYVPCKSYWGRQSKPTSPPSEPVTYKTLKPHRLRL

SEQ ID NO: 59107 - DNA, 985 bp, Glycine max
  misc_feature (1)..(985): Ceres Seq. ID no. 12383917
cagctacgtaggccccccccccagtagcatcgacaaccaaatgtttgtaccaaacatctgcttaccagcctgaaaaaaacaaccttgtttgtacctctcaacaagttgtcttacataatactgaagatacgacggcaacaatgctggcaccacctaaactagacagacataaagattctgcagctccagacttccatctccattgtgaaaaccataactgtattgctgacaacatgaagcaccagctgccacctgatcatgatgctgaatctataaagaaaatggccactgctgctccacattgtggatcatcaaatgcggttgaagtgctagttgaaggtaatgttggaaaccacagtatcaatagaagtgcctcaggcagcaacaatggaagcaatggacaaaatgggagcagcacggcggttaatgctggagggacaaacatgaaaagcaacaatggactcactgggaatagtggcagtggtgatgctagcggaagtgtaagtgccaacagagtagatcaaaacaagacttctcaaagggaagcggccttaactaaatttcgccaaaagagaaaagagagaagggagaggtgctttcataaaaaggttcgatatcagagcagaaagagattagctgaacaacgacctcgatttcgtggacaatttgttcgacagtcctctaacgaaaatgcaagtgaggcaacaacagatagctgattcagagcatttgccacaatggcataatgatggggatatgcgagaaaaggtcgaggagtctgcatgtagaatttgggaattgttctgtgtgtttgtgttaaaaaggtataatgactctggttattccaacttgttcatttgaaacctgaatcaatttatgtggtgagagattgttatatgctgattgatgctcggataacttatagcgactcaataatttcaattacttgtcgatcttgtgcttgaagaatcaaatgtgttagttc

SEQ ID NO: 59108 - protein, 192 aa, Glycine max
  peptide (1)..(192): Ceres Seq. ID no. 12383918
MLAPPKLDRHKDSAAPDFHLHCENHNCIADNMKHQLPPDHDAESIKKMATAAPHCGSSNAVEVLVEGNVGNHSINRSASGSNNGSNGQNGSSTAVNAGGTNMKSNNGLTGNSGSGDASGSVSANRVDQNKTSQREAALTKFRQKRKERRERCFHKKVRYQSRKRLAEQRPRFRGQFVRQSSNENASEATTDS

SEQ ID NO: 59109 - protein, 161 aa, Glycine max
  peptide (1)..(161): Ceres Seq. ID no. 12383919
MKHQLPPDHDAESIKKMATAAPHCGSSNAVEVLVEGNVGNHSINRSASGSNNGSNGQNGSSTAVNAGGTNMKSNNGLTGNSGSGDASGSVSANRVDQNKTSQREAALTKFRQKRKERRERCFHKKVRYQSRKRLAEQRPRFRGQFVRQSSNENASEATTDS

SEQ ID NO: 59110 - protein, 145 aa, Glycine max
  peptide (1)..(145): Ceres Seq. ID no. 12383920
MATAAPHCGSSNAVEVLVEGNVGNHSINRSASGSNNGSNGQNGSSTAVNAGGTNMKSNNGLTGNSGSGDASGSVSANRVDQNKTSQREAALTKFRQKRKERRERCFHKKVRYQSRKRLAEQRPRFRGQFVRQSSNENASEATTDS

SEQ ID NO: 59111 - DNA, 1437 bp, Glycine max
  misc_feature (1)..(1437): Ceres Seq. ID no. 15172464
gcaagacgttttaggatatccaagggaaagtgaatcccaactctctcgagagccacgaaaccagaacttcgagtgactcaacctcaaaaaagctaaatcctttgatgaagaaaaagcagcagaaaaagaccgaagaatctacaacagtttcttgatccctcttatagcctttgagcattgaaagggttttcctcaaattgccatgatttgattcctcaacaccccacacacacgtagttaaaatgggttttactaggaaacccatgtttcctgtgttgctggttttgttcatcacaagtcttcttgagccgccccatgttgcagaatctacttcttctgattactccactttggtctacaagggctgctcaaaggagcctttcacagatcccaatggggtgtactctcaggcactttcagcactctttggctcattggtttcacaatccaccaaagccaagttctacaaaaccacttctggctctggccagaacaccataactggcctcttccaatgcagaggggatctcaccaattctgattgctacaactgtgtcagcaggctcccagttctgtgtgacaaactttgtggcaaaaccactgctgccagagtccaacttctaggatgttatattctctatgaggttgcagggttctcccaaatctcaggtatgcagatgttgtacaagacctgtggggcaacaaatgctgctgggagggggtttgaagagaggagggacactgctttctcagtgatggaaaatggggtggttagtggccatggcttctacactaccagctaccagtccttgtatgtcatggggcagtgtgagggagatgttggtgactcagattgtggggagtgtgtgaagaatgctgtgcagagagctcaggttgaatgcggtagctctatttcaggacaagtgtttttgcacaagtgcttcattagttatagctattacccaaatggggttccttctagatcatcttcttcatcatcagcttcatactcttcatcttcttcagggcaaaatccagggaaaacagctgctataatattaggaggtgcagttgcggtggcttttctggttatattgttgctatttgcaaggagtttgaagaagaaacatgatgattattgacagcagaaaatgaattctgagaaggcaaaattattctttgtgatgcattgtttttacaagattagttgatggatgaggggtggaaaatggaagttttgtggtaaatagagtttttgcttgatgcagaaacaatactacaggatggttcactgtaatgattgttgtagctaggtagttaagattttgttgttgggaagagcaatataattagaacctgaaagtgagattttttttctgactagggtgtaactgtaaattacccaacagaatgaatgtttgtcaaaattttgggtcc

SEQ ID NO: 59112 - protein, 299 aa, Glycine max
  peptide (1)..(299): Ceres Seq. ID no. 15172465
MGFTRKPMFPVLLVLFITSLLEPPHVAESTSSDYSTLVYKGCSKEPFTDPNGVYSQALSALFGSLVSQSTKAKFYKTTSGSGQNTITGLFQCRGDLTNSDCYNCVSRLPVLCDKLCGKTTAARVQLLGCYILYEVAGFSQISGMQMLYKTCGATNAAGRGFEERRDTAFSVMENGVVSGHGFYTTSYQSLYVMGQCEGDVGDSDCGECVKNAVQRAQVECGSSISGQVFLHKCFISYSYYPNGVPSRSSSSSSASYSSSSSGQNPGKTAAIILGGAVAVAFLVILLLFARSLKKKHDDY

SEQ ID NO: 59113 - protein, 292 aa, Glycine max
  peptide (1)..(292): Ceres Seq. ID no. 15172466
MFPVLLVLFITSLLEPPHVAESTSSDYSTLVYKGCSKEPFTDPNGVYSQALSALFGSLVSQSTKAKFYKTTSGSGQNTITGLFQCRGDLTNSDCYNCVSRLPVLCDKLCGKTTAARVQLLGCYILYEVAGFSQISGMQMLYKTCGATNAAGRGFEERRDTAFSVMENGVVSGHGFYTTSYQSLYVMGQCEGDVGDSDCGECVKNAVQRAQVECGSSISGQVFLHKCFISYSYYPNGVPSRSSSSSSASYSSSSSGQNPGKTAAIILGGAVAVAFLVILLLFARSLKKKHDDY

SEQ ID NO: 59114 - protein, 156 aa, Glycine max
  peptide (1)..(156): Ceres Seq. ID no. 15172467
MQMLYKTCGATNAAGRGFEERRDTAFSVMENGVVSGHGFYTTSYQSLYVMGQCEGDVGDSDCGECVKNAVQRAQVECGSSISGQVFLHKCFISYSYYPNGVPSRSSSSSSASYSSSSSGQNPGKTAAIILGGAVAVAFLVILLLFARSLKKKHDDY

SEQ ID NO: 59115 - DNA, 1000 bp, Glycine max
  misc_feature (1)..(1000): Ceres Seq. ID no. 15169084
ggtgttgttgagattctaaaaattgccagttacattcccttcacaagattctcacaaacaactcttgagaaagaaagaatggctgccaacacattgatgagttctgccatctcagccttcccatctctcctttcctcctcaaaatccagatttgccgcagcagttcctctttccagctttgttgtcaccaatgcctcttcttctcgcttttccatgagtgctgactggatgcctggccagcctagacccccctaccttgatggttcagcacctggtgactttggattcgaccctcttcgtcttggtgaagtaccagagaatcttgagaggttcaaagagtcagaactcattcactgcagatgggccatgcttgctgttccagggattttggttccagaggcattgggcttaggcaactgggtaaaggctcaggaatgggctgcagttcctggtggccaagcaacctacctaggcaacccagttccatggggcaccctacccaccattctggccattgaattccttgctatttccttcgtggagcaccaaaggagcatggagaaggaccctaaaaagaagaaataccctggtggtgcttttgatcctttgggatactctaaggaccctaaaacattccacgaatacaaagtcaaagaaattaaaaatggacgtcttgctttgttggcttttgtgggattctgtgttcaacaatcagcttatcccggcactggacctttggagaacttggctgctcacttggctgacccatggcacaacaacattggaaacgtcattattccacaatcgattttgccttgaaaaaaaatatatatttgtttcaatagctacctgtataactccgtgtaacaatttgtaatgaatcggatcgatcttgctacgttggtatcgctgtgctgtaattaaactttgaattcaaactcatagatactctggcaactagttggtatgaaagagaggcttgaagcaaacttccaagtcc

SEQ ID NO: 59116 - protein, 272 aa, Glycine max
  peptide (1)..(272): Ceres Seq. ID no. 15169085
GVVEILKIASYIPFTRFSQTTLEKERMAANTLMSSAISAFPSLLSSSKSRFAAAVPLSSFVVTNASSSRFSMSADWMPGQPRPPYLDGSAPGDFGFDPLRLGEVPENLERFKESELIHCRWAMLAVPGILVPEALGLGNWVKAQEWAAVPGGQATYLGNPVPWGTLPTILAIEFLAISFVEHQRSMEKDPKKKKYPGGAFDPLGYSKDPKTFHEYKVKEIKNGRLALLAFVGFCVQQSAYPGTGPLENLAAHLADPWHNNIGNVIIPQSILP

SEQ ID NO: 59117 - protein, 246 aa, Glycine max
  peptide (1)..(246): Ceres Seq. ID no. 15169086
MAANTLMSSAISAFPSLLSSSKSRFAAAVPLSSFVVTNASSSRFSMSADWMPGQPRPPYLDGSAPGDFGFDPLRLGEVPENLERFKESELIHCRWAMLAVPGILVPEALGLGNWVKAQEWAAVPGGQATYLGNPVPWGTLPTILAIEFLAISFVEHQRSMEKDPKKKKYPGGAFDPLGYSKDPKTFHEYKVKEIKNGRLALLAFVGFCVQQSAYPGTGPLENLAAHLADPWHNNIGNVIIPQSILP

SEQ ID NO: 59118 - protein, 240 aa, Glycine max
  peptide (1)..(240): Ceres Seq. ID no. 15169087
MSSAISAFPSLLSSSKSRFAAAVPLSSFVVTNASSSRFSMSADWMPGQPRPPYLDGSAPGDFGFDPLRLGEVPENLERFKESELIHCRWAMLAVPGILVPEALGLGNWVKAQEWAAVPGGQATYLGNPVPWGTLPTILAIEFLAISFVEHQRSMEKDPKKKKYPGGAFDPLGYSKDPKTFHEYKVKEIKNGRLALLAFVGFCVQQSAYPGTGPLENLAAHLADPWHNNIGNVIIPQSILP

SEQ ID NO: 59119 - DNA, 1539 bp, Glycine max
  misc_feature (1)..(1539): Ceres Seq. ID no. 14312981
aagcgaacacggttagtagcggcagagaaaggagatggaatcggcgggggagtggctggagaaggcgttggtggagttgtgctccaagattgaaactggcttgggtttaggtttggaccaagacatcatcaaaggcctcgtctcttactgtgaccttgccgagccacgagatgccaaagagtaccttgacaatataatcggtcaggatgcagggaaaactgtgattgaagaatatttacgacggagaggttactcagaatccagcatcggctcaaatgttccaactaccaaattacatgcgtatgtcaaaccgccttcagttgagacatctgctagtggaactaagaaatcatttaaaacaccgaaagtggcaggccgcggtaatcatgcagaaccgaacaagaatgcgagtagcagtaatcaggaaaatcagactccaactgtagttagtgaatcaaaaacatcgcaaaaggggaaccaattgaattccaagaagaagaaagccgggaaagttgtctcacttgctgaggctgccaaaggatccattgtgttccagcagggaagaccatgctcctgtcaagcacgtcgtcacgggctggtcagcaactgcttatcttgtggcaaaatagtctgtgaacaagaaggagaggggccttgccatttttgtggtgcacttgtgttaagagagggcagctcgtatgctggtctggaagaaagtttgcctcccttgtcagagtctgaggctgttgctgaagcttatgcaaagagactggttgaatatgaccgaaactctgcagctcgtacaacagttattgatgaccaaagtgactactatgagattgatggaaacagttggttgtcaaaggaggagaaagaactgttgaagaagaaacaagaggagatggaagaagctgagaaagccaaacgtaatagagttgttgtgacttttgatctagttggccgcaaggtccttgtaaataaagatgaagcttcagaattacagtttgaaaatagaatattgcgtcctccggatgcaagggaagtgaaccgtatcaaaccaaatccaactctaacgtttcaacctgtttttgtggacctgggctttggtaggaaatccactaaagataagcaatcacataaaggcataagcaagggcttgtgcttggagattacagggcgagtgcagcatgatagaaatgaccagaagtatgttatgatggaaaaccaattggcaacagcttcaaatgaaaatgtttggcaagtatcttcaggaaatggaatgcacatcatggaagatgatggtcaatgtttactgaactatgataagtaaagtgccttatccagcttttagcgattattgttacattcttcatttgctttctcccattttctttttgatttgcgcgtctaagccatgaaattgatggtcctaattacttttttcagaaagaaagttaagaattttaggcagcgctatttttgtttatacactgctcagatattaaatatcagtcaactactattatctatttgtattag

SEQ ID NO: 59120 - protein, 431 aa, Glycine max
  peptide (1)..(431): Ceres Seq. ID no. 14312982
MESAGEWLEKALVELCSKIETGLGLGLDQDIIKGLVSYCDLAEPRDAKEYLDNIIGQDAGKTVIEEYLRRRGYSESSIGSNVPTTKLHAYVKPPSVETSASGTKKSFKTPKVAGRGNHAEPNKNASSSNQENQTPTVVSESKTSQKGNQLNSKKKKAGKVVSLAEAAKGSIVFQQGRPCSCQARRHGLVSNCLSCGKIVCEQEGEGPCHFCGALVLREGSSYAGLEESLPPLSESEAVAEAYAKRLVEYDRNSAARTTVIDDQSDYYEIDGNSWLSKEEKELLKKKQEEMEEAEKAKRNRVVVTFDLVGRKVLVNKDEASELQFENRILRPPDAREVNRIKPNPTLTFQPVFVDLGFGRKSTKDKQSHKGISKGLCLEITGRVQHDRNDQKYVMMENQLATASNENVWQVSSGNGMHIMEDDGQCLLNYDK

SEQ ID NO: 59121 - DNA, 1289 bp, Glycine max
  misc_feature (1)..(1289): Ceres Seq. ID no. 14312989
ggtccacgtgtacttgttgaaggtcgggttgagcaagaactcacatgttactaattcattgttggatctttatgcaaagtgtggggccatcagggaggctcaacgagtgttcagtgagatgagtgaaaggaatgcggtgtcttggacatcgttgattgttggcttggctgttaatgggtttggtgaggaagcacttgagcttttcaaagagatggagggacaaggactggtgcctagtgagatcacttttgttggtgtcttgtatgcgtgcagccattgtgggatgttggacgaagggtttgagtactttagaagaatgaaagaggaatgtggaatcatacctaggatagagcactatggttgcatggtggatttgttgagtagggcgggtttagtgaaacaagcgtatgagtatattcagaacatgccagtgcagccaaatgcagttatttggaggaccttgttaggggcatgtacaatacatggacatttgggtttgggagagatagctagatcccacctattgaacttggagcctaaacatagtggtgattatgtgcttctttcaaatctttatgcctccgaacgtcgttggtctgatgtacaagtgataaggaggtcaatgctgaaggatggtgttaagaaaacccctggctatagtctagttgagttgggcaaccgtgtttatgaatttactatgggtgatagatctcatcctcaaagtcaggatgtatatgcactactagagaagattacagaattgttgaagttagaaggttatgtgcctcatactgctaatgtacttgcagacatagaggaagaggagaaggaacaagctttgtcttatcatagtgaaaaagttgcaattgcttttatgctcttaaatacaccaccagggaccccaatcagggttatgaagaatttaagagtttgtgcagattgtcatatggctatcaaactcatagcaaagatttacgatagagagattgttatcagggatcgcagtaggttccatcattttagaggtggttcatgttcctgtaaagattactggtaatatagtaatcatcaggatttgataatggcatcttgagagtcaagttctgcattgatttccaagtacaatgtggtgctttaaaatagaggcagtgagacatactttaatatgttgtaataattctccgcaatcctctctgctgcaagggtcaaccaattcaattcaagcctcttgatacatggatgagttagtgaacatgcttaagattatggaagtttggtacaaattgcgt

SEQ ID NO: 59122 - protein, 351 aa, Glycine max
  peptide (1)..(351): Ceres Seq. ID no. 14312990
VHVYLLKVGLSKNSHVTNSLLDLYAKCGAIREAQRVFSEMSERNAVSWTSLIVGLAVNGFGEEALELFKEMEGQGLVPSEITFVGVLYACSHCGMLDEGFEYFRRMKEECGIIPRIEHYGCMVDLLSRAGLVKQAYEYIQNMPVQPNAVIWRTLLGACTIHGHLGLGEIARSHLLNLEPKHSGDYVLLSNLYASERRWSDVQVIRRSMLKDGVKKTPGYSLVELGNRVYEFTMGDRSHPQSQDVYALLEKITELLKLEGYVPHTANVLADIEEEEKEQALSYHSEKVAIAFMLLNTPPGTPIRVMKNLRVCADCHMAIKLIAKIYDREIVIRDRSRFHHFRGGSCSCKDYW

SEQ ID NO: 59123 - protein, 312 aa, Glycine max
  peptide (1)..(312): Ceres Seq. ID no. 14312991
MSERNAVSWTSLIVGLAVNGFGEEALELFKEMEGQGLVPSEITFVGVLYACSHCGMLDEGFEYFRRMKEECGIIPRIEHYGCMVDLLSRAGLVKQAYEYIQNMPVQPNAVIWRTLLGACTIHGHLGLGEIARSHLLNLEPKHSGDYVLLSNLYASERRWSDVQVIRRSMLKDGVKKTPGYSLVELGNRVYEFTMGDRSHPQSQDVYALLEKITELLKLEGYVPHTANVLADIEEEEKEQALSYHSEKVAIAFMLLNTPPGTPIRVMKNLRVCADCHMAIKLIAKIYDREIVIRDRSRFHHFRGGSCSCKDYW

SEQ ID NO: 59124 - protein, 281 aa, Glycine max
  peptide (1)..(281): Ceres Seq. ID no. 14312992
MEGQGLVPSEITFVGVLYACSHCGMLDEGFEYFRRMKEECGIIPRIEHYGCMVDLLSRAGLVKQAYEYIQNMPVQPNAVIWRTLLGACTIHGHLGLGEIARSHLLNLEPKHSGDYVLLSNLYASERRWSDVQVIRRSMLKDGVKKTPGYSLVELGNRVYEFTMGDRSHPQSQDVYALLEKITELLKLEGYVPHTANVLADIEEEEKEQALSYHSEKVAIAFMLLNTPPGTPIRVMKNLRVCADCHMAIKLIAKIYDREIVIRDRSRFHHFRGGSCSCKDYW

SEQ ID NO: 59125 - DNA, 1228 bp, Glycine max
  misc_feature (1)..(1228): Ceres Seq. ID no. 14316469
aaaaaaaaaaaagcgtaataagaaataacgagagaaaaattctggggtttagaggagaaaaggggagaaagggtgggtattgcttcacacaaacacaacagtgtctgctgcaccttgcaatggtttcgctatcaacatggtttcgctacattgcccacaagctcgaatactccttctccctcagctggaagaactacaaaggaggtcaaattacagacagagaggtacgtgatgttgtttggaaaaacttctttcaaggaaagctgacgtacttgcactggaataaaggagaggagatggcccctactattgatggaaaagcagtaactcttgttcggaaattaccagttgtagacccaacgcgtgtttttgtaggagatgttgtggttgtgaaggaccctgagaagccagataactacctactcagaagattaactgcagttgaaggctatgaaatggtttctactgatgaaaaggatgaagcctttgttctcgagaaggatcaatgctgggtagtggctgaaaatgaaaaattgaaagccaaggaagcgaaggatagccgaacatttggtccagttcagatgacagacattgtaggcagagtcatatattgcctgcgaagtgctgtagaccatggccgggtacaaaacagttatttcggcatgcgaaaggatacaccagtgctggaagtggaacttgatgttgatgagatggcaaagagtcacaaagcctgaaacatttgtcccgagaaacactaactagtttgctttacgcatgccttagtttcttcttgtggattttccttgaagcacagattgaataataaaaaatatgatttttaaattgttgcaatgggatgatggtgttatgtggatgtcctctgcatgctaggcaattggctagctcttcccaagcagaaattggaagcggtctgtgttaaagcttgagttcgacattattgtatgctaagttctagcaaggactcctctgccctttgttctattcatatttggctgtaaaattgaccgagttttggtcatttttgttaatagtcgaggatgatagaaaaaaaggctgcattgttagaaataatagtttcagatattttcattttatgaagacctagtgcctcgactgagtgttcacttcttgccaatttgtctttctagggaacaatcgttgatatctgttctctttagtcagttgagtgaaaaagaacgtttaagtg

SEQ ID NO: 59126 - protein, 243 aa, Glycine max
  peptide (1)..(243): Ceres Seq. ID no. 14316470
KKKSVIRNNERKILGFRGEKGRKGGYCFTQTQQCLLHLAMVSLSTWFRYIAHKLEYSFSLSWKNYKGGQITDREVRDVVWKNFFQGKLTYLHWNKGEEMAPTIDGKAVTLVRKLPVVDPTRVFVGDVVVVKDPEKPDNYLLRRLTAVEGYEMVSTDEKDEAFVLEKDQCWVVAENEKLKAKEAKDSRTFGPVQMTDIVGRVIYCLRSAVDHGRVQNSYFGMRKDTPVLEVELDVDEMAKSHKA

SEQ ID NO: 59127 - protein, 204 aa, Glycine max
  peptide (1)..(204): Ceres Seq. ID no. 14316471
MVSLSTWFRYIAHKLEYSFSLSWKNYKGGQITDREVRDVVWKNFFQGKLTYLHWNKGEEMAPTIDGKAVTLVRKLPVVDPTRVFVGDVVVVKDPEKPDNYLLRRLTAVEGYEMVSTDEKDEAFVLEKDQCWVVAENEKLKAKEAKDSRTFGPVQMTDIVGRVIYCLRSAVDHGRVQNSYFGMRKDTPVLEVELDVDEMAKSHKA

SEQ ID NO: 59128 - protein, 145 aa, Glycine max
  peptide (1)..(145): Ceres Seq. ID no. 14316472
MAPTIDGKAVTLVRKLPVVDPTRVFVGDVVVVKDPEKPDNYLLRRLTAVEGYEMVSTDEKDEAFVLEKDQCWVVAENEKLKAKEAKDSRTFGPVQMTDIVGRVIYCLRSAVDHGRVQNSYFGMRKDTPVLEVELDVDEMAKSHKA

SEQ ID NO: 59129 - DNA, 1335 bp, Glycine max
  misc_feature (1)..(1335): Ceres Seq. ID no. 15168378
atgatttagaaacacctggcagaaacacagacgtgctagtcattcattagcaacaaattttatatgaacattttaataaatgtaacatttgttgacagaaatttaactatatgcttctaacaatagacaaataagtaaatgttcacaggtttatcggggaactcttcccagtgggcaagtggtagccataaaacgagctcaaagagaatcaaagcagggagggctagaattcaaagctgaaattgaactcctttcaagggtccaccacaagaatctggttagccttgtgggattctgctttgaacgagaagaacaaatgctggtttatgagtttgttccaaatggaactttgaaggatgctctcacaggggaatctggaattgtgttgagctggagtagaagactgaaagtagcccttggtgctgccaggggtttggcttatcttcatgaacatgctgatccccctattatacacagggacatcaaatcaaacaacattttgctgaatgaaaactatactgcaaaagtttctgattttggtctctccaagtctatcttagatgatgaaaaagattacttctccactcaagttaaaggaacaatgggctacttggatccagattattatactagtcagaagttgactgaaaagagtgatgtctatagttttggagtgctaatactggagctgattactgcaagaaagccaatagaacgagggaaatacattgtgaaagtggtcaggagtacaattgataagacaaaagacttgtatggtcttcacaaaattattgacccggccatctgttcaggatcaacactggagggttttgagaagtttgtggaccttgcaatggagtgtgttgaagattcaggagctgacaggcccgcaatgagtgatgtggttaaagaaattgaagacatgttgcagtctgttggtatgcacctaacatctgaatcagtaacatccacaacatctagtcatagatatcaggaggtaagtatagtgagtttccatctggaccaaccttacagcaatgagtcctttggttcaagtgcagaacatattcaaaaattgaacctagttagttaagttagtcttttttctcaagattgaagtcaagagagacttgtttattagtatttcttggccaaaacacagaaaagtagaaattgtggaatttagagtttgtggctgtgagcttcagagtataagtgtggtagcaaggttaacatttccttgactatcatttcttttccttctttctctcccactaaagatgtgaaatgtacaatgaatataggttttgatatggaacatgtagaatataaagt

SEQ ID NO: 59130 - protein, 258 aa, Glycine max
  peptide (1)..(258): Ceres Seq. ID no. 15168379
MLVYEFVPNGTLKDALTGESGIVLSWSRRLKVALGAARGLAYLHEHADPPIIHRDIKSNNILLNENYTAKVSDFGLSKSILDDEKDYFSTQVKGTMGYLDPDYYTSQKLTEKSDVYSFGVLILELITARKPIERGKYIVKVVRSTIDKTKDLYGLHKIIDPAICSGSTLEGFEKFVDLAMECVEDSGADRPAMSDVVKEIEDMLQSVGMHLTSESVTSTTSSHRYQEVSIVSFHLDQPYSNESFGSSAEHIQKLNLVS

SEQ ID NO: 59131 - protein, 163 aa, Glycine max
  peptide (1)..(163): Ceres Seq. ID no. 15168380
MGYLDPDYYTSQKLTEKSDVYSFGVLILELITARKPIERGKYIVKVVRSTIDKTKDLYGLHKIIDPAICSGSTLEGFEKFVDLAMECVEDSGADRPAMSDVVKEIEDMLQSVGMHLTSESVTSTTSSHRYQEVSIVSFHLDQPYSNESFGSSAEHIQKLNLVS

SEQ ID NO: 59132 - DNA, 579 bp, Glycine max
  misc_feature (1)..(579): Ceres Seq. ID no. 15170567
acaatcacaacttggtaaaggtactccgtgcaagaaagatgaagctcgagttcgcaaatgtgctacttctgtgccttgtccttagctcttctttcttggaaatctcaatggctggttctcctttctgtgactcaaagtgcgcgcagaggtgtgccaaagctggggttcaggacagatgcttgaggttttgcgggatctgctgcgagaagtgcaactgtgtcccatctgggacttacggaaacaaggacgagtgcccttgctacagggacatgaagaactccaagggcaaggacaaatgcccttgaagaatatctaatttcatcatcacactccattccaataaactaccttgtattgtatcttcagccttccttttcagagtattgcattatgccacggatctatgtacctacccttcaacttaagtattccgtctagttaattagcatagctacccttcaacttatgtgttccgacctagttaattaattagcttattaattatttacgagagtaaaacatcgttttagttctgtcatcttagtctttgaagttatataaagaaattcaaattaaaat

SEQ ID NO: 59133 - protein, 100 aa, Glycine max
  peptide (1)..(100): Ceres Seq. ID no. 15170568
NHNLVKVLRARKMKLEFANVLLLCLVLSSSFLEISMAGSPFCDSKCAQRCAKAGVQDRCLRFCGICCEKCNCVPSGTYGNKDECPCYRDMKNSKGKDKCP

SEQ ID NO: 59134 - protein, 88 aa, Glycine max
  peptide (1)..(88): Ceres Seq. ID no. 15170569
MKLEFANVLLLCLVLSSSFLEISMAGSPFCDSKCAQRCAKAGVQDRCLRFCGICCEKCNCVPSGTYGNKDECPCYRDMKNSKGKDKCP

SEQ ID NO: 59135 - protein, 65 aa, Glycine max
  peptide (1)..(65): Ceres Seq. ID no. 15170570
MAGSPFCDSKCAQRCAKAGVQDRCLRFCGICCEKCNCVPSGTYGNKDECPCYRDMKNSKGKDKCP

SEQ ID NO: 59136 - DNA, 1291 bp, Glycine max
  misc_feature (1)..(1291): Ceres Seq. ID no. 15177607
gtgtccttgccggttcgtgcagaaaggtccattgcattgcagtgtaagtatttacaaagcaaagcgaagcaagcattcactgaatgcgctctatctctctctttcgatctgggtactaaccctaacccgcttcgaaccgtggcttcctcaggctcgcagaacctctctcgaagaaaaccttcttcttcttcgtcttcgtcttctcaacaaacacccgggtcgacccggatcgtttaccgagaatctcggatcccatcggaatccgatttcccgatctggcagcagaactggttcatcgcattgctcttcgtcatggctctcggattcttcgccctcgccattttcctcttcctcactctcgactctgacatcgctccttcttccaccgcctccgcctccgcctccgccgcttcctccgaaggcgtcgaggtgcaggttacttacggcacggttctgaagcttatgcacgagaagaccaaatttcggttgcattctcatgacgtgccctacggttctggcagtggacaacaatcggttactggtttcccaaatgtcgacgattccaatagttactggattgtaagacctgagccaggaacttctgctaaacaaggtgaccccattaaaagtggcacaatcattagattgcagcacatgagaacaaggaagtggctgcacagccatttgcatgcatccccgatatcaggcaatcttgaggtcagttgttttggaggagaatccgaatctgacaccggggactattggaagcttataatagaaggaagtggaaagacttggaagcaggatcagaggattcgccttcagcatattgacactggaggctatctacatagtcatgataagaaatacagtcgtattgctgggggtcagcaggaggtttgtggtgttcgtgaaaagcgtgctgacaatgtgtggttggcagccgaaggtgtctaccttcccgttacggaaagcaaatgagttacttagtatcgatacttattctaaacgggtaaaccatggatagtgggagtgggtggctggcaccggttctgataacaaatgcaggtttttctattgaaggataaatatacaggagcatttaggattagataacggtagtaatattttgtcataggtacactttgttatgtagtaagtgcatgccccattttcattttccccgctgaaaatacttggtgtctgttgttttgtgaacgccatataccattcctctaataggactacgaaacgcaatgagtctatttttcaattgaattattatacggat

SEQ ID NO: 59137 - protein, 326 aa, Glycine max
  peptide (1)..(326): Ceres Seq. ID no. 15177608
VSLPVRAERSIALQCKYLQSKAKQAFTECALSLSFDLGTNPNPLRTVASSGSQNLSRRKPSSSSSSSSQQTPGSTRIVYRESRIPSESDFPIWQQNWFIALLFVMALGFFALAIFLFLTLDSDIAPSSTASASASAASSEGVEVQVTYGTVLKLMHEKTKFRLHSHDVPYGSGSGQQSVTGFPNVDDSNSYWIVRPEPGTSAKQGDPIKSGTIIRLQHMRTRKWLHSHLHASPISGNLEVSCFGGESESDTGDYWKLIIEGSGKTWKQDQRIRLQHIDTGGYLHSHDKKYSRIAGGQQEVCGVREKRADNVWLAAEGVYLPVTESK

SEQ ID NO: 59138 - protein, 222 aa, Glycine max
  peptide (1)..(222): Ceres Seq. ID no. 15177609
MALGFFALAIFLFLTLDSDIAPSSTASASASAASSEGVEVQVTYGTVLKLMHEKTKFRLHSHDVPYGSGSGQQSVTGFPNVDDSNSYWIVRPEPGTSAKQGDPIKSGTIIRLQHMRTRKWLHSHLHASPISGNLEVSCFGGESESDTGDYWKLIIEGSGKTWKQDQRIRLQHIDTGGYLHSHDKKYSRIAGGQQEVCGVREKRADNVWLAAEGVYLPVTESK

SEQ ID NO: 59139 - protein, 172 aa, Glycine max
  peptide (1)..(172): Ceres Seq. ID no. 15177610
MHEKTKFRLHSHDVPYGSGSGQQSVTGFPNVDDSNSYWIVRPEPGTSAKQGDPIKSGTIIRLQHMRTRKWLHSHLHASPISGNLEVSCFGGESESDTGDYWKLIIEGSGKTWKQDQRIRLQHIDTGGYLHSHDKKYSRIAGGQQEVCGVREKRADNVWLAAEGVYLPVTESK

SEQ ID NO: 59140 - DNA, 1493 bp, Glycine max
  misc_feature (1)..(1493): Ceres Seq. ID no. 14308795
ggtaaaaggtactctctctcctctcatctttggatccccaaatctagggcttcttcttcttgtctgcgaaaatttcttgaatcactgtcttaattttcgtcatcaatttccgatttcgaatcttcgtctttgtttactttccatcgttgaagctgtgttgtgcttacttcactgtgctggttttgggtttcaagggatggaaaacatgcagagcttctggcaattgggtgatgaactccgtgggcactcaaaagcatcggaggatcacaagtggttaatggttgcctcgaaactggccgaacagacaagattgaagggggagcgtgtgaacaaccttgatctttcaaagggacccattgaaacaaggtcaagggataaatttgggttccaggaagagaacaaatttgattctcttaacttgagcatgttgaacctggactctaaatttactgagaatgtgagcaaaagctcacttcgaaatggtgtttatggtatgaatgcagtgtatcagaaaaacaatgcaaacttggtgagtaatgtgatcagtaacaagtacaatggcagtattcagcataacaaagagatcaacaacaacactggcaacaacatcaacaccaatgaaagcaacaacacaaatgcaactgacaaaaggtttaagaccttgcctgctgcggagacactcccccgcaatgaggtgcttggaggatacatctttgtctgtaacaatgacacaatgcaggaagacttgaaacgtcagctatttggtttgcctccaaggtatcgagattctgttagggcaataacaccagggctacctttatttctttataactatactactcatcagctgcatggtatttttgaggcagcaagttttggtggctctaacatagatccaactgcctgggaggataaaaaatgcaaaggggaatcaaggtttccagctcaggtaagaatccgtgtcaggaagctctgcaaggcattggaagaagattctttcaggccagtattgcatcattatgacgggccaaagtttcgtcttgaactgtcagttccagagactctggatctgttggacctatgtgaacaagctggttcagcagcataagcaagaatcaaacaaagaatgaatgtgcaaaataggtaggttttggtgtgccagctgtgtggttttggcagattttccgtgaagcgtaagcttggaaagtgaatcatcatcatgttttgggggaagtaaagggagcgtgttgttgagagtgagagaccctttgttggtgaataaatggttgttgtggtatctatcccctggaagatgctttgtagctgttacatgacatttaatacctttgtatgattaagtaaagtacagactactgtttgtactgctaaagtatgtatctgttgaaccaagaaaaaaattaaagttaaaaagcttcatgtattactaaactctatgttgagttggttgaagtgatcttttattttaaaaaaag

SEQ ID NO: 59141 - protein, 368 aa, Glycine max
  peptide (1)..(368): Ceres Seq. ID no. 14308796
VKGTLSPLIFGSPNLGLLLLVCENFLNHCLNFRHQFPISNLRLCLLSIVEAVLCLLHCAGFGFQGMENMQSFWQLGDELRGHSKASEDHKWLMVASKLAEQTRLKGERVNNLDLSKGPIETRSRDKFGFQEENKFDSLNLSMLNLDSKFTENVSKSSLRNGVYGMNAVYQKNNANLVSNVISNKYNGSIQHNKEINNNTGNNINTNESNNTNATDKRFKTLPAAETLPRNEVLGGYIFVCNNDTMQEDLKRQLFGLPPRYRDSVRAITPGLPLFLYNYTTHQLHGIFEAASFGGSNIDPTAWEDKKCKGESRFPAQVRIRVRKLCKALEEDSFRPVLHHYDGPKFRLELSVPETLDLLDLCEQAGSAA

SEQ ID NO: 59142 - protein, 303 aa, Glycine max; identical to SEQ ID NO: 58575
  peptide (1)..(303): Ceres Seq. ID no. 14308797

SEQ ID NO: 59143 - protein, 300 aa, Glycine max; identical to SEQ ID NO: 58576
  peptide (1)..(300): Ceres Seq. ID no. 14308798

SEQ ID NO: 59144 - DNA, 1256 bp, Glycine max
  misc_feature (1)..(1256): Ceres Seq. ID no. 13594176
cattacctagaaaatcctaatcgaaaaaattctgttgattcgcaattcaaattattcgtctcgctctcaatagagaagaaaaaaaaaactgcgtttttcaaatcggtaaattggctgacacatagtaaagaatcatattaatgtcgtcaagaacattgaggagaagactctatcatggggatgttgatggcaaaaggcaggagcatttggagacttcgggattggattctttgagtgagcccttgctggcagacgatgattatattgagaataagaagatatgtactcttgaagatctatgggatgatgagaagaagaaggcgcagtttcattggacattcatattctcaaaccttattgtgcaatgggctcagtggttagcaaatttggtattaggatctggatctattcttgggcgtcttttatcttttccttctgctgcactaaatatgcaaaacaataggatgtttcctccatctctaagccctctgcaggaagaaagactaagaaatctacgacaacggcttgaagttccctttgatggttctaaagcagagcaccaagacgcacttaaacaattgtggaaattggcttacccggacagggagcttccttcacttaaatcagacctttggaaggaaatgggatggcaaggttctgacccttcaacagattttaggggtggaggatttatttcattagagaatctcatcttctttgcgatgaagtatcctgattcattccagcgattattgcataaacaagatggaaccagagctgagtgggaatacccatttgcagtagctggaatcaatatttcttttatgttagcacagatgctggatcttcaagcagggcttccatcttctttgtccggaattcgttttctcaaattgcttgaagaagatgaaatggcatttgatatccttttttgtgttgcctttcaaatgatggatgctcagtggctagcaaagcgtgcgtcatatatggaatttaatgatgttttgagatccacaagaacgcagttagagcgtgagcttggtcttgaagacatcttcagcgtgaaagatttacctgcttacaacatgttgagatgattgacaattgcctttcagttcaacatttctcttcctttttttttttgtttcttttggcggagaatgttacatgaaatgtatctaaagcatttgtcattttatctctatatagaaacgtgaaaatcaaatatcagatcaatctttctgctgatttccatc

SEQ ID NO: 59145 - protein, 318 aa, Glycine max
  peptide (1)..(318): Ceres Seq. ID no. 13594177
MSSRTLRRRLYHGDVDGKRQEHLETSGLDSLSEPLLADDDYIENKKICTLEDLWDDEKKKAQFHWTFIFSNLIVQWAQWLANLVLGSGSILGRLLSFPSAALNMQNNRMFPPSLSPLQEERLRNLRQRLEVPFDGSKAEHQDALKQLWKLAYPDRELPSLKSDLWKEMGWQGSDPSTDFRGGGFISLENLIFFAMKYPDSFQRLLHKQDGTRAEWEYPFAVAGINISFMLAQMLDLQAGLPSSLSGIRFLKLLEEDEMAFDILFCVAFQMMDAQWLAKRASYMEFNDVLRSTRTQLERELGLEDIFSVKDLPAYNMLR

SEQ ID NO: 59146 - protein, 215 aa, Glycine max
  peptide (1)..(215): Ceres Seq. ID no. 13594178
MQNNRMFPPSLSPLQEERLRNLRQRLEVPFDGSKAEHQDALKQLWKLAYPDRELPSLKSDLWKEMGWQGSDPSTDFRGGGFISLENLIFFAMKYPDSFQRLLHKQDGTRAEWEYPFAVAGINISFMLAQMLDLQAGLPSSLSGIRFLKLLEEDEMAFDILFCVAFQMMDAQWLAKRASYMEFNDVLRSTRTQLERELGLEDIFSVKDLPAYNMLR

SEQ ID NO: 59147 - protein, 210 aa, Glycine max
  peptide (1)..(210): Ceres Seq. ID no. 13594179
MFPPSLSPLQEERLRNLRQRLEVPFDGSKAEHQDALKQLWKLAYPDRELPSLKSDLWKEMGWQGSDPSTDFRGGGFISLENLIFFAMKYPDSFQRLLHKQDGTRAEWEYPFAVAGINISFMLAQMLDLQAGLPSSLSGIRFLKLLEEDEMAFDILFCVAFQMMDAQWLAKRASYMEFNDVLRSTRTQLERELGLEDIFSVKDLPAYNMLR

SEQ ID NO: 59148 - DNA, 1420 bp, Glycine max
  misc_feature (1)..(1420): Ceres Seq. ID no. 14312254
ctttctctctcgtaatacaatttctctctctagaataaaacagcttctaccgcctccaagtcctacaagaacccattccctctcacaccgcccccaaaatctcactcttctgccttctcttttctcttctcttcttcctccaaaacaagtaaacaaacaacactctcacattcaccacaacacaaacacaaacacaaacaaagacaacaaccttgtttgtctgcaatcaaaacctttcaagctggcgttcgagaaccaagacacccctgtccgagaaatcaagcccaagaaccggagaatcatgggtgctggaggccctgatgacgaggacaataggtggccaccatggctgaaacctcttctcaaagagagcttctttgttcaatgcaagcttcacgctgattcgcacaagagcgagtgcaacatgtattgcttagattgtatgaacggtgctctctgctctctctgcctcgcttaccacaaagatcaccgtgctattcagataagaaggtcttcataccatgatgtgattagggttaatgagattcagaaggtgttggacatcacaggggtccaaacctacattatcaacagcgcaagggttgttttcttgaatgagaggcctcagccaaggcctggtaaaggtgtcaccaacacttgtgaagtctgcgagcgcagccttcttgattccttccgattctgttctcttggttgcaagattgttgggacttcaaggaacttccagaagaagaaaaagtcagcggcaatgggatcagacacagaggattcttcgtacagcagcaacagcagccatgggaagaagaacagcttcacaccgtccacaccgcctccaacttctgttaattacagaacggccaagagaagaaagggaattccacaccgtgccccaatgggtgggctagtcatagaatactagaaattaagttagtagtaactttaggttatttgctataatgccccctgataaattttacctcaaaacgcaactttctccgtgcagtttcacccgtcacaacacactcgagctttttgctgtaaaaggccggtgctggaattgtgttcccttctctgttccttgttaatagcgtttgtctatataggaaaaatccaatagaagtgaaaaaaaggttgagaaagtagaaaaaaaataagacatgtgatctgtgaaatagtttgagagaaaaagaatggtgcagcaaaataagcaaatgttcctttcaaccaaagtacaggaagatgaggaacattataggtttggtttctagagcaattatacgtaagttttggggtgggtgtaaatagtggcttggggaagaagacagtgacaatgtactctttccaaatagatggattgtttatggaatggtgaaaaataataatagtactaatagattttctc

SEQ ID NO: 59149 - protein, 311 aa, Glycine max
  peptide (1)..(311): Ceres Seq. ID no. 14312255
FLSRNTISLSRIKQLLPPPSPTRTHSLSHRPQNLTLLPSLFSSLLPPKQVNKQHSHIHHNTNTNTNKDNNLVCLQSKPFKLAFENQDTPVREIKPKNRRIMGAGGPDDEDNRWPPWLKPLLKESFFVQCKLHADSHKSECNMYCLDCMNGALCSLCLAYHKDHRAIQIRRSSYHDVIRVNEIQKVLDITGVQTYIINSARVVFLNERPQPRPGKGVTNTCEVCERSLLDSFRFCSLGCKIVGTSRNFQKKKKSAAMGSDTEDSSYSSNSSHGKKNSFTPSTPPPTSVNYRTAKRRKGIPHRAPMGGLVIEY

SEQ ID NO: 59150 - protein, 211 aa, Glycine max
  peptide (1)..(211): Ceres Seq. ID no. 14312256
MGAGGPDDEDNRWPPWLKPLLKESFFVQCKLHADSHKSECNMYCLDCMNGALCSLCLAYHKDHRAIQIRRSSYHDVIRVNEIQKVLDITGVQTYIINSARVVFLNERPQPRPGKGVTNTCEVCERSLLDSFRFCSLGCKIVGTSRNFQKKKKSAAMGSDTEDSSYSSNSSHGKKNSFTPSTPPPTSVNYRTAKRRKGIPHRAPMGGLVIEY

SEQ ID NO: 59151 - protein, 170 aa, Glycine max
  peptide (1)..(170): Ceres Seq. ID no. 14312257
MYCLDCMNGALCSLCLAYHKDHRAIQIRRSSYHDVIRVNEIQKVLDITGVQTYIINSARVVFLNERPQPRPGKGVTNTCEVCERSLLDSFRFCSLGCKIVGTSRNFQKKKKSAAMGSDTEDSSYSSNSSHGKKNSFTPSTPPPTSVNYRTAKRRKGIPHRAPMGGLVIEY

SEQ ID NO: 59152 - DNA, 711 bp, Glycine max
  misc_feature (1)..(711): Ceres Seq. ID no. 14304144
acctcttgctcttgcttatactaactaactcttcttgagaaactctttctcacacgccaagagtaacatgggatttccagtggggtacacagagttgatgctgccgaaggtgtttctgcaggtgctatccgtattgggcttgataagaaaactcatcaccgtcctcttgtgctacatgggcttccacgatttcttcgaatccgacattgcgtggccggagagggcgccggaattccagtcggtgtgggcggtgctcataagggaaatcctaccggtggtgaagttctcggagatggagatggagatggcggaggcgccggagagctgcgcggtgtgtctgtacgagttcgagggagaggacgagatcagacggctgacgaactgccgccacatattccacagagggtgtctggaccgttggatgggatacgatcaaagaacgtgtcccctgtgtcggacacccttcataccccaccatatgcaagctgccttcaatgatagactttgggctgcttcagggattcctgatttctattacaatcatgaatgactctagggaaaaaaaatcctagatttggggacgggagtgttctgtttaggttgttgagtatgtgttcagtgttcaatgttcgtgtaaatattatacaaaatggaaagcggagaattgttgttaaaaaaaaaaaaaaaaaaaaaaaaaaaaaaaaaaaaacc

SEQ ID NO: 59153 - protein, 160 aa, Glycine max
  peptide (1)..(160): Ceres Seq. ID no. 14304145
MGFPVGYTELMLPKVFLQVLSVLGLIRKLITVLLCYMGFHDFFESDIAWPERAPEFQSVWAVLIREILPVVKFSEMEMEMAEAPESCAVCLYEFEGEDEIRRLTNCRHIFHRGCLDRWMGYDQRTCPLCRTPFIPHHMQAAFNDRLWAASGIPDFYYNHE

SEQ ID NO: 59154 - protein, 150 aa, Glycine max
  peptide (1)..(150): Ceres Seq. ID no. 14304146
MLPKVFLQVLSVLGLIRKLITVLLCYMGFHDFFESDIAWPERAPEFQSVWAVLIREILPVVKFSEMEMEMAEAPESCAVCLYEFEGEDEIRRLTNCRHIFHRGCLDRWMGYDQRTCPLCRTPFIPHHMQAAFNDRLWAASGIPDFYYNHE

SEQ ID NO: 59155 - protein, 124 aa, Glycine max
  peptide (1)..(124): Ceres Seq. ID no. 14304147
MGFHDFFESDIAWPERAPEFQSVWAVLIREILPVVKFSEMEMEMAEAPESCAVCLYEFEGEDEIRRLTNCRHIFHRGCLDRWMGYDQRTCPLCRTPFIPHHMQAAFNDRLWAASGIPDFYYNHE

SEQ ID NO: 59156 - DNA, 1632 bp, Glycine max
  misc_feature (1)..(1632): Ceres Seq. ID no. 15172426
gaagggaagaaccactaccaaacttcaactcactttctctctctcattctccctctctctcaccccctccgatctataaatcattctctctctctctctctctctcttacttacaaagtaaagagtagagtttgttctgtgaagaactgagggaggttcaggtccatgatattttgaaatctctctgtagtaggaagaccatgggacgagcttcatcattacttataatttttttggttcttggttcttcctttgccacctataatgtggtaacgatgataaggcactacggatcttcagaaggtgtggctgttaatgatggtgcattgttttttgaccctattactgagatgcctgatcatgtaaagaatcggaagacatctaaagtgccctttcatgtcgcgttaacggcgacggatgctccatataacaaatggcagtgccgcgtcatgtattactggtataaacaacaaaagaagttacctgggtctgagatgggaggattcacgaggattctacattctggaaatcctgacaacttgatggatgaaattcctactgttgtggttgatccccttccagcaggtttggatcggggatacattgttctgaataggccatgggcctttgttcagtggctggaaaagactaaaatagaggaagaatatgtgttaatggcagagcccgatcacatatttgtgcgtcctctgcccaatctggcctatggaggacatccggctgcttttccatttttttacattagacctgatgagaatgaaaaaatcataaggaagttttatcctgaggagctgggaccagttacaaatgttgatccaattggaaattcgcctgtaattataagaaaggatttgattgcaaagattgcccccacatggatgaatatttctttgaagatgaaagaggatccagagactgataaagcttttggatgggtgctagaaatgtatgcttatgctgttgcatctgctctgcatggtgtgaggcacattctgcggaaagacttcatgctgcagcccccatgggatcttgaaactaacaagaagtacattatacattacacttacggatgtgactacaatatgaagggtgaattgacttatggcaaagttggtgaatggagatttgacaaaaggtcgcatctacgaggacctccaccaaaaaacttgcccctgcccccaccaggggttcctgaaagtgtggtaacccttgtaaagatggtgaacgaggctagtgctaacatcccaaattgggacacatcgtaaatattttccacctcatcatgatgatatcccaagtgcacattttaaaaagaaaaaaaattgacaatgagtctttttttttttttttttatcacgagtttagtcttattagatggatagatgaatgtaagcaataccattttatatgacaattaaatacaggataaatatttatatttttttttcttgttggtgatatttttgaatggtatttgggctcgtaccacaatggctgatactttgttcattaagtattggcttcgaaattgcttatgtatatgttagacaattcttgtattgtatgccatgcatagccctagacaacataataattgtttctcttcatttctac

SEQ ID NO: 59157 - protein, 360 aa, Glycine max
  peptide (1)..(360): Ceres Seq. ID no. 15172427
MGRASSLLIIFLVLGSSFATYNVVTMIRHYGSSEGVAVNDGALFFDPITEMPDHVKNRKTSKVPFHVALTATDAPYNKWQCRVMYYWYKQQKKLPGSEMGGFTRILHSGNPDNLMDEIPTVVVDPLPAGLDRGYIVLNRPWAFVQWLEKTKIEEEYVLMAEPDHIFVRPLPNLAYGGHPAAFPFFYIRPDENEKIIRKFYPEELGPVTNVDPIGNSPVIIRKDLIAKIAPTWMNISLKMKEDPETDKAFGWVLEMYAYAVASALHGVRHILRKDFMLQPPWDLETNKKYIIHYTYGCDYNMKGELTYGKVGEWRFDKRSHLRGPPPKNLPLPPPGVPESVVTLVKMVNEASANIPNWDTS

SEQ ID NO: 59158 - protein, 335 aa, Glycine max
  peptide (1)..(335): Ceres Seq. ID no. 15172428
MIRHYGSSEGVAVNDGALFFDPITEMPDHVKNRKTSKVPFHVALTATDAPYNKWQCRVMYYWYKQQKKLPGSEMGGFTRILHSGNPDNLMDEIPTVVVDPLPAGLDRGYIVLNRPWAFVQWLEKTKIEEEYVLMAEPDHIFVRPLPNLAYGGHPAAFPFFYIRPDENEKIIRKFYPEELGPVTNVDPIGNSPVIIRKDLIAKIAPTWMNISLKMKEDPETDKAFGWVLEMYAYAVASALHGVRHILRKDFMLQPPWDLETNKKYIIHYTYGCDYNMKGELTYGKVGEWRFDKRSHLRGPPPKNLPLPPPGVPESVVTLVKMVNEASANIPNWDTS

SEQ ID NO: 59159 - protein, 310 aa, Glycine max
  peptide (1)..(310): Ceres Seq. ID no. 15172429
MPDHVKNRKTSKVPFHVALTATDAPYNKWQCRVMYYWYKQQKKLPGSEMGGFTRILHSGNPDNLMDEIPTVVVDPLPAGLDRGYIVLNRPWAFVQWLEKTKIEEEYVLMAEPDHIFVRPLPNLAYGGHPAAFPFFYIRPDENEKIIRKFYPEELGPVTNVDPIGNSPVIIRKDLIAKIAPTWMNISLKMKEDPETDKAFGWVLEMYAYAVASALHGVRHILRKDFMLQPPWDLETNKKYIIHYTYGCDYNMKGELTYGKVGEWRFDKRSHLRGPPPKNLPLPPPGVPESVVTLVKMVNEASANIPNWDTS

SEQ ID NO: 59160 - DNA, 1016 bp, Glycine max
  misc_feature (1)..(1016): Ceres Seq. ID no. 15172402
aaaacctcacatattttcgtccattaccacttccacttttcctctctctcgttttggtcactccaaagtccaaatcgatcactcttcactctcattattcccaacctaacaacaacaatgatcccagaacactactccgactcatctctcttccacagctccctccttaccctcttcctaatcgcaccccccaccttcctctccctcaccttcctccaggccccctacggcaagcaccacaggcccggctgggggcccaacctccctccccccttagcctggctcctcatggaaagcccaaccctctggctcaccctcctgctcttcccactgggcctccactcccacaaccccaaagcccaggccctcatcacccccttcctaatccactacttcaaccgcaccatcctctaccctctccacctcctcctcactccttcaaagaaaaccacaccgggcttccccctcagcgtagccctaatggcattcgccttcaacgttctcaattcctacctccaggcccgaacggtctctcactacaacaatcaccatgatgactcgggctttttctggttccggtttttgtgtgggcttttggtgtttttattggggatggggattaatgtatgggctgatagggttttgttgcggctcaagagcgagggaaagggctacgtggtgccgcgcggtgggttgttcgagctcgtggcgtgtccgaattactttggggagattgtcgagtggctcggctgggccgtgatgacttggtcatgggccgggctgggcttttttgtttacacttttgcgaatttgggtccaagggcccgggccaaccgtaggtggtatttggagaagtttggggaggattatccaaaggagagaaaggctgttattccttacttgtattgagtttttttttaatgattttcttttattggatttggaattgggaatgtgggtaaaatgatgaataattgaatgtggtgatgaatgatgcaatgcagctcaacttgctc

SEQ ID NO: 59161 - protein, 302 aa, Glycine max
  peptide (1)..(302): Ceres Seq. ID no. 15172403
KTSHIFVHYHFHFSSLSFWSLQSPNRSLFTLIIPNLTTTMIPEHYSDSSLFHSSLLTLFLIAPPTFLSLTFLQAPYGKHHRPGWGPNLPPPLAWLLMESPTLWLTLLLFPLGLHSHNPKAQALITPFLIHYFNRTILYPLHLLLTPSKKTTPGFPLSVALMAFAFNVLNSYLQARTVSHYNNHHDDSGFFWFRFLCGLLVFLLGMGINVWADRVLLRLKSEGKGYVVPRGGLFELVACPNYFGEIVEWLGWAVMTWSWAGLGFFVYTFANLGPRARANRRWYLEKFGEDYPKERKAVIPYLY

SEQ ID NO: 59162 - protein, 263 aa, Glycine max
  peptide (1)..(263): Ceres Seq. ID no. 15172404
MIPEHYSDSSLFHSSLLTLFLIAPPTFLSLTFLQAPYGKHHRPGWGPNLPPPLAWLLMESPTLWLTLLLFPLGLHSHNPKAQALITPFLIHYFNRTILYPLHLLLTPSKKTTPGFPLSVALMAFAFNVLNSYLQARTVSHYNNHHDDSGFFWFRFLCGLLVFLLGMGINVWADRVLLRLKSEGKGYVVPRGGLFELVACPNYFGEIVEWLGWAVMTWSWAGLGFFVYTFANLGPRARANRRWYLEKFGEDYPKERKAVIPYLY

SEQ ID NO: 59163 - protein, 206 aa, Glycine max
  peptide (1)..(206): Ceres Seq. ID no. 15172405
MESPTLWLTLLLFPLGLHSHNPKAQALITPFLIHYFNRTILYPLHLLLTPSKKTTPGFPLSVALMAFAFNVLNSYLQARTVSHYNNHHDDSGFFWFRFLCGLLVFLLGMGINVWADRVLLRLKSEGKGYVVPRGGLFELVACPNYFGEIVEWLGWAVMTWSWAGLGFFVYTFANLGPRARANRRWYLEKFGEDYPKERKAVIPYLY

SEQ ID NO: 59164 - DNA, 1175 bp, Glycine max
  misc_feature (1)..(1175): Ceres Seq. ID no. 13581621
gacagtaccgaagagtttaacctattgttgggattgcttgttcctttgatatgaaggtcacaagtctcaagctttcaattgatcatttgacttcaactgagtccctgtttctgatctcttaagattcacttatttaattgttattgtacttcctgatgtttcatttcttcagattgagtctcttcaccattttttgcaactgagattttgggttttgttgatcgtgcctaggtgaaaagctgagatctttattttgagaatagcaattattcatctatttggacgctgggttttatcaaaatgaggaagcgtcaagtcttgaagcattcaattgctattgtaagcatgctggtgtgtgtttgctgcttttttattgtgtctgtgactgttttcaagctcccagaggccccaagaaaagataggcaaatggggttttacccaacaatcagatccagaaaagtttcccttcaagatttcaacttgggtaagtttggggaaatgatgattgacatgttgcctcaagatcttgcttttaccgtatttgttccgtccgaggatgctttcaagcgagatctgcgtctgtcggtgagtgatagtttgaaaccagacgagttcaatgatacttacgcgattgtgactcgtattttggggttttcagctgttcctaggatactttcttcggctaatgtgcaatcgggtgagcttgtgaactatgattcgttatctgggtttcccttgtatgtctcaaaagacatcgatggaatgcttgttgttaataggattcgatcagaaatagtagatgttaggaagaaggagattgttgtccatgtcatggatggggttattatggatgctgaatttgagcaatcggttttagctgaggatgatacagaggaggattgacttgacggtattcgggttttgccctttgattttggcttcatattttgttgtattcaacggtggcataacagaattaaaaaaaaaaaacaaacagtgccattgtcttttcacttgtacatgttacaatgtatctcttttcctgtacacggccctactgttggctagtcctacaaatcctggaacttgcccccatttcaaaataattgttaaaaaggtatcacgaattacttgtaacgatatatttaatggggatagtctcctcctttgctgtc

SEQ ID NO: 59165 - protein, 200 aa, Glycine max
  peptide (1)..(200): Ceres Seq. ID no. 13581622
MRKRQVLKHSIAIVSMLVCVCCFFIVSVTVFKLPEAPRKDRQMGFYPTIRSRKVSLQDFNLGKFGEMMIDMLPQDLAFTVFVPSEDAFKRDLRLSVSDSLKPDEFNDTYAIVTRILGFSAVPRILSSANVQSGELVNYDSLSGFPLYVSKDIDGMLVVNRIRSEIVDVRKKEIVVHVMDGVIMDAEFEQSVLAEDDTEED

SEQ ID NO: 59166 - protein, 185 aa, Glycine max
  peptide (1)..(185): Ceres Seq. ID no. 13581623
MLVCVCCFFIVSVTVFKLPEAPRKDRQMGFYPTIRSRKVSLQDFNLGKFGEMMIDMLPQDLAFTVFVPSEDAFKRDLRLSVSDSLKPDEFNDTYAIVTRILGFSAVPRILSSANVQSGELVNYDSLSGFPLYVSKDIDGMLVVNRIRSEIVDVRKKEIVVHVMDGVIMDAEFEQSVLAEDDTEED

SEQ ID NO: 59167 - protein, 158 aa, Glycine max
  peptide (1)..(158): Ceres Seq. ID no. 13581624
MGFYPTIRSRKVSLQDFNLGKFGEMMIDMLPQDLAFTVFVPSEDAFKRDLRLSVSDSLKPDEFNDTYAIVTRILGFSAVPRILSSANVQSGELVNYDSLSGFPLYVSKDIDGMLVVNRIRSEIVDVRKKEIVVHVMDGVIMDAEFEQSVLAEDDTEED

SEQ ID NO: 59168 - DNA, 1424 bp, Glycine max
  misc_feature (1)..(1424): Ceres Seq. ID no. 14312250
ataacatatagggagcgagatcccaaaaccaaaaggtggagggcgtgggcgagggatatctatcttcattttcgtcgtcgttcatttttttattttttttttttctgttttccattcgcttcttctctcagaaaagctcgccaatcgatcttgctctcttctacgcttttcgaattccttccattccattatggacgcagattagattcacgttcacattcacttctcttcgtttgcttcaaccactctgctctgctctgctctactctgagatccgatcgcattttcattcagaaaggaaactcgtgtgactgatttatgcgctaattgcaattgcactgcgagcgtccctgtgccgaatcggaagatgggattagtgtttaccaaattgttttcctctcttttcggtaacaaggaagctcgaatcctcgttctcggcctcgacaatgccggcaaaaccactattctctatcggcttcagatgggcgaagttgtctccaccattccaacaattgggtttaatgtcgaaacagtgcagtataacaacattaaatttcaagtctgggatttaggtgggcaaacaagtatcaggccatattggaggtgttactttccaaatactcaagcaataatctatgttgttgattcaagtgacgttgataggcttgtgatagctaaggaggagttccatgcaattttggaggaggaagaactaaaaggtgcagttgttctcattttcgcaaacaagcaggaccttcctggtgcacttgatgatgctgcagtgaccgaggctctagagttacacaagatcaaaaatcgccaatgggctatttttaaaacttctgccataaaaggagaaggactttttgagggccttgactggttgagcaatacactcaaatctggaggtggctaaaggtgtcagtttcaacgaattaaatggacgattgaattcagaaggaaggtggaaatgcgtattttggtatctctttcactgtgaatgatgctataataatatgattattaaagctcgtacacatgttttattccgttttgtgtttacagttaaaaaggtatgaacaatggtcattggttgtctttttcttggttcctttttatatttttaagttagtctcttggctcctctaatagcagtagctgaatggtttctaagaaaaaatttctagtctaatcttgtgtaattgagatacatgggtttactcttaatgtgcttgacgtatcgatgattacatgaggtagttttgtcaatgacataacggctgatgagggcaaaccttcaaagctctttggtgacatgatgaggactgagcagccattgttgttgacaatgtaaatcaaggtagcaaatttttcattaatgtaaaatgtatcgaagacaatatatgatattctttttggatttg

SEQ ID NO: 59169 - protein, 182 aa, Glycine max
  peptide (1)..(182): Ceres Seq. ID no. 14312251
MGLVFTKLFSSLFGNKEARILVLGLDNAGKTTILYRLQMGEVVSTIPTIGFNVETVQYNNIKFQVWDLGGQTSIRPYWRCYFPNTQAIIYVVDSSDVDRLVIAKEEFHAILEEEELKGAVVLIFANKQDLPGALDDAAVTEALELHKIKNRQWAIFKTSAIKGEGLFEGLDWLSNTLKSGGG

SEQ ID NO: 59170 - protein, 144 aa, Glycine max
  peptide (1)..(144): Ceres Seq. ID no. 14312252
MGEVVSTIPTIGFNVETVQYNNIKFQVWDLGGQTSIRPYWRCYFPNTQAIIYVVDSSDVDRLVIAKEEFHAILEEEELKGAVVLIFANKQDLPGALDDAAVTEALELHKIKNRQWAIFKTSAIKGEGLFEGLDWLSNTLKSGGG

SEQ ID NO: 59171 - protein, 104 aa, Glycine max
  peptide (1)..(104): Ceres Seq. ID no. 14312253
ITYRERDPKTKRWRAWARDIYLHFRRRSFFYFFFFCFPFASSLRKARQSILLSSTLFEFLPFHYGRRLDSRSHSLLFVCFNHSALLCSTLRSDRIFIQKGNSCD

SEQ ID NO: 59172 - DNA, 1328 bp, Glycine max
  misc_feature (1)..(1328): Ceres Seq. ID no. 14312281
aactgcgtcccccacaatccagtacctgaaaaatccactgcctctctctctctctcctaaccccccccccccagcaaatatatacccttccttcccacaattctatgatcacaatcttctctttctctcctacttctccgcctccttcaaaatcgtcatcaatttcgcgtctttctttctcaattctcttagattctcaattgggtcttcaaaaatgcggatgagttgcaatggatgtcgagttctgagaaaaggttgcagtgaaaattgcagcatcagaccctgtttacaatggatcaaaagcccagaatcccaagccaatgctactgtgtttctcgctaagttttatggtcgtgctggtctcatgaacctcgttaacgcaggccccgaacatcttcgtccagcgatctttcgctcgttgttgtacgaggcatgcggtcggatagtgaacccgatttacgggtctgtcgggctattatggtccgggagctggcagctgtgtcaagccgccgtggaaaacgtcttgaaaggcgcgccgattacgccgatcacgtctgaagccgcggctagcgggcggtgcccaccgctcaaggcttacgacatacgccacgtgttcaaagacgagaactccgccgccgcgtccaacgaaactcagcaccaacgagtcaagacccgctctcgagtgaagcgacccctcgccaagcccaaatccaccgccaaccaaaacaacaacattaacactaagaatacgggaaccgaattcggatcggatgaaccgggtttggtggcatgcgattggaccgaggaggcgttgaaccggtctggaagtcacgattcgacgctgagccaccagtcggaggcggcgaatgcggtggaaagtgagagcattttgtctgctgagacttcgatcctcttccgagatgaaccggaatccaacccgaagcgcttggaccggaccgatgatgttggtttagagcttacgctagggttcgagccggtatcaggtgcgcagcacgtggttccggtgaagaagagaaggattgatttgaaggattttagtggctcgtcgtgcaagatggagctggggcttgaatgctcggcttgaggactagtggctcggctcagttttgactcatcggctttctgtgtttgatataagagaacagaagtacagaaccgttttagtgttgttgttgttgttgttttttttttgtaatttgggttattgttaacccctttgtgaatgcggtgctgtacaacagtacaaactcaaacatgaatgctagtaagtagatgaacaggtgcatttcaaaattgttaccttgggc

SEQ ID NO: 59173 - protein, 367 aa, Glycine max
  peptide (1)..(367): Ceres Seq. ID no. 14312282
TASPTIQYLKNPLPLSLSPNPPPPANIYPSFPQFYDHNLLFLSYFSASFKIVINFASFFLNSLRFSIGSSKMRMSCNGCRVLRKGCSENCSIRPCLQWIKSPESQANATVFLAKFYGRAGLMNLVNAGPEHLRPAIFRSLLYEACGRIVNPIYGSVGLLWSGSWQLCQAAVENVLKGAPITPITSEAAASGRCPPLKAYDIRHVFKDENSAAASNETQHQRVKTRSRVKRPLAKPKSTANQNNNINTKNTGTEFGSDEPGLVACDWTEEALNRSGSHDSTLSHQSEAANAVESESILSAETSILFRDEPESNPKRLDRTDDVGLELTLGFEPVSGAQHVVPVKKRRIDLKDFSGSSCKMELGLECSA

SEQ ID NO: 59174 - protein, 296 aa, Glycine max
  peptide (1)..(296): Ceres Seq. ID no. 14312283
MRMSCNGCRVLRKGCSENCSIRPCLQWIKSPESQANATVFLAKFYGRAGLMNLVNAGPEHLRPAIFRSLLYEACGRIVNPIYGSVGLLWSGSWQLCQAAVENVLKGAPITPITSEAAASGRCPPLKAYDIRHVFKDENSAAASNETQHQRVKTRSRVKRPLAKPKSTANQNNNINTKNTGTEFGSDEPGLVACDWTEEALNRSGSHDSTLSHQSEAANAVESESILSAETSILFRDEPESNPKRLDRTDDVGLELTLGFEPVSGAQHVVPVKKRRIDLKDFSGSSCKMELGLECSA

SEQ ID NO: 59175 - protein, 294 aa, Glycine max
  peptide (1)..(294): Ceres Seq. ID no. 14312284
MSCNGCRVLRKGCSENCSIRPCLQWIKSPESQANATVFLAKFYGRAGLMNLVNAGPEHLRPAIFRSLLYEACGRIVNPIYGSVGLLWSGSWQLCQAAVENVLKGAPITPITSEAAASGRCPPLKAYDIRHVFKDENSAAASNETQHQRVKTRSRVKRPLAKPKSTANQNNNINTKNTGTEFGSDEPGLVACDWTEEALNRSGSHDSTLSHQSEAANAVESESILSAETSILFRDEPESNPKRLDRTDDVGLELTLGFEPVSGAQHVVPVKKRRIDLKDFSGSSCKMELGLECSA

SEQ ID NO: 59176 - DNA, 1767 bp, Glycine max
  misc_feature (1)..(1767): Ceres Seq. ID no. 14312239
attttttctcttcttttcttttctcccttgcacaccttccatgccttctattaattctctagagatcttcttccttctccttaacctcacaactcttgaaaatcctccttatcgatccaacaagcagcaaactcactgaacaaatccacaaacagaaacaaagatcctactcgtgtagatctaataacatcaccttcttcttctcctacagatcatgaattcctttcaagaatttgactcatcaaacacaaacagtaccaaagccaccaatttcccatcatcatcatcagcagcaccagcagcaacagcaccaccatgttcttcttcttcttcttcgaccactctgagccgctacgagaaccaaaagcggcgcgactggaacacgttcgggcagtacctccgcaaccacaggcccccactctcgctctcacggtgcagcggcgcgcacgtgctggagttcctgcggtacctcgaccagttcgggaaaaccaaggttcacacgcagctttgtcccttcttcgggcacccgaaccctccagcaccgtgcccttgtcctctacgccaagcatgggggagcctcgacgcactcatagggcgcctcagagctgcttttgaagagaatggaggaaaacctgaagctaacccttttggcgctcgcgctgtgagactctaccttcgtgaagtgcgtgattcgcaagccaaggctaggggtattagctacgagaaaaagaagcgcaagcgtccccaacaaccttcattgcctccctctaataatgcaaaagttgtgatttgacaataggctgggggcatgtggacaccctttgcaattgcattagaaaaatattgtgtaaacctaaacagcagtactacttttggtagatgcagcagtaatttaagtagtggcagtaaaaaacactgtggagggcctgtgctgctggtgctgctgatgatgatgatgggaaattggtggctttggtactgtttgtgtttgatgagtcaaattcttgaaaggaattcatgatctgtaggagaagaagaaggtgatgttattagatctacacgagtaggatctttgtttctggcgagggatctggtgttattgttgagggatccctggttgcggagcctgttgcaactcccccagctgctgacactaaggctgctgttgctgaggatgacgatgatgatgatgttgatttgtttggtgaagagactgaggaagagaagaaggcagctgaggaacgggcagctgcagtgaaggcatctgcaaaaaagaaagagtctgggaaatcatctgttctgttggatgtaaaaccatgggatgatgaaactgacatgaagaagcttgaagaatcagtgagatctgttcagatggaagggttgctttggggtgcatccaaacttgttcctgttggatacggtattaagaaactgcaaattatgcttactattgtggatgacctagtttctgttgatactcttattgaggaacatctcacagttgagcccatcaatgaatatgtccagagttgtgacattgtggccttcaataaaatataaactacaatcggtgggatttggagatcatggcaactgggagaattgcaagttttagaaactatgttctagggggaactaccctgaattgagaatttttgtctttagaaacccgcttatattatttgtttctatatatctttgttttgtcatcggattatttggatagtaataatttcacctttaatgtgtcaacggattatttggatg

SEQ ID NO: 59177 - protein, 192 aa, Glycine max
  peptide (1)..(192): Ceres Seq. ID no. 14312240
MNSFQEFDSSNTNSTKATNFPSSSSAAPAATAPPCSSSSSSTTLSRYENQKRRDWNTFGQYLRNHRPPLSLSRCSGAHVLEFLRYLDQFGKTKVHTQLCPFFGHPNPPAPCPCPLRQAWGSLDALIGRLRAAFEENGGKPEANPFGARAVRLYLREVRDSQAKARGISYEKKKRKRPQQPSLPPSNNAKVVI

SEQ ID NO: 59178 - protein, 99 aa, Glycine max
  peptide (1)..(99): Ceres Seq. ID no. 14312241
MFFFFFFDHSEPLREPKAARLEHVRAVPPQPQAPTLALTVQRRARAGVPAVPRPVRENQGSHAALSLLRAPEPSSTVPLSSTPSMGEPRRTHRAPQSCF

SEQ ID NO: 59179 - DNA, 987 bp, Glycine max
  misc_feature (1)..(987): Ceres Seq. ID no. 15168488
atacgtcgtcgttttgccccccagaacctctgaagaagaagaaatggcgagtagcagcagcaacactccgaaggaaagcgttgttgtcgattgcggaaggcgtcgaacctcttgcggctattgcagatcctctcgtcacaatagcatctctcatggcatgtgggcacatagccttactgtggatgactaccaagatcttcttgatcgtggctggagaaggtctggatgttttctttataaaccagagatggaaaggacatgctgcccttcttatacaattcgcttgaaagcaagtgactttgttccttctaaggagcaacttcgtgtatctagacgaatgcaaaggtgggttccatttgacattgcaaggcctctgcttgacagaaaaccttatgttgtcttatcagattcttccattttacaaaatggagagtcatccctacctcaaactacggaagatgtaatgagaaggggttttgatgatgttggccaagaagatgcaaatgatgttccaatgcttgatgatgaagaaatggttgagtctgaatcagaatgctctgatgatgaacctgacctagaaaccacttcagatgatgatccagaaattgctgatgtcagcaaggttttgctagggataaagggatctcatgtgaaatacaaggatctgcgggttgtctttggtcctgagcagcagagttacttggagtcacaattgcggagatacaggaaggttgtgggtccattgctatccgagcgaatcgtctattcgctcggataatataaatattagtacttgagtagttgagtttaataagatgctactgctaatcttcccagaaaaaaaaaaaaaaaaaccctgcaaataagattcatgtattcttctgttggatggtctgatgttggcaatagcaattgtgtgaaccttgaagtttttttataatcaactttcccatgcatttgcatatatggaattcagtgttgtattcc

SEQ ID NO: 59180 - protein, 258 aa, Glycine max
  peptide (1)..(258): Ceres Seq. ID no. 15168489
YVVVLPPRTSEEEEMASSSSNTPKESVVVDCGRRRTSCGYCRSSRHNSISHGMWAHSLTVDDYQDLLDRGWRRSGCFLYKPEMERTCCPSYTIRLKASDFVPSKEQLRVSRRMQRWVPFDIARPLLDRKPYVVLSDSSILQNGESSLPQTTEDVMRRGFDDVGQEDANDVPMLDDEEMVESESECSDDEPDLETTSDDDPEIADVSKVLLGIKGSHVKYKDLRVVFGPEQQSYLESQLRRYRKVVGPLLSERIVYSLG

SEQ ID NO: 59181 - protein, 244 aa, Glycine max
  peptide (1)..(244): Ceres Seq. ID no. 15168490
MASSSSNTPKESVVVDCGRRRTSCGYCRSSRHNSISHGMWAHSLTVDDYQDLLDRGWRRSGCFLYKPEMERTCCPSYTIRLKASDFVPSKEQLRVSRRMQRWVPFDIARPLLDRKPYVVLSDSSILQNGESSLPQTTEDVMRRGFDDVGQEDANDVPMLDDEEMVESESECSDDEPDLETTSDDDPEIADVSKVLLGIKGSHVKYKDLRVVFGPEQQSYLESQLRRYRKVVGPLLSERIVYSLG

SEQ ID NO: 59182 - protein, 206 aa, Glycine max
  peptide (1)..(206): Ceres Seq. ID no. 15168491
MWAHSLTVDDYQDLLDRGWRRSGCFLYKPEMERTCCPSYTIRLKASDFVPSKEQLRVSRRMQRWVPFDIARPLLDRKPYVVLSDSSILQNGESSLPQTTEDVMRRGFDDVGQEDANDVPMLDDEEMVESESECSDDEPDLETTSDDDPEIADVSKVLLGIKGSHVKYKDLRVVFGPEQQSYLESQLRRYRKVVGPLLSERIVYSLG

SEQ ID NO: 59183 - DNA, 1751 bp, Glycine max
  misc_feature (1)..(1751): Ceres Seq. ID no. 14313084
acaaacaccagagttgagtgctccaataataccatggaagctcaagcgtcgttcttgtttattagcttgtttttctctctggtgttgcatttgcttgcaaagcattattacaagccaaaaaccaccctttctcacaaactacccccgggaccaaagaagctacctctgatagggaacctgcatcaactagcaatggctggttcacttccacatcgtactctccgagaccttgcccttaaatacggacctctcatgcatctccaacttggtgaaatttcttccgtggttgtatcctcccccaacatggccaaggagataatgaaaacccatgatcttgcttttgtgcagaggccacaatttcttcctgctcaaattttgacctatgggcaaaatgatattgtttttgctccatatggggattattggagacaaatgaagaaaatatgtgtctcggagcttctaagtgccaagagagttcagtctttctctcatattagagaagacgagacatccaaatttatagaatcaattcgaatatcagaaggttcaccaatcaatcttactagtaaaatttactccttggtaagttcttctgtttccagggtagcatttggcgacaaatctaaggaccaggaagagtttttgtgtgtgcttgaaaaaatgatattagcggggggaggatttgaacctgacgatttgtttccttcgatgaaacttcatctcataaatggaaggaaggccaaattggagaagatgcatgagcaggttgacaagatcgcagacaacattctcagagagcatcaagaaaagcgccaaagggcactacgagaaggcaaggttgacctagaggaggaggatcttgttgatgttcttttgagaatccaacaaagtgacaacctcgagatcaaaattagtaccacaaacatcaaagctgttatattggacgtatttactgctggaacggatacttcagcatcaacacttgaatgggctatggcagaaatgatgagaaacccaagagtgaggaagaaagcacaggctgaagtaagacaagcatttagggaattgaaaataatccatgaaacagatgtagggaaacttacatacttaaagttggtgatcaaagagacattaaggttacacgctccttctcctttattggtccctagagaatgctctgaactaaccatcattgatggatatgaaatacctgtcaagactaaagtcatgataaacgtgtgggcaattggaagagatccccaatattggactgatgctgagaggtttgtcccagagagattcgatggtagttctatcgatttcaaagggaataactttgagtatcttccttttggggcaggaaggagaatgtgcccaggaatgacatttggtttagccaacattatgcttccactcgctctattactctatcacttcaattgggaacttccaaatgagatgaaacctgaggatatggatatgtctgaaaactttggattgacagttacaaggaaaagcgagttgtgtttgattcccattgttaatgatctttgacactgcacgattgatatggttggaggaatcaagtttcttttactaaggaaataaatgtgttttaaaatcgcgtctagcaatatgcatgtctttattgttttaaaagctaggttatctaactagccatccgagctatatttttatactagtgtataataatctttgctgaattttatggtttactctttccaatcttt

SEQ ID NO: 59184 - protein, 517 aa, Glycine max
  peptide (1)..(517): Ceres Seq. ID no. 14313085
TNTRVECSNNTMEAQASFLFISLFFSLVLHLLAKHYYKPKTTLSHKLPPGPKKLPLIGNLHQLAMAGSLPHRTLRDLALKYGPLMHLQLGEISSVVVSSPNMAKEIMKTHDLAFVQRPQFLPAQILTYGQNDIVFAPYGDYWRQMKKICVSELLSAKRVQSFSHIREDETSKFIESIRISEGSPINLTSKIYSLVSSSVSRVAFGDKSKDQEEFLCVLEKMILAGGGFEPDDLFPSMKLHLINGRKAKLEKMHEQVDKIADNILREHQEKRQRALREGKVDLEEEDLVDVLLRIQQSDNLEIKISTTNIKAVILDVFTAGTDTSASTLEWAMAEMMRNPRVRKKAQAEVRQAFRELKIIHETDVGKLTYLKLVIKETLRLHAPSPLLVPRECSELTIIDGYEIPVKTKVMINVWAIGRDPQYWTDAERFVPERFDGSSIDFKGNNFEYLPFGAGRRMCPGMTFGLANIMLPLALLLYHFNWELPNEMKPEDMDMSENFGLTVTRKSELCLIPIVNDL

SEQ ID NO: 59185 - protein, 506 aa, Glycine max
  peptide (1)..(506): Ceres Seq. ID no. 14313086
MEAQASFLFISLFFSLVLHLLAKHYYKPKTTLSHKLPPGPKKLPLIGNLHQLAMAGSLPHRTLRDLALKYGPLMHLQLGEISSVVVSSPNMAKEIMKTHDLAFVQRPQFLPAQILTYGQNDIVFAPYGDYWRQMKKICVSELLSAKRVQSFSHIREDETSKFIESIRISEGSPINLTSKIYSLVSSSVSRVAFGDKSKDQEEFLCVLEKMILAGGGFEPDDLFPSMKLHLINGRKAKLEKMHEQVDKIADNILREHQEKRQRALREGKVDLEEEDLVDVLLRIQQSDNLEIKISTTNIKAVILDVFTAGTDTSASTLEWAMAEMMRNPRVRKKAQAEVRQAFRELKIIHETDVGKLTYLKLVIKETLRLHAPSPLLVPRECSELTIIDGYEIPVKTKVMINVWAIGRDPQYWTDAERFVPERFDGSSIDFKGNNFEYLPFGAGRRMCPGMTFGLANIMLPLALLLYHFNWELPNEMKPEDMDMSENFGLTVTRKSELCLIPIVNDL

SEQ ID NO: 59186 - protein, 453 aa, Glycine max
  peptide (1)..(453): Ceres Seq. ID no. 14313087
MAGSLPHRTLRDLALKYGPLMHLQLGEISSVVVSSPNMAKEIMKTHDLAFVQRPQFLPAQILTYGQNDIVFAPYGDYWRQMKKICVSELLSAKRVQSFSHIREDETSKFIESIRISEGSPINLTSKIYSLVSSSVSRVAFGDKSKDQEEFLCVLEKMILAGGGFEPDDLFPSMKLHLINGRKAKLEKMHEQVDKIADNILREHQEKRQRALREGKVDLEEEDLVDVLLRIQQSDNLEIKISTTNIKAVILDVFTAGTDTSASTLEWAMAEMMRNPRVRKKAQAEVRQAFRELKIIHETDVGKLTYLKLVIKETLRLHAPSPLLVPRECSELTIIDGYEIPVKTKVMINVWAIGRDPQYWTDAERFVPERFDGSSIDFKGNNFEYLPFGAGRRMCPGMTFGLANIMLPLALLLYHFNWELPNEMKPEDMDMSENFGLTVTRKSELCLIPIVNDL

SEQ ID NO: 59187 - DNA, 1478 bp, Glycine max
  misc_feature (1)..(1478): Ceres Seq. ID no. 15168464
aatgccagcagcggggaaggtaagtaggtgtctctcactctcccaccgaatccacattctaaagtaatacgccggagaatgacgtcacactcccactacccacccgacttagacgccgactccgtcacctcctccccacgctccgatcacttccacgacgcgccgccccgcatccgcttcatgtgcagcttcggcggcaagatcctcccccgcccccacgacaaccagctccgctacgtcggcggcgacacccgcatcgtcgccgtcaaccgctccatcactttctccgccctcattctcaaactctccaaactctcaggcatgagcaacataacagccaagtaccagctcccgaacgaggatctggacgcgttgatctcggtcaccacggacgaggacgtggagaacatgatggacgagtacgaccgcgtcgcacacaatcagaacccgcgatcggcgcggctccggctcttcctcttccccgaaggagaagactcccgcgccagcagcatcagctcgctcctaaacggctcagccaagcgcgaaaactggttcctcgacgctttaaacggcggcgtttcgggcctcgaacgaggccgctccgaagcctcttctatggtctctgaagtacccgattacctcttcgggttagacaactccgaagaaataacaaatcaccaacgcgacccgagacccaaacccggacccattattcaagataacgtttccgtttcagatccgggttcgcccgccccggttgtctcgtccccttattgttccacgtcatcagcgccgcccgtgccctctctcccgaaccttccctatgttaaaaccaaacctttaaacttaaatccggttcctgatactgactccaaggaaaatcaaaccgaacctgaaacggaacctcacccgaacctgaacctgaaccaaaacccgaacatgtattcaaataaccctgttgttcactaccctccagaagctgcttattcggcgcattcagtaaacccggttccggtttactatgtttccggtccggttcgaccgggatccgtgccggttcctatgcaaaccccttatcactacgttcaacaatcgtatcatgctgtggtgccacctcaggttcctatcgggtaccatcctttggttccgggttcgggtcaagtatatggagcgggcgtgaggcacatgaccccactgcaaccttacagcccctccaccacggcggtggttcatgacggtttgaaacagcacgtgtatcatgccgtgccaaattcgggtccggttccggttcacccagttattccgatgacgggtttggatgaaccgcagagaggtggagcgtaatttgtgacgggtcggggccccaattcacttaataactgatcccatttttatttagtggatgggtgctgaatttttactaccataccatcatgcaaatggtaatttatgtctatatatatacaagtgccttcact

SEQ ID NO: 59188 - protein, 421 aa, Glycine max
  peptide (1)..(421): Ceres Seq. ID no. 15168465
MTSHSHYPPDLDADSVTSSPRSDHFHDAPPRIRFMCSFGGKILPRPHDNQLRYVGGDTRIVAVNRSITFSALILKLSKLSGMSNITAKYQLPNEDLDALISVTTDEDVENMMDEYDRVAHNQNPRSARLRLFLFPEGEDSRASSISSLLNGSAKRENWFLDALNGGVSGLERGRSEASSMVSEVPDYLFGLDNSEEITNHQRDPRPKPGPIIQDNVSVSDPGSPAPVVSSPYCSTSSAPPVPSLPNLPYVKTKPLNLNPVPDTDSKENQTEPETEPHPNLNLNQNPNMYSNNPVVHYPPEAAYSAHSVNPVPVYYVSGPVRPGSVPVPMQTPYHYVQQSYHAVVPPQVPIGYHPLVPGSGQVYGAGVRHMTPLQPYSPSTTAVVHDGLKQHVYHAVPNSGPVPVHPVIPMTGLDEPQRGGA

SEQ ID NO: 59189 - protein, 387 aa, Glycine max
  peptide (1)..(387): Ceres Seq. ID no. 15168466
MCSFGGKILPRPHDNQLRYVGGDTRIVAVNRSITFSALILKLSKLSGMSNITAKYQLPNEDLDALISVTTDEDVENMMDEYDRVAHNQNPRSARLRLFLFPEGEDSRASSISSLLNGSAKRENWFLDALNGGVSGLERGRSEASSMVSEVPDYLFGLDNSEEITNHQRDPRPKPGPIIQDNVSVSDPGSPAPVVSSPYCSTSSAPPVPSLPNLPYVKTKPLNLNPVPDTDSKENQTEPETEPHPNLNLNQNPNMYSNNPVVHYPPEAAYSAHSVNPVPVYYVSGPVRPGSVPVPMQTPYHYVQQSYHAVVPPQVPIGYHPLVPGSGQVYGAGVRHMTPLQPYSPSTTAVVHDGLKQHVYHAVPNSGPVPVHPVIPMTGLDEPQRGGA

SEQ ID NO: 59190 - protein, 340 aa, Glycine max
  peptide (1)..(340): Ceres Seq. ID no. 15168467
MSNITAKYQLPNEDLDALISVTTDEDVENMMDEYDRVAHNQNPRSARLRLFLFPEGEDSRASSISSLLNGSAKRENWFLDALNGGVSGLERGRSEASSMVSEVPDYLFGLDNSEEITNHQRDPRPKPGPIIQDNVSVSDPGSPAPVVSSPYCSTSSAPPVPSLPNLPYVKTKPLNLNPVPDTDSKENQTEPETEPHPNLNLNQNPNMYSNNPVVHYPPEAAYSAHSVNPVPVYYVSGPVRPGSVPVPMQTPYHYVQQSYHAVVPPQVPIGYHPLVPGSGQVYGAGVRHMTPLQPYSPSTTAVVHDGLKQHVYHAVPNSGPVPVHPVIPMTGLDEPQRGGA

SEQ ID NO: 59191 - DNA, 1774 bp, Glycine max
  misc_feature (1)..(1774): Ceres Seq. ID no. 14312069
aaaaccatcactgcattctctctgaagcctctaattctgtgtgtcagttaaagaaagaagcgcacatgccaaaagggatggcttcagtcaccacattttcactaatgttacagtttctgttctttatactattttcttcgtttggtcagctaagcttagctttcacgtcgcaagagtaccatgaggctcttgagaaatccattctcttcttcgagggacaacgatctgggaaattgccttccaaccagcaacaaacatggaggggagattctggattgtccgatggctcttcctaccatgtggacttagtaggcggttattatgatgctggagacaacgtcaagtttgggttgccaatggcctttaccactacattgttagcatggagtgtgattgaatttggaagctcaatgcaggaccaacttgaaaatgccagagctgctattcgttggagcacggattaccttcttaaggcagccaccaccacccctgacacattatatgtccaagtaggagagccgaacatggatcataggtgctgggaaagggctgaagatatggacactccacgcaacgtgtataaagtatcagctacaaacccaggttcggatgtagcagcagagacggcaactgcattggctgcttcttcaatagtattcagagattctgatccaagctattcctccaaattgcttcaagcagccatcaaagtattcaattttgcagaccgttacaggggttcttatagtgattctcttaattcggttgtctgtccattctactgctcttactctggataccatgatgagcttctctggggtgcatcatggatttataaagcatcaggaattaacacttatatacaatatatacaatccaatggccacatattaggggctgatgatgatggttacacattcagttgggatgacaagcgacctggaacaaaaatcctgctttccaaggaattcctagaggaaaattctgaagagttccaactatataaggcacatgcagacaattacatttgttcgctaatgtcgggaacacccggtttccaggctcagtacacccgaggggggcttctgtacaaagggagcgagagcaatttgcagtacgtaacatcaactagcttccttctcttgacatacgccaaatatctgaacacaaacggcggtaatgtagttcgatgtgggacttcagcagtcacgggcgaaaacctagtaacactagctaaagcacaagtggactacattctgggcaacaatccaacaaagatgtcttatatggtgggttttggagagaggtatccaaagcatatccaccacaggggttcctctctgccttccatccacgcacacactcaacacatttcatgcaacgacggctttcagtttttccattcttcctcgcccaaccctaatatccttgttggagccatcgtaggtggtcctgataacaatgacaacttctctgatgatcgacataactatcagcagtctgagccagcaacatacatcaatgcgccgtttgtaggtgctcttgcctatttctctgccaacccaccaacaacctattaggattaggaattaataatacacctataatcaagttttcaatatcgaccaatgccgttccaaatgtggttgcagacacttaaaaaacctgttgcctatcattaatgcttgtatgcttggtgttaggctgtttgttagttccttcatccttgatgaatgtttatgtttccatcaaaagtgatgtttaattattagtg

SEQ ID NO: 59192 - protein, 525 aa, Glycine max
  peptide (1)..(525): Ceres Seq. ID no. 14312070
NHHCILSEASNSVCQLKKEAHMPKGMASVTTFSLMLQFLFFILFSSFGQLSLAFTSQEYHEALEKSILFFEGQRSGKLPSNQQQTWRGDSGLSDGSSYHVDLVGGYYDAGDNVKFGLPMAFTTTLLAWSVIEFGSSMQDQLENARAAIRWSTDYLLKAATTTPDTLYVQVGEPNMDHRCWERAEDMDTPRNVYKVSATNPGSDVAAETATALAASSIVFRDSDPSYSSKLLQAAIKVFNFADRYRGSYSDSLNSVVCPFYCSYSGYHDELLWGASWIYKASGINTYIQYIQSNGHILGADDDGYTFSWDDKRPGTKILLSKEFLEENSEEFQLYKAHADNYICSLMSGTPGFQAQYTRGGLLYKGSESNLQYVTSTSFLLLTYAKYLNTNGGNVVRCGTSAVTGENLVTLAKAQVDYILGNNPTKMSYMVGFGERYPKHIHHRGSSLPSIHAHTQHISCNDGFQFFHSSSPNPNILVGAIVGGPDNNDNFSDDRHNYQQSEPATYINAPFVGALAYFSANPPTTY

SEQ ID NO: 59193 - protein, 504 aa, Glycine max
  peptide (1)..(504): Ceres Seq. ID no. 14312071
MPKGMASVTTFSLMLQFLFFILFSSFGQLSLAFTSQEYHEALEKSILFFEGQRSGKLPSNQQQTWRGDSGLSDGSSYHVDLVGGYYDAGDNVKFGLPMAFTTTLLAWSVIEFGSSMQDQLENARAAIRWSTDYLLKAATTTPDTLYVQVGEPNMDHRCWERAEDMDTPRNVYKVSATNPGSDVAAETATALAASSIVFRDSDPSYSSKLLQAAIKVFNFADRYRGSYSDSLNSVVCPFYCSYSGYHDELLWGASWIYKASGINTYIQYIQSNGHILGADDDGYTFSWDDKRPGTKILLSKEFLEENSEEFQLYKAHADNYICSLMSGTPGFQAQYTRGGLLYKGSESNLQYVTSTSFLLLTYAKYLNTNGGNVVRCGTSAVTGENLVTLAKAQVDYILGNNPTKMSYMVGFGERYPKHIHHRGSSLPSIHAHTQHISCNDGFQFFHSSSPNPNILVGAIVGGPDNNDNFSDDRHNYQQSEPATYINAPFVGALAYFSANPPTTY

SEQ ID NO: 59194 - protein, 500 aa, Glycine max
  peptide (1)..(500): Ceres Seq. ID no. 14312072
MASVTTFSLMLQFLFFILFSSFGQLSLAFTSQEYHEALEKSILFFEGQRSGKLPSNQQQTWRGDSGLSDGSSYHVDLVGGYYDAGDNVKFGLPMAFTTTLLAWSVIEFGSSMQDQLENARAAIRWSTDYLLKAATTTPDTLYVQVGEPNMDHRCWERAEDMDTPRNVYKVSATNPGSDVAAETATALAASSIVFRDSDPSYSSKLLQAAIKVFNFADRYRGSYSDSLNSVVCPFYCSYSGYHDELLWGASWIYKASGINTYIQYIQSNGHILGADDDGYTFSWDDKRPGTKILLSKEFLEENSEEFQLYKAHADNYICSLMSGTPGFQAQYTRGGLLYKGSESNLQYVTSTSFLLLTYAKYLNTNGGNVVRCGTSAVTGENLVTLAKAQVDYILGNNPTKMSYMVGFGERYPKHIHHRGSSLPSIHAHTQHISCNDGFQFFHSSSPNPNILVGAIVGGPDNNDNFSDDRHNYQQSEPATYINAPFVGALAYFSANPPTTY

SEQ ID NO: 59195 - DNA, 1363 bp, Glycine max
  misc_feature (1)..(1363): Ceres Seq. ID no. 15176843
aatttcgcgcgaagaagaagaaacaaagaaaggtggtgctgggtattctatggcgacacccaacaacagcaacattaacaacgcgacggcgaaaccaggaaccctaggcgttggcgtaggtgcagctcctactccgcccaagtcccagcgcggccacaacaagcccaagtgcaaacagtgtggcaatgtcgctcgttcaaggtgcccctatgaatgttgcaagagttgctgttctagaaatcaaaacccctgtcatatccacgtgttaaaagctaattcaacttttcctgacaaggcatcctcttctggtgcgtctccccttgaccagcaatccttagatccacatccacctcaatcaactgcaggtagagttgcatcacttcgacaactttccaatagttttgctcagttcaataatttacacctttcccttcgttcaaagaagccactaactagaaaggatgctgcatctatcaacgaatggagatttgccaagataaaggaatacaaggagcggaatgttgaagtggaaaatgaagcttttgaccgatacatgcagaatgtagatttactagaagaagtattagctgtgaagtcgttggatgccaatgtgccctctgcattagagtctaatgctactccaatggagagcaatgaggcaatgatccctgggataaaattgcagctaagatcaaattcaatgagaagtgatggtttgagaatgagaatacaacaaattgtaaacgagggattaaagaagctcgagaaaagtgctgtagatggtgacataaatgaatcaattgatggtgaatctaatgaagcttcaaaaaggggaaaggggattgaaaggttatcagctataagtgatcttatggataaaattaataaagcccgaactgaggaggatttgaagccgtgcttagagatgaagacccaactcttcaatttagacgaaggctctagcgcgaaagaccttcaagacaatgaaatgcatgcgaatgaaactgctgaaagtgatgtggtacaaacagaaggattggattattctttaccgaaatttgttaccatcactgagattgatctagaagttctccacaccatagacaaacacttttctacccaggatatagagcagttatgaggctagatttcttaaacgttgtgatttaccttgaaagaaacagaaatataaatgttgtgctgttctaggaaaatgctctctaattagaattaggtagtcaaatgcaagccaaaaatgttttagaaattaatctggatacttgaaccggttgaagtgtgaacagattatattcagtttgagcattatgcaattcaattacggttcaactttagtccattaatc

SEQ ID NO: 59196 - protein, 379 aa, Glycine max
  peptide (1)..(379): Ceres Seq. ID no. 15176844
ISREEEETKKGGAGYSMATPNNSNINNATAKPGTLGVGVGAAPTPPKSQRGHNKPKCKQCGNVARSRCPYECCKSCCSRNQNPCHIHVLKANSTFPDKASSSGASPLDQQSLDPHPPQSTAGRVASLRQLSNSFAQFNNLHLSLRSKKPLTRKDAASINEWRFAKIKEYKERNVEVENEAFDRYMQNVDLLEEVLAVKSLDANVPSALESNATPMESNEAMIPGIKLQLRSNSMRSDGLRMRIQQIVNEGLKKLEKSAVDGDINESIDGESNEASKRGKGIERLSAISDLMDKINKARTEEDLKPCLEMKTQLFNLDEGSSAKDLQDNEMHANETAESDVVQTEGLDYSLPKFVTITEIDLEVLHTIDKHFSTQDIEQL

SEQ ID NO: 59197 - protein, 363 aa, Glycine max
  peptide (1)..(363): Ceres Seq. ID no. 15176845
MATPNNSNINNATAKPGTLGVGVGAAPTPPKSQRGHNKPKCKQCGNVARSRCPYECCKSCCSRNQNPCHIHVLKANSTFPDKASSSGASPLDQQSLDPHPPQSTAGRVASLRQLSNSFAQFNNLHLSLRSKKPLTRKDAASINEWRFAKIKEYKERNVEVENEAFDRYMQNVDLLEEVLAVKSLDANVPSALESNATPMESNEAMIPGIKLQLRSNSMRSDGLRMRIQQIVNEGLKKLEKSAVDGDINESIDGESNEASKRGKGIERLSAISDLMDKINKARTEEDLKPCLEMKTQLFNLDEGSSAKDLQDNEMHANETAESDVVQTEGLDYSLPKFVTITEIDLEVLHTIDKHFSTQDIEQL

SEQ ID NO: 59198 - protein, 195 aa, Glycine max
  peptide (1)..(195): Ceres Seq. ID no. 15176846
MQNVDLLEEVLAVKSLDANVPSALESNATPMESNEAMIPGIKLQLRSNSMRSDGLRMRIQQIVNEGLKKLEKSAVDGDINESIDGESNEASKRGKGIERLSAISDLMDKINKARTEEDLKPCLEMKTQLFNLDEGSSAKDLQDNEMHANETAESDVVQTEGLDYSLPKFVTITEIDLEVLHTIDKHFSTQDIEQL

SEQ ID NO: 59199 - DNA, 1520 bp, Glycine max
  misc_feature (1)..(1520): Ceres Seq. ID no. 14313074
acatgtcagtgacgaaatatcttttccacctcgttgtccccactggtccatttcacaattgagattttgcattcagcttcctcccatgcttatcaccattcaccattcaccaccatgttgccatgcgattactgccattccaaacccgccatactcttctgcagaccagattccgctaaactatgcttgctatgcgaccagcacgtgcacgccgccaacgccctctccctcaagcacgtgcgcttccagatttgcgactcctgcaagaccgacaccgctgtcctccgctgctccaccgacaacctcgtcctctgccaccactgcgatgtggaaacccacggtgctgccgcttcctcccaccaccaacgtcaccgcctccacggcctctccggctgcccctccgtcacggagatcgcctccgcgctgtgcctcgatttccgggcccaggatcccgtggtccccaccgccgcctccggcggtcgcgatgaggtgtacgagcaggtgctggaaatcgcgcggcagaggaacgacgacctcggcgccgaacaactcaagttcgacgaatcccccataaacgacgtcgttgttgttgacgagatgctgatgcagcaaacgccgttcacgtctttgcttatgttgccgaattccgaatctgaattcgactcccgaaaaagtaacgataacaacggttacggaaccgaggcaggggatcttctctggaattataaccccgcgtatcagcctcctcaggtgtgggattttcagttacaaaaatcaagagattgccatgaaccaagagttgtaacatttgatggtctagaagttccaaaattatttcaggatgagcacaatatgaagtactcaacaattggtgatgacattgatattctatcaagaaataatcaatcggatcagtcatcatcaagccatgcaaagaagaaagaagagaacaacaaaaaagctaaaggtgggttatcatcagagtccaaactgtttgaatccataccgtacaatggcaccaacaatgtcgtagtcatggagcatcttgttggtgggaatgaaaatgttggcaccttaacagccagggttagtttggaagagttggctaagaatagaggggatgccatgttgcgttacaaggagaagaagaaaactcgaaggtacgataagcacattcgctatgaatcaaggaaggccagggctgatactagaaaaagggtgagagggagatttgtgaaggcaagtgatgttcaagcgtgatgatgagtaccttttcagaaatctcatccgagttcaatgctcgtgtgtgtgtacataagttacactataagagaaatatggatatattatagttttcatgaactccctgagcattgattgatttgaatcttttttggtagttgatttatttgaatttttgtttgttacattatatgggaagaggtttttttgtgtgagattctctcataagagggtgatatataagagagacactgacaataaattggtgagtttgtgtt

SEQ ID NO: 59200 - protein, 381 aa, Glycine max
  peptide (1)..(381): Ceres Seq. ID no. 14313075
MLPCDYCHSKPAILFCRPDSAKLCLLCDQHVHAANALSLKHVRFQICDSCKTDTAVLRCSTDNLVLCHHCDVETHGAAASSHHQRHRLHGLSGCPSVTEIASALCLDFRAQDPVVPTAASGGRDEVYEQVLEIARQRNDDLGAEQLKFDESPINDVVVVDEMLMQQTPFTSLLMLPNSESEFDSRKSNDNNGYGTEAGDLLWNYNPAYQPPQVWDFQLQKSRDCHEPRVVTFDGLEVPKLFQDEHNMKYSTIGDDIDILSRNNQSDQSSSSHAKKKEENNKKAKGGLSSESKLFESIPYNGTNNVVVMEHLVGGNENVGTLTARVSLEELAKNRGDAMLRYKEKKKTRRYDKHIRYESRKARADTRKRVRGRFVKASDVQA

SEQ ID NO: 59201 - protein, 220 aa, Glycine max
  peptide (1)..(220): Ceres Seq. ID no. 14313076
MLMQQTPFTSLLMLPNSESEFDSRKSNDNNGYGTEAGDLLWNYNPAYQPPQVWDFQLQKSRDCHEPRVVTFDGLEVPKLFQDEHNMKYSTIGDDIDILSRNNQSDQSSSSHAKKKEENNKKAKGGLSSESKLFESIPYNGTNNVVVMEHLVGGNENVGTLTARVSLEELAKNRGDAMLRYKEKKKTRRYDKHIRYESRKARADTRKRVRGRFVKASDVQA

SEQ ID NO: 59202 - protein, 218 aa, Glycine max
  peptide (1)..(218): Ceres Seq. ID no. 14313077
MQQTPFTSLLMLPNSESEFDSRKSNDNNGYGTEAGDLLWNYNPAYQPPQVWDFQLQKSRDCHEPRVVTFDGLEVPKLFQDEHNMKYSTIGDDIDILSRNNQSDQSSSSHAKKKEENNKKAKGGLSSESKLFESIPYNGTNNVVVMEHLVGGNENVGTLTARVSLEELAKNRGDAMLRYKEKKKTRRYDKHIRYESRKARADTRKRVRGRFVKASDVQA

SEQ ID NO: 59203 - DNA, 1502 bp, Glycine max
  misc_feature (1)..(1502): Ceres Seq. ID no. 14312176
atccctctcggtgctgtgtttagcttccttcttcttcttcctctttcttcttcttctgctgcacccacaaatcaaaaccccccttttccaacccaatttttctccataaaccctagattcaacgaacccgccgaccaagctcgaacctcacgtcgcaaaaaaacacttcttttcccctctccgaggttgtcgtgtcggagcatagccatgttgttccctcgaggaaattgatgatttttcataacattggggtctcgttttgcttgtggggtcaccttgaaggagggaaaagtaacgagctttggggctgaatcgtggtgggtctgttgagtatgcatagatctggagctacgatggcgtggaacgtgttcaagttctgcactgctctgcgtggattgggctcgatcatgatcctgttggttcttggcgttgttggtgccacttactatgctgttgttttgaccaattatggccctgctttgtatgctggaggacttgattctcttgttgccttggcagtgttgatcttgtttcatagcttgttggttatgctgttgtggagttacttttctgttgtttttaccgatccggggagtgtccctccaaactggaagcctacaattgatgaggaaaggggagaggctgatccgttggttgggacagagtttagtaatctgccgtctgatcccaatccacgggttcggtactgtcggaagtgcaatcagctcaagccgcctcgatgccatcattgttcagtttgtgggcgctgtgttttgaagatggaccaccattgtgtgtgggtagtcaactgtgtcggggctctaaattacaaatatttccttcttttcttgttctacacttttcttgagacgactctagtgactgcatccttgctgcctcatttcatagcattctttagtgatggagaaattcctggaacacctggctctcttgctacaacttttcttgctttcgttttaaacctggcctttgcactgagcgtcttaggatttctcatcatgcacatatctttggtggctgctaatacgaccactattgaggcatatgagaagaaaactactccaaaatggcgttatgaccttggtcgtcgaaaaaattttgagcaggtttttgggatggacaagaagtactggttcatccctgcttattcagacgaagatatacgaaagatgccagctctacaaggtcttgactatccttcaaaacctgacttcgattcccaatagttctaaaagctaatatatatccacatcatgtaacaaaagtcatggagactctccacaaccctctacttcactctctaacacaatgtagcgtggagcaatggggggcagggtggtgtgatgctggtttgaggggctaatgtgtttatgttcccataatgataggaactgttttttgtcaagcaatgcaattttctcacctttccttttattcaaattgagtgaaatagcaatttttagtgctggaatttattctct

SEQ ID NO: 59204 - protein, 304 aa, Glycine max
  peptide (1)..(304): Ceres Seq. ID no. 14312177
MHRSGATMAWNVFKFCTALRGLGSIMILLVLGVVGATYYAVVLTNYGPALYAGGLDSLVALAVLILFHSLLVMLLWSYFSVVFTDPGSVPPNWKPTIDEERGEADPLVGTEFSNLPSDPNPRVRYCRKCNQLKPPRCHHCSVCGRCVLKMDHHCVWVVNCVGALNYKYFLLFLFYTFLETTLVTASLLPHFIAFFSDGEIPGTPGSLATTFLAFVLNLAFALSVLGFLIMHISLVAANTTTIEAYEKKTTPKWRYDLGRRKNFEQVFGMDKKYWFIPAYSDEDIRKMPALQGLDYPSKPDFDSQ

SEQ ID NO: 59205 - protein, 297 aa, Glycine max
  peptide (1)..(297): Ceres Seq. ID no. 14312178
MAWNVFKFCTALRGLGSIMILLVLGVVGATYYAVVLTNYGPALYAGGLDSLVALAVLILFHSLLVMLLWSYFSVVFTDPGSVPPNWKPTIDEERGEADPLVGTEFSNLPSDPNPRVRYCRKCNQLKPPRCHHCSVCGRCVLKMDHHCVWVVNCVGALNYKYFLLFLFYTFLETTLVTASLLPHFIAFFSDGEIPGTPGSLATTFLAFVLNLAFALSVLGFLIMHISLVAANTTTIEAYEKKTTPKWRYDLGRRKNFEQVFGMDKKYWFIPAYSDEDIRKMPALQGLDYPSKPDFDSQ

SEQ ID NO: 59206 - protein, 279 aa, Glycine max
  peptide (1)..(279): Ceres Seq. ID no. 14312179
MILLVLGVVGATYYAVVLTNYGPALYAGGLDSLVALAVLILFHSLLVMLLWSYFSVVFTDPGSVPPNWKPTIDEERGEADPLVGTEFSNLPSDPNPRVRYCRKCNQLKPPRCHHCSVCGRCVLKMDHHCVWVVNCVGALNYKYFLLFLFYTFLETTLVTASLLPHFIAFFSDGEIPGTPGSLATTFLAFVLNLAFALSVLGFLIMHISLVAANTTTIEAYEKKTTPKWRYDLGRRKNFEQVFGMDKKYWFIPAYSDEDIRKMPALQGLDYPSKPDFDSQ

SEQ ID NO: 59207 - DNA, 1338 bp, Glycine max
  misc_feature (1)..(1338): Ceres Seq. ID no. 15172430
gacacttcccagtttcaacttcatgcctcagtgaatttctctgcaattttgctcccaaaaatttcatctctcgccattgccgtaggagagcacttcaattttctctccaataagacaattcgttctttcccttctcaatttccggcgagttctcccaatctgtaatttgcccccactctctctattcatcttactgttaccagaaagttggaatatcctccctcttcaatttctcgtaagattcatcgatcacgaacttatattgatttcgctattcttacactgatcttatttttcagtcgattttgttctgcaacatttatcgcttccagaatccagatctggatggacatgaaccatcgtttgcatttggggcaaccttgatttgggttttgaagtgctttatggaaactggggtctctaaatttttaaatttttgtctaatgacgagtggcgtgcctagatttgagtaactgggtcgctgctacagttgtggaagtttgagaattgggcttcgatttgtttgaggaagtttgtcgggtcggcgtcatgttctatggttcggtggtatgggacccttggcttattgttgctcagattgtgtgtcttcaatgtttgtactatatcaccctggggttgttcttgtcgatacttgttggcacacgtgtgtctcggttgagtctcgtgtatttctttgactatgttgcgattactacctctaccgttactggttggtgtgttattgcttcgtttctgctcagctcagttgcaggggcggtatatgtgttttgtttgattgaaagatcaaagaagtgcttggatttttcagccacagtctacattgtccatctttttatatgcattgtgtatgggggttggccctcatctataacatggtggattgtgaatggtactggaattgcagtgatggctttgctcggtgaacgtctgtgcatgaagcgtgaactccaggagatatcattgacacgatttcggtcaaatgtttgattggtagaaggtacttttgaatacaagaaacaagtgctgcaggatggcaactacttttacttctatatattggatgatcatgatcttcaagatgaatcccacgaagtgaatagttctattctgccattgaaagacctgcatttattttctattctttagttggaatagaattgaaacatatataaccagacgagactaagtatataattttacaggaatttccggaagtcttattgtaattttattctttttacccttttgtgagttttcggatctgtttacaatctcatatgttacctctttctatcccattacttttaatgaggttgt

SEQ ID NO: 59208 - protein, 152 aa, Glycine max
  peptide (1)..(152): Ceres Seq. ID no. 15172431
MFYGSVVWDPWLIVAQIVCLQCLYYITLGLFLSILVGTRVSRLSLVYFFDYVAITTSTVTGWCVIASFLLSSVAGAVYVFCLIERSKKCLDFSATVYIVHLFICIVYGGWPSSITWWIVNGTGIAVMALLGERLCMKRELQEISLTRFRSNV

SEQ ID NO: 59209 - DNA, 1220 bp, Glycine max
  misc_feature (1)..(1220): Ceres Seq. ID no. 14316412
agacgcgtcttttatcacattgaattcatccttctgtgttctgtttctttccttttcttcttgggcgaaaccctaatctccccccttcacccttcgtacaccgcgtcgcatctacttccatcttctctcagatccaatctccgattcttgcttcactatcacaagcaaacatgtctgcggctttggatatgaccctcgaagatataattaagaacaacaagaaatcttccctcgccaacaccaggggccgaggccgagcctcgggacccggacccgctcgccgcctccccaaccgtgccgccaatcgcgccgcaccgtatgccgctgccaaggcgccggagacagcttggaaacacgatatgtacgcgaaccagccagtggccgcggcgtatccaggtggtcgagcgtcttccatcgaaacagggactaagctctacatttccaatttggattatggcgtttccaatgatgatattaaggagttgtttcttgaagttggcgacgtgaaacggcatactgttcattatgacaggagtgggagatccaagggtacggcagaagtagtcttctcgcgccgagctgatgctgtagctgcagtgaagaggtacaacaatgttcagctggatgggaaaccaatgaaggtagagattgtggggacgaacatcgctacacatgctgcaccacccgctgtgaatggaacttttggaaacccaactggagttcctagaagtggacaagggagaagtgggtcattaggaaggccacgtggtgggagtagaggtcgtggcagcattcaacggggccggggacgtggaagaggaggtcgtgatgaaaaggtatctgctgaagatcttgatgctgatttggagaagtatcatgctgaggctatgcaattaaactgaaggaaacaacgatgttctgttttattgctattacatttgcggttgttagggccatgttgatggaacaccgccgaattatgtatctttatcacagtcgtgcttttcggaaaggaaaaggataacttagagtgaaaacttttacagttgatatatgtagtttgggattctgttatgaaatatttgttttcgttgggtatgactatgaaatgtggctgaagaaaccgaagtctgcttgtattatgcactccggcttcctttcattggatttaatcatttgtttattcaagtattcaacaagtgggtttggaagtgggaacc

SEQ ID NO: 59210 - protein, 243 aa, Glycine max
  peptide (1)..(243): Ceres Seq. ID no. 14316413
MSAALDMTLEDIIKNNKKSSLANTRGRGRASGPGPARRLPNRAANRAAPYAAAKAPETAWKHDMYANQPVAAAYPGGRASSIETGTKLYISNLDYGVSNDDIKELFLEVGDVKRHTVHYDRSGRSKGTAEVVFSRRADAVAAVKRYNNVQLDGKPMKVEIVGTNIATHAAPPAVNGTFGNPTGVPRSGQGRSGSLGRPRGGSRGRGSIQRGRGRGRGGRDEKVSAEDLDADLEKYHAEAMQLN

SEQ ID NO: 59211 - protein, 237 aa, Glycine max
  peptide (1)..(237): Ceres Seq. ID no. 14316414
MTLEDIIKNNKKSSLANTRGRGRASGPGPARRLPNRAANRAAPYAAAKAPETAWKHDMYANQPVAAAYPGGRASSIETGTKLYISNLDYGVSNDDIKELFLEVGDVKRHTVHYDRSGRSKGTAEVVFSRRADAVAAVKRYNNVQLDGKPMKVEIVGTNIATHAAPPAVNGTFGNPTGVPRSGQGRSGSLGRPRGGSRGRGSIQRGRGRGRGGRDEKVSAEDLDADLEKYHAEAMQLN

SEQ ID NO: 59212 - protein, 180 aa, Glycine max
  peptide (1)..(180): Ceres Seq. ID no. 14316415
MYANQPVAAAYPGGRASSIETGTKLYISNLDYGVSNDDIKELFLEVGDVKRHTVHYDRSGRSKGTAEVVFSRRADAVAAVKRYNNVQLDGKPMKVEIVGTNIATHAAPPAVNGTFGNPTGVPRSGQGRSGSLGRPRGGSRGRGSIQRGRGRGRGGRDEKVSAEDLDADLEKYHAEAMQLN

SEQ ID NO: 59213 - DNA, 1312 bp, Glycine max
  misc_feature (1)..(1312): Ceres Seq. ID no. 14316436
acttcatttcactcacccctttaactgccatccattctttctctcttgaggggcaggggtaccacctcaaagaatatcctctttgatccctttctctatttccttttctttattattattatataataacaccctctaaatacttcctttacccctctttctctctctcatcttaaacacaaacaaatatactactacttcaaactttgatatgcaactggcggcagaactccaacgcacccatcaccgccaccaaaggcaaaggcaacaacaggacaccacccccatgtgccgccaaatccagctcactatctccgatcacaccgtcgccggagacgccgtcgctgacgacggcgaggatctcttcattccgcccctcaacttcgccatggttgataatggcattttccgctccggcttccccgaacccgccaacttctccttcctccaaaccctcggccttcgttccatcatatatctgtgtcctgagccgtatccggaggccaacatggagttcctcaagtcaaatgggatcaagctttttcagtttgggattgagggccataaggagccttttgtgaacatcccagaggacacaatccgtgaagcactagaagttgttcttgatgtcaggaaccacccagttataattcactgtaagcggggaaagcaccgaacaggttgcttggtaggatgctatagaaaattgcaaaaatggtgcttgtcatccgtctttgatgaataccaacgctttgcagccgccaaagcaagagtttcagatcagaggttcgtagagttgtttgatatttccagcatgaaacatttgcccatacccttttcatgtttgaagaggtaacatataccaagctatgctgagttgggtttactttctttagtttgtgaaagtgaagccaaggttcttcctttgaataaataggaaaaggtgatgaactccttcaatgcattgcagcggcaaaggaataattcttctcccattttcaaaataagacaagaaaattctaggaatagtagagcattacctgtatttgtatgtgttaaaattctgccctatatttcccttctctccctacaattggcccttagtgtacctcaccaccttttgtcctattttctttctctttatttttatgtttttctttgctgctccccattcatcaacaatgagtgtagatatatcttgattttttctcgaggctcagagaaattcaagaaggctacaaaaatgacttgtttgtctacccaaaatcttggtgggtagtaaagcagaggaacttataaaattttatttgct

SEQ ID NO: 59214 - protein, 214 aa, Glycine max
  peptide (1)..(214): Ceres Seq. ID no. 14316437
MQLAAELQRTHHRHQRQRQQQDTTPMCRQIQLTISDHTVAGDAVADDGEDLFIPPLNFAMVDNGIFRSGFPEPANFSFLQTLGLRSIIYLCPEPYPEANMEFLKSNGIKLFQFGIEGHKEPFVNIPEDTIREALEVVLDVRNHPVIIHCKRGKHRTGCLVGCYRKLQKWCLSSVFDEYQRFAAAKARVSDQRFVELFDISSMKHLPIPFSCLKR

SEQ ID NO: 59215 - protein, 189 aa, Glycine max
  peptide (1)..(189): Ceres Seq. ID no. 14316438
MCRQIQLTISDHTVAGDAVADDGEDLFIPPLNFAMVDNGIFRSGFPEPANFSFLQTLGLRSIIYLCPEPYPEANMEFLKSNGIKLFQFGIEGHKEPFVNIPEDTIREALEVVLDVRNHPVIIHCKRGKHRTGCLVGCYRKLQKWCLSSVFDEYQRFAAAKARVSDQRFVELFDISSMKHLPIPFSCLKR

SEQ ID NO: 59216 - protein, 155 aa, Glycine max
  peptide (1)..(155): Ceres Seq. ID no. 14316439
MVDNGIFRSGFPEPANFSFLQTLGLRSIIYLCPEPYPEANMEFLKSNGIKLFQFGIEGHKEPFVNIPEDTIREALEVVLDVRNHPVIIHCKRGKHRTGCLVGCYRKLQKWCLSSVFDEYQRFAAAKARVSDQRFVELFDISSMKHLPIPFSCLKR

SEQ ID NO: 59217 - DNA, 1265 bp, Glycine max
  misc_feature (1)..(1265): Ceres Seq. ID no. 15177710
gtattatacgtccccttgtcctgcccctgcccctataccatagaacattagtacccccacacacacccctcctctatctttcactattattgccacacaaatcaattaactgaatgcttagagagagaaagaggagaaggagtagtgataaggtgatcatagagcatattataagagagtgaaaactaatggaggttggcctcaagaaggagaacatggggtttgaggaaactgagttaaggcttggactgcctggaaacggaggcactgaagaagtgctcatcaggaagaggggtttctctgagactgaaactggtcatgaagatgagtctgccaccactgtggatttgatgcttaatctttcttctaaggaggccgcaaccactgctgctgctgctgcagatccaactgataagcacaagactttgcctaaggagaagacccttctgccagcagatcctgctaagcctccagccaagacgcaggtggtgggttggccacctgtgcggtccttccggaagaacatgttggctgtgcaaaagagcgttggagaagagagcgagaagaacagcagccctaatgcaagctttgtcaaagttagcatggatggagcaccttaccttcgcaaagtggacttgaagatgtacaagagttaccgagagctctctgattctttaggcaaaatgttcagctccttcacctttggcaattgtgaatcccaaggaatgaaggatttcatgaatgagagcaagctgaatgatctcttgaacagctctgattatgtcccaacctatgaggacaaggatggtgactggatgcttgtcggtgatgtcccatgggagatgtttgttgaatcatgcaagcgtttacgcatcatgaaaggaaaggaggctattggtcttggtcttgcaccaagagccatggcaaaatgcaagaacaggagctagactagtcgcacaattcatgacctgccccatcctttgtaattgtggtgcccagttggcttagtaactaaagtaaggataagctgcagcagacacggatggacattgcagggtgttgaattatagttaatttgtgtatcattatggtttgttataatatttcaaacaaaacaatgagatgcatgtctaattaagtactaattatgaacaggaacataatgactctcaatcatgttgttagacttggctttcttatatatctttgcttgttctgtgtgagtgcttgcttaataataattttaagatgtgtttgtctgttgt

SEQ ID NO: 59218 - protein, 252 aa, Glycine max
  peptide (1)..(252): Ceres Seq. ID no. 15177711
MEVGLKKENMGFEETELRLGLPGNGGTEEVLIRKRGFSETETGHEDESATTVDLMLNLSSKEAATTAAAAADPTDKHKTLPKEKTLLPADPAKPPAKTQVVGWPPVRSFRKNMLAVQKSVGEESEKNSSPNASFVKVSMDGAPYLRKVDLKMYKSYRELSDSLGKMFSSFTFGNCESQGMKDFMNESKLNDLLNSSDYVPTYEDKDGDWMLVGDVPWEMFVESCKRLRIMKGKEAIGLGLAPRAMAKCKNRS

SEQ ID NO: 59219 - protein, 243 aa, Glycine max
  peptide (1)..(243): Ceres Seq. ID no. 15177712
MGFEETELRLGLPGNGGTEEVLIRKRGFSETETGHEDESATTVDLMLNLSSKEAATTAAAAADPTDKHKTLPKEKTLLPADPAKPPAKTQVVGWPPVRSFRKNMLAVQKSVGEESEKNSSPNASFVKVSMDGAPYLRKVDLKMYKSYRELSDSLGKMFSSFTFGNCESQGMKDFMNESKLNDLLNSSDYVPTYEDKDGDWMLVGDVPWEMFVESCKRLRIMKGKEAIGLGLAPRAMAKCKNRS

SEQ ID NO: 59220 - protein, 198 aa, Glycine max
  peptide (1)..(198): Ceres Seq. ID no. 15177713
MLNLSSKEAATTAAAAADPTDKHKTLPKEKTLLPADPAKPPAKTQVVGWPPVRSFRKNMLAVQKSVGEESEKNSSPNASFVKVSMDGAPYLRKVDLKMYKSYRELSDSLGKMFSSFTFGNCESQGMKDFMNESKLNDLLNSSDYVPTYEDKDGDWMLVGDVPWEMFVESCKRLRIMKGKEAIGLGLAPRAMAKCKNRS

SEQ ID NO: 59221 - DNA, 1424 bp, Glycine max
  misc_feature (1)..(1424): Ceres Seq. ID no. 15177799
ccctctcagcatctgtgtatttttccgttgcaattgcaacctccctcttcacactttccctcctccgtcttcttcctctgcacgcattttccgctgcagcaactccaaagccgccagctcagcatcctcgaaatcaggtgttgcaatctggcatggatttcctctggagcgagaatgcgacgacgccgcgcgcctcgcatttctccgtcgcgatctgcttcgccttcgccagtttcgcggccaggttcttccttgacagattcgtctttcgcagtttggccattaggatgttgacaaagggcagagctccttcacgtattactaaggaaatgcaagtaaagattggaaaatgctcagagtcaatgtggaagctaacatattatgctgcagttgaagcatttgttcttaaaattacctaccatgaaccctggttcactaatacgaagttatacttcaatgactggccaaatcatgagttgaagagtcccctagtgttgtactacatgtgccagtgtgggttctacatatatagcattgctgctattctcacatgggagactcgaaggaaggatttttcagtgatgtttactcaccatgtaattactgttttactgattgggatttcatatctaacaagtttttttagggttggctccataatcctcgcccttcatgatgcaagtgacgtattcatggaagctgccaaggttttcaagtattctggaagggagtttggtgcaagtgtgtgttttggattctttgctgtttcgtggctcatactgcggctaattttctttccattttgggttattaaagcaacgagcattgatcttcagcaagtcttaagcctgtcagagggttttcatatgtttctttactatgtttttaatacaatgctcataatgctgctcatcttccatatatattggtggaagctcatttgtgcgatgatcttgaggcagctgaaaaataggggaaaagttggcgaggatataagatcagattcagatgatgactgaatagacgaagaagggttttgttgagttttctttgctcccgctagttggtggtggtagctctgatggatactgtttttgacttgtctatagatttctaggagttcagttggttaatacaaccagtggaggagatctgaattttcgttagtttcaaaattttcattgattaccaagtaaaaagggagtaggaaaccgtccaaagcatattttgattcttatatttttgctgtataaatgataggcattcctgtataattgtttttccaaacgaacccgtttaggttaactaggggttgaatgacaagtggcttataacaaatatgaaggagaaagaaaaacttacagtcattctacttttgtagttgcgcttttgaggaataagccgcagactggtgcattgtactg

SEQ ID NO: 59222 - protein, 338 aa, Glycine max
  peptide (1)..(338): Ceres Seq. ID no. 15177800
LSASVYFSVAIATSLFTLSLLRLLPLHAFSAAATPKPPAQHPRNQVLQSGMDFLWSENATTPRASHFSVAICFAFASFAARFFLDRFVFRSLAIRMLTKGRAPSRITKEMQVKIGKCSESMWKLTYYAAVEAFVLKITYHEPWFTNTKLYFNDWPNHELKSPLVLYYMCQCGFYIYSIAAILTWETRRKDFSVMFTHHVITVLLIGISYLTSFFRVGSIILALHDASDVFMEAAKVFKYSGREFGASVCFGFFAVSWLILRLIFFPFWVIKATSIDLQQVLSLSEGFHMFLYYVFNTMLIMLLIFHIYWWKLICAMILRQLKNRGKVGEDIRSDSDDD

SEQ ID NO: 59223 - protein, 288 aa, Glycine max
  peptide (1)..(288): Ceres Seq. ID no. 15177801
MDFLWSENATTPRASHFSVAICFAFASFAARFFLDRFVFRSLAIRMLTKGRAPSRITKEMQVKIGKCSESMWKLTYYAAVEAFVLKITYHEPWFTNTKLYFNDWPNHELKSPLVLYYMCQCGFYIYSIAAILTWETRRKDFSVMFTHHVITVLLIGISYLTSFFRVGSIILALHDASDVFMEAAKVFKYSGREFGASVCFGFFAVSWLILRLIFFPFWVIKATSIDLQQVLSLSEGFHMFLYYVFNTMLIMLLIFHIYWWKLICAMILRQLKNRGKVGEDIRSDSDDD

SEQ ID NO: 59224 - protein, 243 aa, Glycine max
  peptide (1)..(243): Ceres Seq. ID no. 15177802
MLTKGRAPSRITKEMQVKIGKCSESMWKLTYYAAVEAFVLKITYHEPWFTNTKLYFNDWPNHELKSPLVLYYMCQCGFYIYSIAAILTWETRRKDFSVMFTHHVITVLLIGISYLTSFFRVGSIILALHDASDVFMEAAKVFKYSGREFGASVCFGFFAVSWLILRLIFFPFWVIKATSIDLQQVLSLSEGFHMFLYYVFNTMLIMLLIFHIYWWKLICAMILRQLKNRGKVGEDIRSDSDDD

SEQ ID NO: 59225 - DNA, 1323 bp, Glycine max
  misc_feature (1)..(1323): Ceres Seq. ID no. 14312266
ctgatcgagagacgaaggcagaggaaagatcgcgttatgtggcctcttgtctccttacttgcaaagccggaacagaaatcgcatataaaatgcgaaaagaaatgaattcaatgttcggagatctgcacaggatctctctccgtgtccgttgaactttctttacgccctcctcgtaacataaaaattcagatcccgccaactctgaagacctctattctctttccctcccctttccactttcccgagaaaataaacttttccgtcaattttctctccacggtttccttcttcctcacaatggctccgaacttcgacaatcgaagattcgttctcgctcttcgcattttccttctcctctccttattcttcaacctctcaccgaccttcgctcaggattctctcgtgcagaacgcgaaggaagattccgacgaatctgtggatctcggtcgccgcgccaaaattgcattgaatggtatagagaatgattcgatcctttctcttggcttggactccaccggtcctggactcttcgacgcatttttcgcgagtttttcgatgatccttattggggatgagacgtttataatagcagctctcatggctatgcgtcaccctaagtcaattgtcttgtctggtgcgctcagtgctctgattataatgacagtactttctacagggcttggcaggattgtgcctaatttgatttctaggaagcatacaaatagtgctgctacagttctttatgctttctttgggttaaggttactgtacattgcatggagatcatcagattcaaaatcctcacagaagaaagaaatggaagaagttgaagaaaaactggatggtggacaagggaaaacttcagttaggcgcttcttttcaagattttgtacaccaatatttttggagtcttttattttaacattccttgctgagtggggtgaccgtagccagatagcgacaattgcactggcaacccacaaaaatgcaattggagtagcagttggggccactataggacacaccatctgtacctctctggctgtagtgggaggaagcatgctggcatctaagatttcccaacgctcagtagccactgttggtggcttgctcttcctcggattttctgtatcttcatatttctacccgcctctatgatgaatacaagtgcagagtaatctgattcgtaaaggcttgtggcctttctatcctgctttttccccccctacataattgtctttattgtagattttgttgtacttgttccctaggaaagctcgatactaactggaacatgagattttgaatcccatttttttttgc

SEQ ID NO: 59226 - protein, 286 aa, Glycine max
  peptide (1)..(286): Ceres Seq. ID no. 14312267
MAPNFDNRRFVLALRIFLLLSLFFNLSPTFAQDSLVQNAKEDSDESVDLGRRAKIALNGIENDSILSLGLDSTGPGLFDAFFASFSMILIGDETFIIAALMAMRHPKSIVLSGALSALIIMTVLSTGLGRIVPNLISRKHTNSAATVLYAFFGLRLLYIAWRSSDSKSSQKKEMEEVEEKLDGGQGKTSVRRFFSRFCTPIFLESFILTFLAEWGDRSQIATIALATHKNAIGVAVGATIGHTICTSLAVVGGSMLASKISQRSVATVGGLLFLGFSVSSYFYPPL

SEQ ID NO: 59227 - protein, 200 aa, Glycine max
  peptide (1)..(200): Ceres Seq. ID no. 14312268
MILIGDETFIIAALMAMRHPKSIVLSGALSALIIMTVLSTGLGRIVPNLISRKHTNSAATVLYAFFGLRLLYIAWRSSDSKSSQKKEMEEVEEKLDGGQGKTSVRRFFSRFCTPIFLESFILTFLAEWGDRSQIATIALATHKNAIGVAVGATIGHTICTSLAVVGGSMLASKISQRSVATVGGLLFLGFSVSSYFYPPL

SEQ ID NO: 59228 - protein, 186 aa, Glycine max
  peptide (1)..(186): Ceres Seq. ID no. 14312269
MAMRHPKSIVLSGALSALIIMTVLSTGLGRIVPNLISRKHTNSAATVLYAFFGLRLLYIAWRSSDSKSSQKKEMEEVEEKLDGGQGKTSVRRFFSRFCTPIFLESFILTFLAEWGDRSQIATIALATHKNAIGVAVGATIGHTICTSLAVVGGSMLASKISQRSVATVGGLLFLGFSVSSYFYPPL

SEQ ID NO: 59229 - DNA, 966 bp, Glycine max
  misc_feature (1)..(966): Ceres Seq. ID no. 13594228
gggtacactcaccacacactacacactagtttgtgtttttcgcgccactcagttattcatttagaaagctactgctgagttcacaagtttctcaagcttgatggggacacaaaagtctaatatgtttgatgcacctttcaaatacatggtgcctgaagataaggaaattcccgacagacctttgccatcacattggactccttctatgcaggcatataacacttctgggtctactccaactccctttttaaatcaacaggcagctggttctcacatgcctctctacatgtgggtaaatcaggtaaacaacacactacttcaatccgatgctttgcatgatccaaggatgctctccagtaaacccacagtagctggggattttccttcaactaagaagcagcactgtaatttgatgcttgaaaatgcaagttcaaccaaactgaatcaggatttggagacaggcctagatgcatctgacgctaatgctcaacttgtaaatttggaaaaggatgaaataagaagagaaagaaaaagacagtcaaacagggaatcggcgaggagatcaaggatgcggaaagagaaagaatgtgaagagctacataaacaaatggaaatgcttaaggatgaaaactccgtgctcacacagaggctcaagagtctttctgaggagtgcctggagatctgcaatgaaaacgatgccatcgaggaagagctgattaaaatgtatggaccagaatcaatagcagatctattgctcttcaagcctacctgaccctgttgctggttaaggaagaaagcatcttacaactaatcagaatatattgtttcattttttattagggccagttgaattctgaacttgcttatgtcggcttaggttaaggaaggaaatgtaaggttacaaaaaatagggattattataataaaggatttatgaatgaaaattgtagctaaaaaaaaaaaaaa

SEQ ID NO: 59230 - protein, 223 aa, Glycine max
  peptide (1)..(223): Ceres Seq. ID no. 13594229
MGTQKSNMFDAPFKYMVPEDKEIPDRPLPSHWTPSMQAYNTSGSTPTPFLNQQAAGSHMPLYMWVNQVNNTLLQSDALHDPRMLSSKPTVAGDFPSTKKQHCNLMLENASSTKLNQDLETGLDASDANAQLVNLEKDEIRRERKRQSNRESARRSRMRKEKECEELHKQMEMLKDENSVLTQRLKSLSEECLEICNENDAIEEELIKMYGPESIADLLLFKPT

SEQ ID NO: 59231 - protein, 216 aa, Glycine max
  peptide (1)..(216): Ceres Seq. ID no. 13594230
MFDAPFKYMVPEDKEIPDRPLPSHWTPSMQAYNTSGSTPTPFLNQQAAGSHMPLYMWVNQVNNTLLQSDALHDPRMLSSKPTVAGDFPSTKKQHCNLMLENASSTKLNQDLETGLDASDANAQLVNLEKDEIRRERKRQSNRESARRSRMRKEKECEELHKQMEMLKDENSVLTQRLKSLSEECLEICNENDAIEEELIKMYGPESIADLLLFKPT

SEQ ID NO: 59232 - protein, 208 aa, Glycine max
  peptide (1)..(208): Ceres Seq. ID no. 13594231
MVPEDKEIPDRPLPSHWTPSMQAYNTSGSTPTPFLNQQAAGSHMPLYMWVNQVNNTLLQSDALHDPRMLSSKPTVAGDFPSTKKQHCNLMLENASSTKLNQDLETGLDASDANAQLVNLEKDEIRRERKRQSNRESARRSRMRKEKECEELHKQMEMLKDENSVLTQRLKSLSEECLEICNENDAIEEELIKMYGPESIADLLLFKPT

SEQ ID NO: 59233 - DNA, 1070 bp, Glycine max
  misc_feature (1)..(1070): Ceres Seq. ID no. 14316444
attaaataacccatgtccctgcattagttaaatccttctgctctgcgtcttcttgttcctctcgcccagaatccgagatcaaccctgacccctaaggccaggggtttttctcggcttcttcagattcctgaaatggcgtctgtttcagctttagccaagtacaagctcgtcttcttgggtgaccaatccgtgggcaaaaccagcatcatcactcgcttcatgtacgataaattcgataacacctatcaggctacaattggtattgattttctatcaaaaactatgtatctcgaagatcgaactgttcgactgcagttgtgggatacagctggccaggaaagatttagaagtcttattccaagctacattagggactcatctgtagctgttattgtatatgatgttgcaagccggcagactttcctaaatactgcaaagtggattgaagaggtgcgaacagagagaggcagtgatgtcattattgttcttgttgggaacaaaactgatcttgtcgagaaaagacaagtctctatagaggaaggggaagcaaaagcacgtgagctcaatgtcatgttcattgaaactagtgctaaggctgggtttaatataaaggccctatttcgaaaaattgctgcagcactacctggaatggaaacactatcttctgcaaaacaagaagacatggttgatgtaaacttaaagtctacaaatggcagtgctcagtctcaacctcagtcaagtggatgtgcttgttaagtatactttatcatgtgcggtccacctttttgtgtcatgctttttgttttatgcgggtttttctatagtcttctacagcattatatgaaaagatgaaagaatatataagcggatcagggtaggggttgataaaagttctgtctagacaatttctgttgttagttggttttttgcctataatgtgtactaatgaatttttttttttgaacggcataatgtagtaaaggtacccaacccaaaattgaattgtgttcattgtaccctgtaaaacgtgtgatatgtttaaaatttaacttgttcatctggattgacgt

SEQ ID NO: 59234 - protein, 207 aa, Glycine max
  peptide (1)..(207): Ceres Seq. ID no. 14316445
MASVSALAKYKLVFLGDQSVGKTSIITRFMYDKFDNTYQATIGIDFLSKTMYLEDRTVRLQLWDTAGQERFRSLIPSYIRDSSVAVIVYDVASRQTFLNTAKWIEEVRTERGSDVIIVLVGNKTDLVEKRQVSIEEGEAKARELNVMFIETSAKAGFNIKALFRKIAAALPGMETLSSAKQEDMVDVNLKSTNGSAQSQPQSSGCAC

SEQ ID NO: 59235 - protein, 178 aa, Glycine max
  peptide (1)..(178): Ceres Seq. ID no. 14316446
MYDKFDNTYQATIGIDFLSKTMYLEDRTVRLQLWDTAGQERFRSLIPSYIRDSSVAVIVYDVASRQTFLNTAKWIEEVRTERGSDVIIVLVGNKTDLVEKRQVSIEEGEAKARELNVMFIETSAKAGFNIKALFRKIAAALPGMETLSSAKQEDMVDVNLKSTNGSAQSQPQSSGCAC

SEQ ID NO: 59236 - protein, 157 aa, Glycine max
  peptide (1)..(157): Ceres Seq. ID no. 14316447
MYLEDRTVRLQLWDTAGQERFRSLIPSYIRDSSVAVIVYDVASRQTFLNTAKWIEEVRTERGSDVIIVLVGNKTDLVEKRQVSIEEGEAKARELNVMFIETSAKAGFNIKALFRKIAAALPGMETLSSAKQEDMVDVNLKSTNGSAQSQPQSSGCAC

SEQ ID NO: 59237 - DNA, 1128 bp, Glycine max
  misc_feature (1)..(1128): Ceres Seq. ID no. 14312228
aaattgatacggataaggaagagtattcagtgtctcgtgtagaataatcaatggaagtaggaatgtctctgaacgcgctggttcgtcttcctctctcgaattcacgcttccacgacgatgctgctccgatgattattaggcactctctgttttcgagccgaaagcaacagcagcagcagcagagttataaggttccacagcgtcatcaagtgttcgtggttgaagccaagggcaaaaagggaatgatgtctcgtcaatttcagcgcaatgctcctcctcctttacccaagattgaagacgatggcaatcccaaattcgtcatcttcattcgcatggccaatgtatacctttggtaccctcttagtatcgtatcaggcggcaccactgctaaaataatggttgcagctaaagataattttctcggcaagtatatctacaaagacactcttgatagaaatctcgctgctgttatctacagagatgagaaggaggtacagaaatctgcattcaaacagtaccgtgtattgcgaacagctactgatttcagatacggctacaaacttgttgagaatggcaatataagagctgcactttctaccactgatgttattgagcttccaacacaagataaactaaaaaccgtgcttgacaaagtgaaagacttttttggagatgcaaaggaatcttttggaaagataacatcattgggcactactgaaacagaggagtcagaggaagacacaaaagaaaaagccaaggttaaaggatgaaactatagctggaaatgatttgcttgaattgttatgagtagcctgtggccctatgagatcagaaagctcaattatgtttatggattggttaatggggaaacttctgtgcacaacaatgctactccaggttttgttcttagatctgtaaccatcaaaattgttttatattctgcagagtgaacaccatctttacgatactgattgatcactcgtgtatgttgtaatccatgatgctttggaatggatagcatgtaggatgacatgtaatggcaccgttatcagttcaagagattcctggaattgttgtgtaaattacgggttgtaatatctatgcattttatttgacaggaatttactt

SEQ ID NO: 59238 - protein, 239 aa, Glycine max
  peptide (1)..(239): Ceres Seq. ID no. 14312229
MEVGMSLNALVRLPLSNSRFHDDAAPMIIRHSLFSSRKQQQQQQSYKVPQRHQVFVVEAKGKKGMMSRQFQRNAPPPLPKIEDDGNPKFVIFIRMANVYLWYPLSIVSGGTTAKIMVAAKDNFLGKYIYKDTLDRNLAAVIYRDEKEVQKSAFKQYRVLRTATDFRYGYKLVENGNIRAALSTTDVIELPTQDKLKTVLDKVKDFFGDAKESFGKITSLGTTETEESEEDTKEKAKVKG

SEQ ID NO: 59239 - protein, 235 aa, Glycine max
  peptide (1)..(235): Ceres Seq. ID no. 14312230
MSLNALVRLPLSNSRFHDDAAPMIIRHSLFSSRKQQQQQQSYKVPQRHQVFVVEAKGKKGMMSRQFQRNAPPPLPKIEDDGNPKFVIFIRMANVYLWYPLSIVSGGTTAKIMVAAKDNFLGKYIYKDTLDRNLAAVIYRDEKEVQKSAFKQYRVLRTATDFRYGYKLVENGNIRAALSTTDVIELPTQDKLKTVLDKVKDFFGDAKESFGKITSLGTTETEESEEDTKEKAKVKG

SEQ ID NO: 59240 - protein, 213 aa, Glycine max
  peptide (1)..(213): Ceres Seq. ID no. 14312231
MIIRHSLFSSRKQQQQQQSYKVPQRHQVFVVEAKGKKGMMSRQFQRNAPPPLPKIEDDGNPKFVIFIRMANVYLWYPLSIVSGGTTAKIMVAAKDNFLGKYIYKDTLDRNLAAVIYRDEKEVQKSAFKQYRVLRTATDFRYGYKLVENGNIRAALSTTDVIELPTQDKLKTVLDKVKDFFGDAKESFGKITSLGTTETEESEEDTKEKAKVKG

SEQ ID NO: 59241 - DNA, 1186 bp, Glycine max
  misc_feature (1)..(1186): Ceres Seq. ID no. 14311780
gtgaccagtagctattttctcttttttctaaaaaaaaaaaacggacggctcctggaaaataacggaccaacccatccgtggggttgtaagttttgtcttttatttgcagaaacggaccaacgcttagggtttggtgttttccgaattagggtttgtgattggatcttcatcttcaccaatcaatcaccataaccataacttgttcttctctctcgccatgacggacggctcctggaatcggcagcagcagccgtttctcccttcttccgccatacttaaacgacctcgtactgaatacgatatttcaccttctggtctgacttcagggggcaatgagatgcataattatattggtcgaaatgatgaccatactggtcaccgaattctaaaggacactaaaacacttggatctgcttttgaccgctaccttcaaagcgctgggcttacttcgtttaactcgggggaagccagcgcaattggcagtgttggtttggaaaggggtgttggtggattgccacgccattcactaactgatcctgctgtcatggggcatcctggtggtggtcatgatcttgcacgaggtggacggaatgtcaattatggtgaccagttaccagtagatgcagcttccatgcctggacctgagactgtacctctacccccagatgcttcaagtactttatatgttgaaggtcttccatctgacagtacgagacgggaagtggctcatatttttcgcccttttgttggatatagagaagtaagacttgtgagcaaagaatccaaacatcgtggtggagatcctctaatcctttgttttgtggattttgcaaatccggcctgtgcagcaactgctctgagtgcattgcaaggttataaagttgatgaactcaatcctgagtctagtcacttgcggcttcagttttctcggtttcctggtcccagatctggacctggacctcgtggcaagaggtgaagtcgttcacccaagacatttaggttttatgcttgtcacaatgacttgaattcctttatccataccattctgggatgagaatattcacgaatcaatgttctccacaagcaaatataagtcaatttattgtgttgtataaatattgatatttttttaatgatcctagttagcatttgttttttgttggccaaataaaggtataattattac

SEQ ID NO: 59242 - protein, 252 aa, Glycine max
  peptide (1)..(252): Ceres Seq. ID no. 14311781
MTDGSWNRQQQPFLPSSAILKRPRTEYDISPSGLTSGGNEMHNYIGRNDDHTGHRILKDTKTLGSAFDRYLQSAGLTSFNSGEASAIGSVGLERGVGGLPRHSLTDPAVMGHPGGGHDLARGGRNVNYGDQLPVDAASMPGPETVPLPPDASSTLYVEGLPSDSTRREVAHIFRPFVGYREVRLVSKESKHRGGDPLILCFVDFANPACAATALSALQGYKVDELNPESSHLRLQFSRFPGPRSGPGPRGKR

SEQ ID NO: 59243 - protein, 212 aa, Glycine max
  peptide (1)..(212): Ceres Seq. ID no. 14311782
MHNYIGRNDDHTGHRILKDTKTLGSAFDRYLQSAGLTSFNSGEASAIGSVGLERGVGGLPRHSLTDPAVMGHPGGGHDLARGGRNVNYGDQLPVDAASMPGPETVPLPPDASSTLYVEGLPSDSTRREVAHIFRPFVGYREVRLVSKESKHRGGDPLILCFVDFANPACAATALSALQGYKVDELNPESSHLRLQFSRFPGPRSGPGPRGKR

SEQ ID NO: 59244 - protein, 143 aa, Glycine max
  peptide (1)..(143): Ceres Seq. ID no. 14311783
MGHPGGGHDLARGGRNVNYGDQLPVDAASMPGPETVPLPPDASSTLYVEGLPSDSTRREVAHIFRPFVGYREVRLVSKESKHRGGDPLILCFVDFANPACAATALSALQGYKVDELNPESSHLRLQFSRFPGPRSGPGPRGKR

SEQ ID NO: 59245 - DNA, 1311 bp, Glycine max
  misc_feature (1)..(1311): Ceres Seq. ID no. 14311773
ctaaaatcaaatgcaaaaagaagctagatggttttcaaatgagcatgacacgttccccttctaccactgatactttgccaagtgtaacgtttggccacgtagtctctcttcccacctccattaaaagttccagctcttcatcgagcgagctacacccaacttccattacaaaaccaaaacactcaagttaacttcaacacctttaattttctgaacgaaattcagccacagaatatcaaagggagcgaagatgagtcaggagcagccaaggcgcccccaaggccaagaccccatcaaatacggcgacgtttttgacgtctacggtgaccttgcacagatgcccattgcaccggaagatgctgccatgatgcaaagcgcggaagctcgagtactcggaaaaacccaacccggcggagcttcttccgtcatgcaatccgccgccacaaggaatgaacaggctggtcttgtcggtcaccaggacgtcaccgacatcaccggcgaccatggcgtcacagtcacagaaactacattccatggaagacgcataataaccgaggctgttggtggccaggtagtggaacagtatgtggagccaaatccagttgaggctggacgaaccagtgcaattaaggagagtgctataacaataggagaggcattggaggccacggcacagacggtgggtcacaagccggtggatcagagtgatgcctcagcgattcaggcggcggaggttagagcaacgggaagtaacgttataacgccgggaggacttgcggctatggctcaatcagctgctgcttataatgctgactgcaagcatgaccaggacaaggtcaagcttgccgacgttctgaccggagcaaccgccaaattgcccgcggacaaggccgcgacgctgcaagatgctgaaggggtggcgagtgctgaggccaggaacaaccccgatgccaccgccactcccggtggggtagccgcttctgttgcggctgctgctaggctcaatgaaaatgttaagtaaaaagtagtgttatgtatgttgataatcatacctgtgtttcatgatgtgtgaggagtggcctgttgatatatgtgttgtataactgtaagtggtgctgcaacatgttgtttctttcttttaagcttgtgagatatgttactacttttctggtatcttttaaggactctacttaaaggtgatgtatactatgctatggatgatgtctgtgccaccttatcagttagttgttaataatgtgtgttctagctaatcttgtaatttcttatttgcaatcattccagttagaaccc

SEQ ID NO: 59246 - protein, 256 aa, Glycine max
  peptide (1)..(256): Ceres Seq. ID no. 14311774
MSQEQPRRPQGQDPIKYGDVFDVYGDLAQMPIAPEDAAMMQSAEARVLGKTQPGGASSVMQSAATRNEQAGLVGHQDVTDITGDHGVTVTETTFHGRRIITEAVGGQVVEQYVEPNPVEAGRTSAIKESAITIGEALEATAQTVGHKPVDQSDASAIQAAEVRATGSNVITPGGLAAMAQSAAAYNADCKHDQDKVKLADVLTGATAKLPADKAATLQDAEGVASAEARNNPDATATPGGVAASVAAAARLNENVK

SEQ ID NO: 59247 - protein, 227 aa, Glycine max
  peptide (1)..(227): Ceres Seq. ID no. 14311775
MPIAPEDAAMMQSAEARVLGKTQPGGASSVMQSAATRNEQAGLVGHQDVTDITGDHGVTVTETTFHGRRIITEAVGGQVVEQYVEPNPVEAGRTSAIKESAITIGEALEATAQTVGHKPVDQSDASAIQAAEVRATGSNVITPGGLAAMAQSAAAYNADCKHDQDKVKLADVLTGATAKLPADKAATLQDAEGVASAEARNNPDATATPGGVAASVAAAARLNENVK

SEQ ID NO: 59248 - protein, 218 aa, Glycine max
  peptide (1)..(218): Ceres Seq. ID no. 14311776
MMQSAEARVLGKTQPGGASSVMQSAATRNEQAGLVGHQDVTDITGDHGVTVTETTFHGRRIITEAVGGQVVEQYVEPNPVEAGRTSAIKESAITIGEALEATAQTVGHKPVDQSDASAIQAAEVRATGSNVITPGGLAAMAQSAAAYNADCKHDQDKVKLADVLTGATAKLPADKAATLQDAEGVASAEARNNPDATATPGGVAASVAAAARLNENVK

SEQ ID NO: 59249 - DNA, 1353 bp, Glycine max
  misc_feature (1)..(1353): Ceres Seq. ID no. 14312192
aacataacccagtgagtctacccttatctctgaccatttctttctctgaagccaactccaaaactaacagacagaaagaaagagaaaaagaaacccaattcctgtttcaactgaaacacagcacacacaacaatcatcaatttctctacaaaaaataaccccacaaagaaaacaaactgaaacaacagcaaaaaagaaatcttcacctcagcttcctctgttccgtccttcctcgtcgccgcgccggagcatctcgccgccttcatccaccgcatcattcgcgagggaactcggaggtcatcgaattcgcgaagatgtcgcggttcccgttcttcaaccgttcgaacacgattcactcgacgaaatcggaatcctcgcagaaaccctacctcgtccaccaccatctccacaatcttgaccggtccggttcggtgaaccgcttctacggttcagtggactccatgaaatcctcaatccgcggaaaaatggtgaagaagctctgcaccttattcgaatcctccaaaaaacccttgccagaaccagaatccgaatctgaatcgttttcttcttcaaaatcacgttcaaaaacagattcagattcgtgcattactatattgtttcgattacccggcacagaggacagaatagttgtgtatttaacgagccttcgcgggattcggagaactttcgaggattgcaacgcggtccgcatgatcctgaaggggttcagggtttgggtggacgagagggatgtgtctatggacttgagctacagggaggagctgcagcatgtgctgggggagcaccatgtggcgctcccccaagtttttatacgagggaagtacattggtggtgctgatgtgatcaagcatttgtttgagagtggtgacttggcgaagatgattctggaagggctccccaagctgaaacccgggttcgtgtgtgacaattgtggggacgcgaggttcgtgccgtgcgagaattgcagtgggagcaggaaggtgtttgatgaggatgaaggggaattgaagaggtgcttggaatgcaatgagaatggactcctcaggtgtccgtattgctgttcttgattttgattaatgatgattttcatgggggttaattgggttgttgctcgttgaacatgtgttttgttttgttcaagactgggtgttttactttcttatcttggattgagatggaaaactggggtgagtgggggatgtgtatattatattctaatggagggtgtaaatatttagtggtgtacaagaatttgctaaatattggttgttgatggatgatagctttctaatgggaattatgggatgttttaatatatccctttattagtcc

SEQ ID NO: 59250 - protein, 257 aa, Glycine max
  peptide (1)..(257): Ceres Seq. ID no. 14312193
MSRFPFFNRSNTIHSTKSESSQKPYLVHHHLHNLDRSGSVNRFYGSVDSMKSSIRGKMVKKLCTLFESSKKPLPEPESESESFSSSKSRSKTDSDSCITILFRLPGTEDRIVVYLTSLRGIRRTFEDCNAVRMILKGFRVWVDERDVSMDLSYREELQHVLGEHHVALPQVFIRGKYIGGADVIKHLFESGDLAKMILEGLPKLKPGFVCDNCGDARFVPCENCSGSRKVFDEDEGELKRCLECNENGLLRCPYCCS

SEQ ID NO: 59251 - protein, 208 aa, Glycine max
  peptide (1)..(208): Ceres Seq. ID no. 14312194
MKSSIRGKMVKKLCTLFESSKKPLPEPESESESFSSSKSRSKTDSDSCITILFRLPGTEDRIVVYLTSLRGIRRTFEDCNAVRMILKGFRVWVDERDVSMDLSYREELQHVLGEHHVALPQVFIRGKYIGGADVIKHLFESGDLAKMILEGLPKLKPGFVCDNCGDARFVPCENCSGSRKVFDEDEGELKRCLECNENGLLRCPYCCS

SEQ ID NO: 59252 - protein, 200 aa, Glycine max
  peptide (1)..(200): Ceres Seq. ID no. 14312195
MVKKLCTLFESSKKPLPEPESESESFSSSKSRSKTDSDSCITILFRLPGTEDRIVVYLTSLRGIRRTFEDCNAVRMILKGFRVWVDERDVSMDLSYREELQHVLGEHHVALPQVFIRGKYIGGADVIKHLFESGDLAKMILEGLPKLKPGFVCDNCGDARFVPCENCSGSRKVFDEDEGELKRCLECNENGLLRCPYCCS

SEQ ID NO: 59253 - DNA, 1322 bp, Glycine max
  misc_feature (1)..(1322): Ceres Seq. ID no. 14312166
aaaaaagaaaagggaatgttttcttttgcacactgtgatctgcaattggtggccatttcgaaaaattgccaattttctgaaacgtgacgtcttctttgcagttttgcatttaccttacagccactcagaagcgcagagaagataggaacccacccttgaagatggctctgcctccacaaaacccacctgttcagcgacacagagtcataatacccaacaagcacggtgaaaagcttgtgggcacattgcatgaatctggaaccagggacattgtaatcttgtgccatggttttcgatgcacaaaggataccaatctcatattgaaccttgctgttgcattggaaaatgcaaaaattagttctttccgttttgacttttctggaaatggggaaagtgaaggtttgtttcagtttggtaactattggaccgaggttgatgatttacatgctgtagctcaacatttccatgaatctaaccgtgtaatcagtgcaattgttggtcatagtaaaggaggtggcgtagtgcttctatatgcttcaaaatatagtgacattaaaacagttgtcaacctctctgggcgttatgatatgaaggcaggcattgaagaacaccttggaaaagattatttggaaagaatcaggagggatggtttcattgatgtgaagaagaggaggtcaggaagttttgatttccgtgtaactgaagaaagtttgatggatcgcttgggtataaatatacatgaagcatgccttaagattgacaaagaatgcagggtctttacaattcatggttcttccgatgaaattattcctgttgaagatgcatttgagtttgccaagatcatacaaaaccataagttacatgtcattggaggagctaatcatatgttcagtaatcatcaaggagagttgtcctcagttagttgtgaactttatagaagaaaccttgcaccaggtcaagggtactgctagctaggtatctgttcttgcttgcatatgtgtcaaacacccgtgaactctttgttgtgtttttctaatgatatacttatggtatatctcgaagtttcaagccaattgaattttggaaccacaacaaaaatttaccctgaagggtccccaactgatcctgtcttgtgtatacaattacgataatgaaatttgaatttaagaccttgtgtaactactcaaacttactaggccaaccctaatagggttgatgttccatgccatttgagatcaccagctttgtgtttgtcaaagttgaaaatctggcttcattaggttgaatggaagaaaaataaatggtaaagaggactcatggac

SEQ ID NO: 59254 - protein, 269 aa, Glycine max
  peptide (1)..(269): Ceres Seq. ID no. 14312167
MALPPQNPPVQRHRVIIPNKHGEKLVGTLHESGTRDIVILCHGFRCTKDTNLILNLAVALENAKISSFRFDFSGNGESEGLFQFGNYWTEVDDLHAVAQHFHESNRVISAIVGHSKGGGVVLLYASKYSDIKTVVNLSGRYDMKAGIEEHLGKDYLERIRRDGFIDVKKRRSGSFDFRVTEESLMDRLGINIHEACLKIDKECRVFTIHGSSDEIIPVEDAFEFAKIIQNHKLHVIGGANHMFSNHQGELSSVSCELYRRNLAPGQGYC

SEQ ID NO: 59255 - DNA, 1500 bp, Glycine max
  misc_feature (1)..(1500): Ceres Seq. ID no. 14315422
atcgaagccacatacagagtgagagagaaagagcttagcttaggaatggaagcagagaagcatgaagcagcattggcagtggcctcagtctccctctctctccccagagttttgcccttcttccaacccaccacccctcagccaaccaagctcaaagtcccaacccaggcctcatccctcacacacctttctctctccactccttccaaaacctccttcaaatccaccatctcctccaccccccttcacgcccctctctccctcggcccccaccgcccccgcgacccctccaacgccgccgccctccgccgcgccgcagtagtctggttccgcaacgacctccgcctcctcgacaacgagtgcctcaccgccgccaacaacgagtccctctccgtcctccccgtctactgcttcgaccccgccgactacggtaagtcggcctccggcttcgacaagaccggcccctaccgcgccgccttcctcatcgactctgtctccgacctccgccgtaacctccaggctcgcggctccgatctcgtcgttcgcgttgggaagcccgaggcggtgctggtggagctcgccaaggccgtcggggccgacgccgtgtacgcgcaccgagaggtctcgcacgacgaggcgaaggcggaggagagggtggaggcggccatgaaggaggagaatgtggaggtgaagtacttctggggaagcacgttgtatcacgtggacgatttgccttttcaattggaggacatgccttccaattacggagggtttagggatagggttcagaaattggaggtaaggaagacaattgaggcattagatcagcttaagggaatgccttctcgcggtgatgttgagcctggggagattccttctttaatggacctaggccttaatccatctgcaacaatgtcacagaatggaaagtgcgttgctaatgcttctatggtaggaggggagactgaggcactgcagaagcttaaaaaatttgcagctgagtgtgcagctcagccacacaaggggtttaaggatggaacacagagtatatatggtgccaacttctcctgcaagatttctccgtggttggcaatgggatgcctttcccctcgcacaatgtatgaagaactgaagaagactgccggcagagtcatttctgcttcgtccaaccggaatgatggtggtaatggctcgtccagaactggaacaaattggttgatgtttgagttgctatggagggacttctttaggtttataacaaaaaaatacagtactgcaaagaaacagctggaagctgctccagccactgcatgtgctggtgcatttgcttaaactagaagttctagtgggcataaggaagtttgtttcagggtatgggttggttccctacgcagtcatggcagtagggtgctggatgaacaagatttggttccccttctgaagttctgttgtaactgacagatacattatttcaatatggaagctttacattattttctc

SEQ ID NO: 59256 - protein, 443 aa, Glycine max
  peptide (1)..(443): Ceres Seq. ID no. 14315423
IEATYRVREKELSLGMEAEKHEAALAVASVSLSLPRVLPFFQPTTPQPTKLKVPTQASSLTHLSLSTPSKTSFKSTISSTPLHAPLSLGPHRPRDPSNAAALRRAAVVWFRNDLRLLDNECLTAANNESLSVLPVYCFDPADYGKSASGFDKTGPYRAAFLIDSVSDLRRNLQARGSDLVVRVGKPEAVLVELAKAVGADAVYAHREVSHDEAKAEERVEAAMKEENVEVKYFWGSTLYHVDDLPFQLEDMPSNYGGFRDRVQKLEVRKTIEALDQLKGMPSRGDVEPGEIPSLMDLGLNPSATMSQNGKCVANASMVGGETEALQKLKKFAAECAAQPHKGFKDGTQSIYGANFSCKISPWLAMGCLSPRTMYEELKKTAGRVISASSNRNDGGNGSSRTGTNWLMFELLWRDFFRFITKKYSTAKKQLEAAPATACAGAFA

SEQ ID NO: 59257 - protein, 428 aa, Glycine max
  peptide (1)..(428): Ceres Seq. ID no. 14315424
MEAEKHEAALAVASVSLSLPRVLPFFQPTTPQPTKLKVPTQASSLTHLSLSTPSKTSFKSTISSTPLHAPLSLGPHRPRDPSNAAALRRAAVVWFRNDLRLLDNECLTAANNESLSVLPVYCFDPADYGKSASGFDKTGPYRAAFLIDSVSDLRRNLQARGSDLVVRVGKPEAVLVELAKAVGADAVYAHREVSHDEAKAEERVEAAMKEENVEVKYFWGSTLYHVDDLPFQLEDMPSNYGGFRDRVQKLEVRKTIEALDQLKGMPSRGDVEPGEIPSLMDLGLNPSATMSQNGKCVANASMVGGETEALQKLKKFAAECAAQPHKGFKDGTQSIYGANFSCKISPWLAMGCLSPRTMYEELKKTAGRVISASSNRNDGGNGSSRTGTNWLMFELLWRDFFRFITKKYSTAKKQLEAAPATACAGAFA

SEQ ID NO: 59258 - protein, 221 aa, Glycine max
  peptide (1)..(221): Ceres Seq. ID no. 14315425
MKEENVEVKYFWGSTLYHVDDLPFQLEDMPSNYGGFRDRVQKLEVRKTIEALDQLKGMPSRGDVEPGEIPSLMDLGLNPSATMSQNGKCVANASMVGGETEALQKLKKFAAECAAQPHKGFKDGTQSIYGANFSCKISPWLAMGCLSPRTMYEELKKTAGRVISASSNRNDGGNGSSRTGTNWLMFELLWRDFFRFITKKYSTAKKQLEAAPATACAGAFA

SEQ ID NO: 59259 - DNA, 1507 bp, Glycine max
  misc_feature (1)..(1507): Ceres Seq. ID no. 14315403
acaacgtggcctccttcttccacagcaaaatcccattttccaaaacccctctctctctctctgacacacactaccatggcggcactgaagcttctcctctcccaagctcgccgccattccctccccaaatgcgctttctctatgacctctcacagatccctctgtgcttcttcggaatcaaactcaaaccctccccgaagacccttcgaacccatccccatccaacccgtctcctaccccgtcaagcccaaacccgcaccacccgaacctcaaccttcacccgaacctcaatcacaatccctccccccttcctcgccggactcgcaacgcgcttggacgcgcgaggacatccgctacgtgaaggacgtgccgtcgatcgcgccggtggcgtacgcctcgcgcggcggcgtggcgcctctccccgatgacagagctcccgtggaggacgcggcagagagcgagaggaggatgatcgaggcggagaatgaaatgaggttgcgaatggccaaggccgtcgaagaggaaagaatgaaggtgccgtttccgctgctgattaagcccaagaagaacgagaagcctcctccgcttgatttgaacgaagccattcgccaagttaaggccaatgccaaggcaaagtttgatgaaactgttgaagcacatataagattgggtgttgattcaaagcgaacagaaatggcagttcgtggtactgtgattctgcctcatggtgctccaaaggctgtcagtgtggctgtttttgcagaaggggctgaggcagaggaagcgaaagctgcaggagctgatatagttggtggtaaagagcttattgaggagattgctagcggtaaaaataagctcaaagttgacaaatgcttctcaactcctggaatggcacctaatcttggaaagatagcacaatatcttagaaagcgaagactgatgccagataagaaactaggtactcttactagtgatattgctgggcagttgaaagagctaagacaaggccgtgtagagtttaaaatggaaagtaaatcaattttgcatgtgggacttggaaaggtaagctacaaagaagaggctttacgggagaatattagtgcatttatgaatgctgtattgcttgcaaagcctgctggcttaaaaaagacttccaaatatgctgggtatgtgttgtctgtccatataagcagcacgatgggcccaggattacctgtatctatacaatcaatatccaaagcagcagataactacaagaaaatgcatatggtttgaatcatgtggacgtggccaatgtgggcatttttctacatgaatccaagtttagatgaacatatgttgtcgtaggtttttgttcattaccattgattatgtaaactttgtttagtcatatatgtggcaataagtgaaaattttgacaattttttgtgagcttgttgaattttctggtcacctaatggtgtatcatgttcctcattgcaacacagaaaattatgccttagtttac

SEQ ID NO: 59260 - protein, 424 aa, Glycine max
  peptide (1)..(424): Ceres Seq. ID no. 14315404
TTWPPSSTAKSHFPKPLSLSLTHTTMAALKLLLSQARRHSLPKCAFSMTSHRSLCASSESNSNPPRRPFEPIPIQPVSYPVKPKPAPPEPQPSPEPQSQSLPPSSPDSQRAWTREDIRYVKDVPSIAPVAYASRGGVAPLPDDRAPVEDAAESERRMIEAENEMRLRMAKAVEEERMKVPFPLLIKPKKNEKPPPLDLNEAIRQVKANAKAKFDETVEAHIRLGVDSKRTEMAVRGTVILPHGAPKAVSVAVFAEGAEAEEAKAAGADIVGGKELIEEIASGKNKLKVDKCFSTPGMAPNLGKIAQYLRKRRLMPDKKLGTLTSDIAGQLKELRQGRVEFKMESKSILHVGLGKVSYKEEALRENISAFMNAVLLAKPAGLKKTSKYAGYVLSVHISSTMGPGLPVSIQSISKAADNYKKMHMV

SEQ ID NO: 59261 - protein, 399 aa, Glycine max
  peptide (1)..(399): Ceres Seq. ID no. 14315405
MAALKLLLSQARRHSLPKCAFSMTSHRSLCASSESNSNPPRRPFEPIPIQPVSYPVKPKPAPPEPQPSPEPQSQSLPPSSPDSQRAWTREDIRYVKDVPSIAPVAYASRGGVAPLPDDRAPVEDAAESERRMIEAENEMRLRMAKAVEEERMKVPFPLLIKPKKNEKPPPLDLNEAIRQVKANAKAKFDETVEAHIRLGVDSKRTEMAVRGTVILPHGAPKAVSVAVFAEGAEAEEAKAAGADIVGGKELIEEIASGKNKLKVDKCFSTPGMAPNLGKIAQYLRKRRLMPDKKLGTLTSDIAGQLKELRQGRVEFKMESKSILHVGLGKVSYKEEALRENISAFMNAVLLAKPAGLKKTSKYAGYVLSVHISSTMGPGLPVSIQSISKAADNYKKMHMV

SEQ ID NO: 59262 - protein, 377 aa, Glycine max
  peptide (1)..(377): Ceres Seq. ID no. 14315406
MTSHRSLCASSESNSNPPRRPFEPIPIQPVSYPVKPKPAPPEPQPSPEPQSQSLPPSSPDSQRAWTREDIRYVKDVPSIAPVAYASRGGVAPLPDDRAPVEDAAESERRMIEAENEMRLRMAKAVEEERMKVPFPLLIKPKKNEKPPPLDLNEAIRQVKANAKAKFDETVEAHIRLGVDSKRTEMAVRGTVILPHGAPKAVSVAVFAEGAEAEEAKAAGADIVGGKELIEEIASGKNKLKVDKCFSTPGMAPNLGKIAQYLRKRRLMPDKKLGTLTSDIAGQLKELRQGRVEFKMESKSILHVGLGKVSYKEEALRENISAFMNAVLLAKPAGLKKTSKYAGYVLSVHISSTMGPGLPVSIQSISKAADNYKKMHMV

SEQ ID NO: 59263 - DNA, 1691 bp, Glycine max
  misc_feature (1)..(1691): Ceres Seq. ID no. 12608060
accagaacatcctaatcgaaaaagtatagggtgaaagtcctttgggacttgggcgctgggatgatgtatgtaatatatagggtaacataaaaatagcgagcgcaaccctctctcccagtctcggaagaagaaatgaagcagctgccaacgctgctgacgaagtccctctcactctcagtgtgttctttgccagcagcagcttccacaaccacccttcaacaaattgctctccatcaacccaaagtttgtgtttggtaggtgttgcaaaggttgtacttaaaaaggggaagacacaactctttaaggatggcaacccaatggtgtacagtggagctgttgatagaataattgggaggccacctcccaagaccggggatgttgttctggtagcagatgggactgagaaaccaattggatggggcatgtacaactcagtttctatgttctgtgttcggctcatgcagcttgaagatgaagctactagcgattcatcttgtgcattgaatatggagaaactgattgaaacaagaattgatgcagctgttgaaatgcgtagaaggttgggtcttccatcagtccacaccaatgcataccgtctaatcaatagtgagggtgacagactatcaggattgataattgacgtctttggaggtgttgctgtagtagcgtcatctgctgcttgggttgagaaatacaaatcagagatagaggcatgcatcaagaaaatcaactatatcaatcatgtaaattggaggccatctgttgatattttaaaggaagatggagttaatgaatctgatttaaacaaaatgcattcatctacatgtcctgaaagaacaaagattgtggaaaatgaaattgtatacacaatttcattgaagggccagaagacgggattctatgcagatcagcgtgagaaccgccagtttatatcaagaatttcagatggtcaaaaggttcttgatatttgctgctatagtggcggttttgctctaaatgctgtgcgtggaggtgctctaaatgtcaccggtattgacacatcaccgctagctttggagcttgctaaagaaaatgttgtactcaacaacattgatcctggaagaatatcctttttgagggaagatgctactgaatttatgaagggtgctctcttgagaaatgaatcctgggatattgtcatcattgatcctcctaaactggcaccaacaaaaaaggttctacatagtgcttctggtatgtacaggaatttgaattcacttgctatgcaacttacaaaaagaggtggtcttctgatgacatgttcctgttctggagctgtgacccaaagtgggatattcatgcgcatccttcagggtgcagcatctatggcgggtaggagaatcactgtcctcagacaggctggagcagcttgtgatcaccctatcgatccatcatacccagaaggagcatatctaaccaacattctattgcgagtttcatgagtattgtatttgggggattttcattcatttaagttttttcccatgtaattatatattttaatggaactttggaaagtgccctttcaccgaattagtgaagaaaatgtcttacacatcagttgaaagaaaaaaatgggcataggtttgcttatttaattaataattattgtcaaactgaaaaaaaaaaaaaaaaaagcttatcgataccgt

SEQ ID NO: 59264 - protein, 387 aa, Glycine max
  peptide (1)..(387): Ceres Seq. ID no. 12608061
MVYSGAVDRIIGRPPPKTGDVVLVADGTEKPIGWGMYNSVSMFCVRLMQLEDEATSDSSCALNMEKLIETRIDAAVEMRRRLGLPSVHTNAYRLINSEGDRLSGLIIDVFGGVAVVASSAAWVEKYKSEIEACIKKINYINHVNWRPSVDILKEDGVNESDLNKMHSSTCPERTKIVENEIVYTISLKGQKTGFYADQRENRQFISRISDGQKVLDICCYSGGFALNAVRGGALNVTGIDTSPLALELAKENVVLNNIDPGRISFLREDATEFMKGALLRNESWDIVIIDPPKLAPTKKVLHSASGMYRNLNSLAMQLTKRGGLLMTCSCSGAVTQSGIFMRILQGAASMAGRRITVLRQAGAACDHPIDPSYPEGAYLTNILLRVS

SEQ ID NO: 59265 - protein, 352 aa, Glycine max
  peptide (1)..(352): Ceres Seq. ID no. 12608062
MYNSVSMFCVRLMQLEDEATSDSSCALNMEKLIETRIDAAVEMRRRLGLPSVHTNAYRLINSEGDRLSGLIIDVFGGVAVVASSAAWVEKYKSEIEACIKKINYINHVNWRPSVDILKEDGVNESDLNKMHSSTCPERTKIVENEIVYTISLKGQKTGFYADQRENRQFISRISDGQKVLDICCYSGGFALNAVRGGALNVTGIDTSPLALELAKENVVLNNIDPGRISFLREDATEFMKGALLRNESWDIVIIDPPKLAPTKKVLHSASGMYRNLNSLAMQLTKRGGLLMTCSCSGAVTQSGIFMRILQGAASMAGRRITVLRQAGAACDHPIDPSYPEGAYLTNILLRVS

SEQ ID NO: 59266 - protein, 346 aa, Glycine max
  peptide (1)..(346): Ceres Seq. ID no. 12608063
MFCVRLMQLEDEATSDSSCALNMEKLIETRIDAAVEMRRRLGLPSVHTNAYRLINSEGDRLSGLIIDVFGGVAVVASSAAWVEKYKSEIEACIKKINYINHVNWRPSVDILKEDGVNESDLNKMHSSTCPERTKIVENEIVYTISLKGQKTGFYADQRENRQFISRISDGQKVLDICCYSGGFALNAVRGGALNVTGIDTSPLALELAKENVVLNNIDPGRISFLREDATEFMKGALLRNESWDIVIIDPPKLAPTKKVLHSASGMYRNLNSLAMQLTKRGGLLMTCSCSGAVTQSGIFMRILQGAASMAGRRITVLRQAGAACDHPIDPSYPEGAYLTNILLRVS

SEQ ID NO: 59267 - DNA, 1127 bp, Glycine max
  misc_feature (1)..(1127): Ceres Seq. ID no. 14305682
acaacgcgcgctttacgagagcagggaaccagaggggaactcgtgcttagctttcctgtagcttcgtttgcaccatccatggccgatccagccgaggagaccgtcgccgcgcccccgccgaccccggcagctcccgccgagggcgccccgccgctgtcggcggagccgccggctagcaccgacgcctcgccggagaaggcggccccgcctgcgcctgcgccggacacgacggtgaggtcccgggggttcaggctgctcggcgaggacacctccgtgcacaaggtgctcggtggcggtaaaactgctgatgtactgttatggaaggacaagaaaacaactgctgtagtgatcggtggcacaactgtcatatgggttttatttgaagtgcttgattaccatctcttaactctgctatcccatgtgatgattggtgtcctggccatcttgttcgtgtggtcgaaagctatgaccttcatcaagaagagtccgccagatattcctgtagtcgagatacctgaagacctcgctgtgaatgtatcacgggcactacgcagcgatgtcaacagatcacttcacttgttgcgcgagattgcaatggggcatgatctgaagaaattccttggtgtgattgctggtctctgggttctgtcagaagttggaagctgctgtgatttcctcaccttgatatatattgctgtcctgatgatccacacggtgccgatcttgtacgacaagtaccaggacaaggtggatcacttcgccggaaaggcccataccgaggcgtgcaagcactacgaggtgctggaccagaaggttctgagcaagataccccgaggaccggcgaaaaccaagaagacctagaatgctgggtgtctcgtgagtgcatgctgggtcgcttgtggttccgtgatcatatgcgtaatgcgacgagacgtcactcgtcttacggtcttgccttctgctcagcattgtattagctatttgtatatgcaactctgaaaacttcgaactgctacctttctactatcgcagtcgcttgtagatacctgtcctgttacttgtgtgtacgtgcggcagatgtgttctcgtgtggatgttcttagtgaaaacctgaatggatgttcttg

SEQ ID NO: 59268 - protein, 286 aa, Glycine max
  peptide (1)..(286): Ceres Seq. ID no. 14305683
TTRALREQGTRGELVLSFPVASFAPSMADPAEETVAAPPPTPAAPAEGAPPLSAEPPASTDASPEKAAPPAPAPDTTVRSRGFRLLGEDTSVHKVLGGGKTADVLLWKDKKTTAVVIGGTTVIWVLFEVLDYHLLTLLSHVMIGVLAILFVWSKAMTFIKKSPPDIPVVEIPEDLAVNVSRALRSDVNRSLHLLREIAMGHDLKKFLGVIAGLWVLSEVGSCCDFLTLIYIAVLMIHTVPILYDKYQDKVDHFAGKAHTEACKHYEVLDQKVLSKIPRGPAKTKKT

SEQ ID NO: 59269 - protein, 260 aa, Glycine max
  peptide (1)..(260): Ceres Seq. ID no. 14305684
MADPAEETVAAPPPTPAAPAEGAPPLSAEPPASTDASPEKAAPPAPAPDTTVRSRGFRLLGEDTSVHKVLGGGKTADVLLWKDKKTTAVVIGGTTVIWVLFEVLDYHLLTLLSHVMIGVLAILFVWSKAMTFIKKSPPDIPVVEIPEDLAVNVSRALRSDVNRSLHLLREIAMGHDLKKFLGVIAGLWVLSEVGSCCDFLTLIYIAVLMIHTVPILYDKYQDKVDHFAGKAHTEACKHYEVLDQKVLSKIPRGPAKTKKT

SEQ ID NO: 59270 - protein, 145 aa, Glycine max
  peptide (1)..(145): Ceres Seq. ID no. 14305685
MIGVLAILFVWSKAMTFIKKSPPDIPVVEIPEDLAVNVSRALRSDVNRSLHLLREIAMGHDLKKFLGVIAGLWVLSEVGSCCDFLTLIYIAVLMIHTVPILYDKYQDKVDHFAGKAHTEACKHYEVLDQKVLSKIPRGPAKTKKT

SEQ ID NO: 59271 - DNA, 1655 bp, Glycine max
  misc_feature (1)..(1655): Ceres Seq. ID no. 13594232
atttcctgcttctctctcatctattgactcatccattacctgaacaaacacctagaattttgtcctgttcccttcatttcattttcattggatttatatagcattgcaacgatcggatagctatttgctacttgattgattctttgccagcgtgggatttgagaaagaaaaaaaaaacagtaacaggaaaggagggtagcattaagggaagaactcaggttgcgggaagaggtaaaaaaaatggagcatggggatggagaagcggtgataattgggggtatggtattggacattcatgctacaccttcaatgctagcaaatcctggaaccactacccctggcaaggtctattatgtccaaggaggtgtggcaaggaatgtagccgagtgcatgtcaaaactaggagcaaagccatacatgattagtgctcttgggtttgacatggcaggaaatctgctgttgaatcagtggaaatctgctggcctatctatagaaggtattttgaaggataaagatattgagactccagtagtatgcaatatatttgatgttaatggtgaggtagcagctggtgttgctagtgtggaagcttttgaaaaatatctgacacctgactggatctttcgcttcaaaaacactttactatctgctccagtgttaatggttgatgcaaatctgagtcatccttctcttgaagctgcttgtaaaatggcgattgacatggagtgtcctgtatggtttgagccagtatcagttactaaatcccgaagaatcagttctattgtcgagtatgtaacttttgcttctccaaatgaagatgaacttattgcgatggcgaatgctttatctggcagtgatgagtttcatccacttaaagaaagtcagaagaaaaatatttcagtattatctttgtttcaaatgctgaaaccagcaatatgggttttgctagaaaaaggcattaaagtggtcctagtgacctttggctctaatggagtgtttttatgcaataaaggatggcctagacaatttaaaatgcctgcagagaaaacaaatcagtgtggcttcagaggacaattattcaagactgttatgcaaaaatgtccacctagtcgttattctggtttttcagaacttgatagaagctctcatctctttgctgtgcattttccctctcttcctgcatcagttgtgaggcttactggcgctggtgattgcttagttggtggaacactcacatcaatttgtgcaggattagatattatgcaaagtgtgtctgttggcattgcagtggctaaagctgtagtggaggttgaggctaatgtcccatctactttcagtttatctgctatcacaggtgctaaagttctcttcccccaatcgatgttgtaaattttgaatgaggatgactggtagataaacagcttgagttgcgatacaaccaccacctttgcccagaaaaaatgataacatcttacaaaggcttgtggcattgaaatatgaattaataactatatttttttagtttttatttcatatttttctataagagtttaattgatacacttttttttaaacattgatatgcacttttgcactaacatgttatacttgatcatgtcatgatgtcggtctttgtagtgaatatttttccccct

SEQ ID NO: 59272 - protein, 382 aa, Glycine max
  peptide (1)..(382): Ceres Seq. ID no. 15221325
MEHGDGEAVIIGGMVLDIHATPSMLANPGTTTPGKVYYVQGGVARNVAECMSKLGAKPYMISALGFDMAGNLLLNQWKSAGLSIEGILKDKDIETPVVCNIFDVNGEVAAGVASVEAFEKYLTPDWIFRFKNTLLSAPVLMVDANLSHPSLEAACKMAIDMECPVWFEPVSVTKSRRISSIVEYVTFASPNEDELIAMANALSGSDEFHPLKESQKKNISVLSLFQMLKPAIWVLLEKGIKVVLVTFGSNGVFLCNKGWPRQFKMPAEKTNQCGFRGQLFKTVMQKCPPSRYSGFSELDRSSHLFAVHFPSLPASVVRLTGAGDCLVGGTLTSICAGLDIMQSVSVGIAVAKAVVEVEANVPSTFSLSAITGAKVLFPQSML

SEQ ID NO: 59273 - protein, 369 aa, Glycine max
  peptide (1)..(369): Ceres Seq. ID no. 15221326
MVLDIHATPSMLANPGTTTPGKVYYVQGGVARNVAECMSKLGAKPYMISALGFDMAGNLLLNQWKSAGLSIEGILKDKDIETPVVCNIFDVNGEVAAGVASVEAFEKYLTPDWIFRFKNTLLSAPVLMVDANLSHPSLEAACKMAIDMECPVWFEPVSVTKSRRISSIVEYVTFASPNEDELIAMANALSGSDEFHPLKESQKKNISVLSLFQMLKPAIWVLLEKGIKVVLVTFGSNGVFLCNKGWPRQFKMPAEKTNQCGFRGQLFKTVMQKCPPSRYSGFSELDRSSHLFAVHFPSLPASVVRLTGAGDCLVGGTLTSICAGLDIMQSVSVGIAVAKAVVEVEANVPSTFSLSAITGAKVLFPQSML

SEQ ID NO: 59274 - protein, 359 aa, Glycine max
  peptide (1)..(359): Ceres Seq. ID no. 15221327
MLANPGTTTPGKVYYVQGGVARNVAECMSKLGAKPYMISALGFDMAGNLLLNQWKSAGLSIEGILKDKDIETPVVCNIFDVNGEVAAGVASVEAFEKYLTPDWIFRFKNTLLSAPVLMVDANLSHPSLEAACKMAIDMECPVWFEPVSVTKSRRISSIVEYVTFASPNEDELIAMANALSGSDEFHPLKESQKKNISVLSLFQMLKPAIWVLLEKGIKVVLVTFGSNGVFLCNKGWPRQFKMPAEKTNQCGFRGQLFKTVMQKCPPSRYSGFSELDRSSHLFAVHFPSLPASVVRLTGAGDCLVGGTLTSICAGLDIMQSVSVGIAVAKAVVEVEANVPSTFSLSAITGAKVLFPQSML

SEQ ID NO: 59275 - DNA, 1245 bp, Glycine max
  misc_feature (1)..(1245): Ceres Seq. ID no. 14311777
tcccgagcaacgaaagctaggtcacgggttcgaaaccatttttcgtgaaaataggtgtttttttgagttcgtcgttttgctcttcgtgttgttgaagtgcaacgccatggacccagatcagggcacttcaaaagcctggaagcccaagttcaaacccaggaatctcaaagcagtccgagctcccaaaaccgaagcggatgataagcgaaacgaagatagcgaagtgcctcgagctctctcgcgtcgacgacatgaaaatcctgcaaaacgcgagcctaaagtcgaaagaaaatctagcgtggaagttgcatttagtcttggaagttcatcatcacattccctcaggacatatggcacaagcaaatctatagatagtggcacaagcagtggttcaccatctaaatattttgccaatgaacaaattcgttcaattgctactgaggatcaaaatgatgcttctaatgcatctgccaggaaaatcaaaagagagtacaaggaaccatgggattatgaaaactcttactatccgactactcttcctttgaggaagccaaattctggagatccagaaattcttgatgagaaagaatttggtgaagctgctactagtgtggagtatgatgagaatactgttaattctgctgcagaactcgagatcttggagagtgaggaacaaaggatgtttttctttcagattcctactcctctgcctatggacaagcagagtaataaggggaaggagaaaattggtacatcaacagtatcgggagaggccacaaagtcaaagaatgccttggaagagttgccgaggggatatatgggcaaaatgctggtgtacaagagtggagcaattttatcttagagtgtattcccctgcaaattcatggagagatgagtacccaattccaagcaatgctattcggtgtggcaaggctgtgggacactactaatgccaccaccaaaccaacattgggatttttatttgaacagtgtcattcatttccattcatggcttaactcaagcctcttctcttgttctcttgtaccattattcatgttatgatgccatagattattatagagttattgatttctcctgtcctcttcctcctctcatcttcgtgttatgtccaaattcagctatatataagatcatctgtgtttggattatgatattcttcttatttaaactatttatttatttaaataggttcaagggacctgatgttaatgtgccatggaaac

SEQ ID NO: 59276 - protein, 286 aa, Glycine max
  peptide (1)..(286): Ceres Seq. ID no. 14311778
PEQRKLGHGFETIFRENRCFFEFVVLLFVLLKCNAMDPDQGTSKAWKPKFKPRNLKAVRAPKTEADDKRNEDSEVPRALSRRRHENPAKREPKVERKSSVEVAFSLGSSSSHSLRTYGTSKSIDSGTSSGSPSKYFANEQIRSIATEDQNDASNASARKIKREYKEPWDYENSYYPTTLPLRKPNSGDPEILDEKEFGEAATSVEYDENTVNSAAELEILESEEQRMFFFQIPTPLPMDKQSNKGKEKIGTSTVSGEATKSKNALEELPRGYMGKMLVYKSGAILS

SEQ ID NO: 59277 - protein, 251 aa, Glycine max
  peptide (1)..(251): Ceres Seq. ID no. 14311779
MDPDQGTSKAWKPKFKPRNLKAVRAPKTEADDKRNEDSEVPRALSRRRHENPAKREPKVERKSSVEVAFSLGSSSSHSLRTYGTSKSIDSGTSSGSPSKYFANEQIRSIATEDQNDASNASARKIKREYKEPWDYENSYYPTTLPLRKPNSGDPEILDEKEFGEAATSVEYDENTVNSAAELEILESEEQRMFFFQIPTPLPMDKQSNKGKEKIGTSTVSGEATKSKNALEELPRGYMGKMLVYKSGAILS

SEQ ID NO: 59278 - DNA, 859 bp, Glycine max
  misc_feature (1)..(859): Ceres Seq. ID no. 15226220
aataacctaagaaaacctaaacccctcgttggtggtagcggctgtgacagactcagaggcggagcaaggagaatgggaaggtcgagaagaaagtacaagcaatcgagaaccaaggtccgtgtgggactccctaagaagaaccctaggcttttcaaaccctctttctccgttccacccaagctcttgcgaaccctcgccgaagagccccaatgggacgaccaaggcaccgttaacagcaactactcctccttcggcgttctctccgaccctaactccctcaccgagccttctcccgatcctcaaaccttcgattccggcagcgatctcgaagaagacgacttgaaatcagccctaggaaagaagcgaagggatgggagaagcgcgccgcctcagcctctgactgcaatgcaacggattcatattagtcgccttgtcgataaatacggaaatgattatcagagtatgttgatggatataaagctgaatccgatgcagcattcaattgcaactttgcagaagctatgcatgaggtatcatatataccaaaacaagaaccctctccttaaggccaaatgaagtgggagcttaattaattaatccattgacggaacagttgcacgtggaggcccaaatttttgtcacagtgaggatgtgtttctctaccatgtgtcatcgttgagaaattttgttaatgcttttgaatctatgaattatattatgtggatttttggttgtggtagatgaggcattctggacttctggtcttcctacacctgctgccaccaagattatgtagcatttttacatgcatgcacttttggaattctaaagtaattattataaaattgacaaatttatt

SEQ ID NO: 59279 - protein, 191 aa, Glycine max
  peptide (1)..(191): Ceres Seq. ID no. 15226221
NNLRKPKPLVGGSGCDRLRGGARRMGRSRRKYKQSRTKVRVGLPKKNPRLFKPSFSVPPKLLRTLAEEPQWDDQGTVNSNYSSFGVLSDPNSLTEPSPDPQTFDSGSDLEEDDLKSALGKKRRDGRSAPPQPLTAMQRIHISRLVDKYGNDYQSMLMDIKLNPMQHSIATLQKLCMRYHIYQNKNPLLKAK

SEQ ID NO: 59280 - protein, 167 aa, Glycine max
  peptide (1)..(167): Ceres Seq. ID no. 15226222
MGRSRRKYKQSRTKVRVGLPKKNPRLFKPSFSVPPKLLRTLAEEPQWDDQGTVNSNYSSFGVLSDPNSLTEPSPDPQTFDSGSDLEEDDLKSALGKKRRDGRSAPPQPLTAMQRIHISRLVDKYGNDYQSMLMDIKLNPMQHSIATLQKLCMRYHIYQNKNPLLKAK

SEQ ID NO: 59281 - DNA, 1224 bp, Glycine max
  misc_feature (1)..(1224): Ceres Seq. ID no. 15168413
aatgcccaagcctatgtgaagccaccaccatggcgatgaccaccacaacgacgtcgtctccaccatttctcttttcattcctttctccaaaaccctttcccccaaacccttcgctccctcttccccaattgcaaaaccgaacaccgctcagttccacccatcgcttcttctctgccatccccaaagcgaaacgcggcgtttcagggacccatttgtgcctcgcttctcgcgccaaagccaaacccaccccgtcttcggtggaacaagagagcgacgacaattttagaaaaagagtgcttcaaattgcgctgtgggttgcagaaggtgtctacattctatggctcttccttcttccttatgcccctggagatcctgtatgggccatcagttctgacacattgaactctcttgtgggtctttctctcaatttctttttaatattgcctttcatgaactttgttggaattcgtctgattgatgcgccagttcttcatcctatgtccgaaggactattcaattttgtgattggctggacgttcatgtttgcccctttgctgttcacagatcgcaacaatgatagatataaagggtctctagatgtactctggggcctgcaaatgttcctgacaaatacgtttctgatcccatacatggctatccgattgaatgatgctgatgatgagagtgttacaagaaaactttcacagtttggctcagtgatgacaaatggtgctccaattgttggagtgattggtgggagtgcatgcattgtatctctattgtgggctctttttggtcgaatggatgcaaattttgggggcatagcagatagatgggactacttggtgggttatcttggatcagaaaggctggcttatgctttcatatgggatatatgtctttacataattttccagccttggttgattggagacaacctccagaatgtccaggaaaacaaggttgttgtagtgaagtatcttagatatgtacccgtgattggcttaattgcgtatctattttgcttggaccctaaagaggtctgattattgtgtttggatgattagtttactttacacctttcagttaaaagttactatctcttgaacattttgaagttgaatttcacgttttgttggggggtaggggctcaaattacttgttggcctcaagtttaaacttttggtatgtaagtttgttaaatatttggagggatattttgtc

SEQ ID NO: 59282 - protein, 347 aa, Glycine max
  peptide (1)..(347): Ceres Seq. ID no. 15168414
CPSLCEATTMAMTTTTTSSPPFLFSFLSPKPFPPNPSLPLPQLQNRTPLSSTHRFFSAIPKAKRGVSGTHLCLASRAKAKPTPSSVEQESDDNFRKRVLQIALWVAEGVYILWLFLLPYAPGDPVWAISSDTLNSLVGLSLNFFLILPFMNFVGIRLIDAPVLHPMSEGLFNFVIGWTFMFAPLLFTDRNNDRYKGSLDVLWGLQMFLTNTFLIPYMAIRLNDADDESVTRKLSQFGSVMTNGAPIVGVIGGSACIVSLLWALFGRMDANFGGIADRWDYLVGYLGSERLAYAFIWDICLYIIFQPWLIGDNLQNVQENKVVVVKYLRYVPVIGLIAYLFCLDPKEV

SEQ ID NO: 59283 - protein, 338 aa, Glycine max
  peptide (1)..(338): Ceres Seq. ID no. 15168415
MAMTTTTTSSPPFLFSFLSPKPFPPNPSLPLPQLQNRTPLSSTHRFFSAIPKAKRGVSGTHLCLASRAKAKPTPSSVEQESDDNFRKRVLQIALWVAEGVYILWLFLLPYAPGDPVWAISSDTLNSLVGLSLNFFLILPFMNFVGIRLIDAPVLHPMSEGLFNFVIGWTFMFAPLLFTDRNNDRYKGSLDVLWGLQMFLTNTFLIPYMAIRLNDADDESVTRKLSQFGSVMTNGAPIVGVIGGSACIVSLLWALFGRMDANFGGIADRWDYLVGYLGSERLAYAFIWDICLYIIFQPWLIGDNLQNVQENKVVVVKYLRYVPVIGLIAYLFCLDPKEV

SEQ ID NO: 59284 - protein, 336 aa, Glycine max
  peptide (1)..(336): Ceres Seq. ID no. 15168416
MTTTTTSSPPFLFSFLSPKPFPPNPSLPLPQLQNRTPLSSTHRFFSAIPKAKRGVSGTHLCLASRAKAKPTPSSVEQESDDNFRKRVLQIALWVAEGVYILWLFLLPYAPGDPVWAISSDTLNSLVGLSLNFFLILPFMNFVGIRLIDAPVLHPMSEGLFNFVIGWTFMFAPLLFTDRNNDRYKGSLDVLWGLQMFLTNTFLIPYMAIRLNDADDESVTRKLSQFGSVMTNGAPIVGVIGGSACIVSLLWALFGRMDANFGGIADRWDYLVGYLGSERLAYAFIWDICLYIIFQPWLIGDNLQNVQENKVVVVKYLRYVPVIGLIAYLFCLDPKEV

SEQ ID NO: 59285 - DNA, 2068 bp, Glycine max
  misc_feature (1)..(2068): Ceres Seq. ID no. 15225519
cgggccccccctcgagtcagctacgtaggcccccccccgagtagaatagaatggaaatggaaattactattcacgaaattaccactctcaaacaccaaaccaaatcaaaccttccctctccttctgttctaaaacattgtccctattctctctctgcaacattcattttccatcgccatcagtgccatgcaggaggctttggctatacaatgcatgtaggaggtttgaagaagtccaagtaacctggaagaagctttgacatacattcaggtaaaatgagagacagcacagtgcaaaattgtcaccaaaataatagcggagcagtagaagcaggtgcaccttcagtcgagaaagatcttgcttcttcagtaaaagcagctactgaagttcctccatcctcttttcagttctatgtctggtcagatgtgggaattaatcttcatgttgatttaaatctgtcctcatcagattggattaacaggtttagaaatgaggtttgcataagtgagaatatgcatcgaaacaaatcccgaagcctttggcaggatctgagcagcttaggagagaattatatgcaaggtaaatcttcctttttatggagtaaaaattcttgtcaaattgaggatcatgatggacaggccagatcttcctcaagctctaaacttacaaaagatggtgctacagagtcaggtcaacagaataaagatggcattcctttgagatgtgattcttttactccatgcaacatgactatagaagtgaaagataatatactggaaaatcattcaactgtctcagctgaactaaatgtaaatgtggtagacaatttaatgcaagagcaatcaactgtctcagctgaggttagttgtgctatagacacatctaagaaaattattgattcagatgctaccaatatgccattcatcaagtcactttgtgattctgttgtcaactcactgtcagatcctggcacactggaacttcaaaattcaaagcctgataatgaatgttctgagtattgtgctctgctaaatggttcttgctttgtgaaccctggtgtggtgtgtgctggagcttcattaagtagttctgtgggactacaaaattcagaagttataagttgtcataaatatgaatcagtttcactctgtgacaatgatggttccctggatttaagtgatccaaagagtacttctgacatggaacaggatagactagtcaaaactcggattatttttgaaactgacagtaacaatttcacatcagtaactgatgaatgggaggtggacaagattgttgatggaagggagagttcagaatgctcccagtttgatgatccacttaagaaatccagcctagactataataatcaggattctaaactggagctctgcaaaaagagaaaaaaccgagactctgagattcaatgttcaaatggtgaacctactactacaagagttttgcggagcatgaagaatactgctacaagagttttacgaagcatgaagaatgtgaagcttcctagataatccatgaggctaatctccaaggtgctttgacactttcttatggaattaaagtaaaactgtatacaatgaatataaaacctgaaaagtaaaagttattcaatttaattgcggcattcagtgtctcaaattggaagttacagtatttacctgatatttgaataggatgtacatttttwaaaaaaaaaaaaaaaaaaaaaaaaaaaaaaaaaaaaaaaaaaaaaaaaaaaaaaaaaaaaaaaaaaaaaaaaaaaaaaaaaaaaaaaaaaaaaaaaaaaaaaaaaattcccggccccccgggaaaccaaaaatttaaaaagggcccccccccggggggaacccccactttttttccccttaaagaagggaaaattccaagttggggaaaaaaagggaaaaaatttttcccggggaaaaattgtaaccccccaaaaatcccaaaaaaaaaaaaacccaaaaaaaaaaaggaaaaacccggggggcccaaaggagggaccaaaccccaataaatggggtggccccaacggcccctttccaagggg

SEQ ID NO: 59286 - protein, 417 aa, Glycine max
  peptide (1)..(417): Ceres Seq. ID no. 15225520
MRDSTVQNCHQNNSGAVEAGAPSVEKDLASSVKAATEVPPSSFQFYVWSDVGINLHVDLNLSSSDWINRFRNEVCISENMHRNKSRSLWQDLSSLGENYMQGKSSFLWSKNSCQIEDHDGQARSSSSSKLTKDGATESGQQNKDGIPLRCDSFTPCNMTIEVKDNILENHSTVSAELNVNVVDNLMQEQSTVSAEVSCAIDTSKKIIDSDATNMPFIKSLCDSVVNSLSDPGTLELQNSKPDNECSEYCALLNGSCFVNPGVVCAGASLSSSVGLQNSEVISCHKYESVSLCDNDGSLDLSDPKSTSDMEQDRLVKTRIIFETDSNNFTSVTDEWEVDKIVDGRESSECSQFDDPLKKSSLDYNNQDSKLELCKKRKNRDSEIQCSNGEPTTTRVLRSMKNTATRVLRSMKNVKLPR

SEQ ID NO: 59287 - protein, 338 aa, Glycine max
  peptide (1)..(338): Ceres Seq. ID no. 15225521
MHRNKSRSLWQDLSSLGENYMQGKSSFLWSKNSCQIEDHDGQARSSSSSKLTKDGATESGQQNKDGIPLRCDSFTPCNMTIEVKDNILENHSTVSAELNVNVVDNLMQEQSTVSAEVSCAIDTSKKIIDSDATNMPFIKSLCDSVVNSLSDPGTLELQNSKPDNECSEYCALLNGSCFVNPGVVCAGASLSSSVGLQNSEVISCHKYESVSLCDNDGSLDLSDPKSTSDMEQDRLVKTRIIFETDSNNFTSVTDEWEVDKIVDGRESSECSQFDDPLKKSSLDYNNQDSKLELCKKRKNRDSEIQCSNGEPTTTRVLRSMKNTATRVLRSMKNVKLPR

SEQ ID NO: 59288 - protein, 318 aa, Glycine max
  peptide (1)..(318): Ceres Seq. ID no. 15225522
MQGKSSFLWSKNSCQIEDHDGQARSSSSSKLTKDGATESGQQNKDGIPLRCDSFTPCNMTIEVKDNILENHSTVSAELNVNVVDNLMQEQSTVSAEVSCAIDTSKKIIDSDATNMPFIKSLCDSVVNSLSDPGTLELQNSKPDNECSEYCALLNGSCFVNPGVVCAGASLSSSVGLQNSEVISCHKYESVSLCDNDGSLDLSDPKSTSDMEQDRLVKTRIIFETDSNNFTSVTDEWEVDKIVDGRESSECSQFDDPLKKSSLDYNNQDSKLELCKKRKNRDSEIQCSNGEPTTTRVLRSMKNTATRVLRSMKNVKLPR

SEQ ID NO: 59289 - DNA, 1302 bp, Glycine max
  misc_feature (1)..(1302): Ceres Seq. ID no. 14315451
aagacagagactttggatgtttcttcgttgcagaagcagaggcacaccaatcccatttaatttatcgttcctcttctcctcttcactttccaaccacccattcattccttttcttcttgcactctgccctttgggtaagcatattctcattttgcttctctgctttcataacttgaggagtacccaatagttttattagacttctttgtttggttttaactttaatctttgtggtatgatttcattccttcttagttacactacggatcatcatcatcatttttaagatagttaccacaaaagtcgacaaatttagcatatagtatgatttgtgattaaataatgagtcctagtatagacatagactatttgctcatatatgaagagaggttaaataaaaaatgaaagtgtggagttgaagagtattttagttcaagaaaacatgtaaatcaaaatgaacatggacataaaactttggattgtctatttattgtcatagattttagataaaattatcttcttttttttttgtagttctaaactgatgagatgttatgatttgtgttctacaacctttaaagcagttaacttcttcaggcagttggtaatggggaagtccaaattatgcttggttgaattccattatttctcacaaagtataggtctatgtgggtgcaggaggagtttgtaacatggctgctctacctactgcggagcttagtgatgcaaatgcaacacatgtagcaagtggtgatgtgagggtgctgcatccagtgttcaaggtttatggccaggccacggcattctccggccccattgtcaccgtgaaggtgtttgaagacaacgtgttggtgagggagcttgttgagacgaaaggcgaaggaagagtattggttgttgatggaggaggaagcttgaggtgtgcattgatgggagggaatttggtacagattgcatataacatggggtgggctgggattgtggtgaatggttgcgttagagatgtggatgatatcaatgcgtgtaatattggcgtcagagccttggcttctcatccactcagatccaacaaaaagcgcactggtgaaaagaatgtccctgtttatgttggtggaacatttattcgtgaaggagaatggttgtatgcagataatgatggcatcctcgtatcaaaatttgagttgtcaaactaaaatagtttaccttcagttcaatattattgcaactttagacttttaagtcatgctttttctggtttagtttgtggggaagtgaataaaattttaagaatttcttgtgtgc

SEQ ID NO: 59290 - protein, 166 aa, Glycine max
  peptide (1)..(166): Ceres Seq. ID no. 14315452
MAALPTAELSDANATHVASGDVRVLHPVFKVYGQATAFSGPIVTVKVFEDNVLVRELVETKGEGRVLVVDGGGSLRCALMGGNLVQIAYNMGWAGIVVNGCVRDVDDINACNIGVRALASHPLRSNKKRTGEKNVPVYVGGTFIREGEWLYADNDGILVSKFELSN

SEQ ID NO: 59291 - protein, 87 aa, Glycine max
  peptide (1)..(87): Ceres Seq. ID no. 14315453
MGGNLVQIAYNMGWAGIVVNGCVRDVDDINACNIGVRALASHPLRSNKKRTGEKNVPVYVGGTFIREGEWLYADNDGILVSKFELSN

SEQ ID NO: 59292 - protein, 83 aa, Glycine max
  peptide (1)..(83): Ceres Seq. ID no. 14315454
MVALEMWMISMRVILASEPWLLIHSDPTKSALVKRMSLFMLVEHLFVKENGCMQIMMASSYQNLSCQTKIVYLQFNIIATLDF

SEQ ID NO: 59293 - DNA, 937 bp, Glycine max
  misc_feature (1)..(937): Ceres Seq. ID no. 15170313
caattctcacaagctattacatatatcagaatcattaaagataagattatattgctaagaagaaaaaatatgaaggttgtctacttgcttgttgccctcttggctttgacatcaactgttgtctctgcctatgaccctagtcctctgcaagatttttgtgtggcagccaaagaaaaagatggtgtatttgtgaacgggaaattctgcaaggaccccaagcttgtcaaagcagaagatttcttcagacatgtggaacctgggaaaactgacaacccactaggttcaaacgtgactcaggtgtttgttgatcaactaccgggactaaacacgctcggcataggtttggctcgcatagattttgctccaaagggtttgaacgctccccacactcaccctcgcggcactgagatccttatagtccttgagggtactctttatgttggatttgtgacttccaatcaagatggaaatcgtctcttcaccaaagtgctgaacaagggtgatgtgtttgtgttcccaattggtctcattcatttccaattgaatgtgggatatggcaatgctgttgccattgctggtcttagcagtcaaaatccaggagctatcactattgcaaatgctttgtttaaagctaatccacctatttcttctgaggttctcaccaaagctttccaggtggacaagagcataattgattatcttcaaaagcaatcttggtacgacaacaataactaatttgggagaatggacgatcatttcgcactagctagttattggatataattgaccactttatggtttcaatcaccccatacaatagacctaataaataaaatgtatgtgggttatttttatatttcatatttgttcttttggagtttgattaatttggtttaatacactgtttgagtttaataaaagaacctgttcttctttg

SEQ ID NO: 59294 - protein, 244 aa, Glycine max
  peptide (1)..(244): Ceres Seq. ID no. 15170314
QFSQAITYIRIIKDKIILLRRKNMKVVYLLVALLALTSTVVSAYDPSPLQDFCVAAKEKDGVFVNGKFCKDPKLVKAEDFFRHVEPGKTDNPLGSNVTQVFVDQLPGLNTLGIGLARIDFAPKGLNAPHTHPRGTEILIVLEGTLYVGFVTSNQDGNRLFTKVLNKGDVFVFPIGLIHFQLNVGYGNAVAIAGLSSQNPGAITIANALFKANPPISSEVLTKAFQVDKSIIDYLQKQSWYDNNN

SEQ ID NO: 59295 - protein, 221 aa, Glycine max
  peptide (1)..(221): Ceres Seq. ID no. 15170315
MKVVYLLVALLALTSTVVSAYDPSPLQDFCVAAKEKDGVFVNGKFCKDPKLVKAEDFFRHVEPGKTDNPLGSNVTQVFVDQLPGLNTLGIGLARIDFAPKGLNAPHTHPRGTEILIVLEGTLYVGFVTSNQDGNRLFTKVLNKGDVFVFPIGLIHFQLNVGYGNAVAIAGLSSQNPGAITIANALFKANPPISSEVLTKAFQVDKSIIDYLQKQSWYDNNN

SEQ ID NO: 59296 - DNA, 1276 bp, Glycine max
  misc_feature (1)..(1276): Ceres Seq. ID no. 13638746
aagccacggtcaagtcaagaaaagtggggcagaagcaccacttaacactctggtatagtattacactagtcgctagatcagtgatggcctctgcctcttgccttggcttagtagtgctcgtggcaatggcctccgcggcgtcggcgcagctgtcgtcgacgttctacgacacgtcgtgccccaacgcgctggccaccatcaaggccggcgtgacggccgccctgaacaccgaaacccgcatgggggcgtcgctggtccggctgcacttccacgactgcttcgttgatggatgtgacgggtctgttctgttggcggacacggggagcttcatcggcgagcagggcgcagccccgaacaacaattccattcgtggcatgaacgtcatcgacaacatcaagacccaggtggaggctgtgtgcaagcagaccgtctcctgctccgacatcctcgccgtcgccgcccgtgactccgtcgtcgcgctgggtgggccgacatggacagttcttctggggaggagggactccaccactgcaagcaagaccaacgcggaaaatgacctgccacctcctaccttcgacctccaaaacctcaccaccttgttcggcaacaagcagctcagcatggcagacatggttgccctctcaggcgcccacacgatcgggcaatcgcagtgccggtttttcagggacaggatctacaacgagaccaacatcaacaccaccttcgcgacatctctcagggccaactgcccccagtccggcggcgacagcagcctggcgccgctggacacagcgacgcccaatgcgttcgacaactcctactacaccaacctcatgtcccagaaggggctgcttcactcggaccaggtgctgttcaatggcggcggcgccgacaacacggtcatgagcttcgcgaccagcgcggccacgttcaacagcgccttcacgacggccatgataaacatgggaaacatcgcgccaaagacggggacgcaggggcagatcaggctcgtctgctccaaggtcaactcgtaatgtccgcgccgacgctctgctgctgcgcatgaatgaactgaataaggtctcggataccagtaccagaatctacggagtagcgtggcctgtggttacgtatgtgtgttggttgaaaattgtacctgtgtatgtatgtccacatgtgtaacgaatttctcctgcaaaggcatggaggattcctttcctttatatcagaatgtcatactgcgagatgataatatctgccactttaaccctctccg

SEQ ID NO: 59297 - protein, 343 aa, Glycine max
  peptide (1)..(343): Ceres Seq. ID no. 13638747
ATVKSRKVGQKHHLTLWYSITLVARSVMASASCLGLVVLVAMASAASAQLSSTFYDTSCPNALATIKAGVTAALNTETRMGASLVRLHFHDCFVDGCDGSVLLADTGSFIGEQGAAPNNNSIRGMNVIDNIKTQVEAVCKQTVSCSDILAVAARDSVVALGGPTWTVLLGRRDSTTASKTNAENDLPPPTFDLQNLTTLFGNKQLSMADMVALSGAHTIGQSQCRFFRDRIYNETNINTTFATSLRANCPQSGGDSSLAPLDTATPNAFDNSYYTNLMSQKGLLHSDQVLFNGGGADNTVMSFATSAATFNSAFTTAMINMGNIAPKTGTQGQIRLVCSKVNS

SEQ ID NO: 59298 - protein, 316 aa, Glycine max
  peptide (1)..(316): Ceres Seq. ID no. 13638748
MASASCLGLVVLVAMASAASAQLSSTFYDTSCPNALATIKAGVTAALNTETRMGASLVRLHFHDCFVDGCDGSVLLADTGSFIGEQGAAPNNNSIRGMNVIDNIKTQVEAVCKQTVSCSDILAVAARDSVVALGGPTWTVLLGRRDSTTASKTNAENDLPPPTFDLQNLTTLFGNKQLSMADMVALSGAHTIGQSQCRFFRDRIYNETNINTTFATSLRANCPQSGGDSSLAPLDTATPNAFDNSYYTNLMSQKGLLHSDQVLFNGGGADNTVMSFATSAATFNSAFTTAMINMGNIAPKTGTQGQIRLVCSKVNS

SEQ ID NO: 59299 - protein, 302 aa, Glycine max
  peptide (1)..(302): Ceres Seq. ID no. 13638749
MASAASAQLSSTFYDTSCPNALATIKAGVTAALNTETRMGASLVRLHFHDCFVDGCDGSVLLADTGSFIGEQGAAPNNNSIRGMNVIDNIKTQVEAVCKQTVSCSDILAVAARDSVVALGGPTWTVLLGRRDSTTASKTNAENDLPPPTFDLQNLTTLFGNKQLSMADMVALSGAHTIGQSQCRFFRDRIYNETNINTTFATSLRANCPQSGGDSSLAPLDTATPNAFDNSYYTNLMSQKGLLHSDQVLFNGGGADNTVMSFATSAATFNSAFTTAMINMGNIAPKTGTQGQIRLVCSKVNS

SEQ ID NO: 59300 - DNA, 675 bp, Glycine max
  misc_feature (1)..(675): Ceres Seq. ID no. 12609226
attttgaagtaaaactagttgaaaggttaagaagaaaaaaaaaaggacagagaaagaatggcagaaacggagcaaaaggaggtagaagaaaagggatcgttgatctcaggcttgttggataaagccaaaggtttctttgccgagaagcttgctaatattccgacgccggaagccaccgtggacgacgtagacttcaaaggtgtgactcgtcaaggagttgattatcacgccaaggtctccgtcaagaatccttaccctcaacacatccctatttgccagatctcttacatcctcaagagtgacacaaggatgatagcgtctggtacaataccggatccgggttcgttgatcgcgaacggttcgacggttctggacgtaccggtgaaggtgccttacagcatagcggtgagtttgatgaaggacatgtgtttggactgggacattgactatcaactcgacattggactgaccatcgacattcctattgttggtgacattaccattcctgtctctactcagggtgagatgaagctcccttcccttcgcgacttcttttaatcatctctataagttataatctgattttcaataagtacgatcttactcggatgtttcagttgtggactcttgttttgtcggctttgttgttggattaataaggtcttttatttggtt

SEQ ID NO: 59301 - protein, 166 aa, Glycine max
  peptide (1)..(166): Ceres Seq. ID no. 12609227
MAETEQKEVEEKGSLISGLLDKAKGFFAEKLANIPTPEATVDDVDFKGVTRQGVDYHAKVSVKNPYPQHIPICQISYILKSDTRMIASGTIPDPGSLIANGSTVLDVPVKVPYSIAVSLMKDMCLDWDIDYQLDIGLTIDIPIVGDITIPVSTQGEMKLPSLRDFF

SEQ ID NO: 59302 - DNA, 1037 bp, Glycine max
  misc_feature (1)..(1037): Ceres Seq. ID no. 15172778
gtctatattcattttgccgagtgcgagagaaagagtcaggtgagtgagagaaaatggagaatgggctaagcgagatcggaagcacgaagatgttcgatggctacaacaaaagatacaaacacaacagtgagacacttggctgttccatgactttctccatctacttccctccttcctcccacagatcccctgttctttactggctttctgggctcacctgtacagacgagaacttcatcatcaagtccggagctcaacgtgctgcttctactcacggcattgctctcgttgttccagatacttctccaagaggacttaatattgaaggtgaagcagacagttacgacttcggtgtaggagctggattctacctcaatgctactcaggaaaagtggaagaactggcgtatgtatgactatgttgtcaaagagctgcctaaactcctgagtgagaattttcctcagcttgacacaacaagagcttctatctctggacattccatgggtggacatggtgctcttactatttacctcaagaacctcgacaagtataagtctgtctctgcgtttgcaccaatcgccaatcccataaattgcccatggggacagaaagcattcactaattatctaggtgacaacaaggctgcttgggaggaatacgatgccacttgtcttatttcaaagttcaacaatctctctgccacaattctaattgatcagggagaaaacgaccagttctaccctgatcagttactgcccaacaagtttgaagaggcgtgcaagaaagtgaatgcgccgctcttagtgcgtctgcagccaggatacgaccactcctactactttattgcaactttcatcgaagaccacatcagtcaccatgttcaagcccttgagttgtagctcagctaggcatcatccagctttgcctttgtccaaatattagtagcaagtgaacttgtaacgttttgtgttcaataactgctctgtgtggtgtgtttgtctacaataataaaataaattaaatctccaatttattgt

SEQ ID NO: 59303 - protein, 281 aa, Glycine max
  peptide (1)..(281): Ceres Seq. ID no. 15172779
MENGLSEIGSTKMFDGYNKRYKHNSETLGCSMTFSIYFPPSSHRSPVLYWLSGLTCTDENFIIKSGAQRAASTHGIALVVPDTSPRGLNIEGEADSYDFGVGAGFYLNATQEKWKNWRMYDYVVKELPKLLSENFPQLDTTRASISGHSMGGHGALTIYLKNLDKYKSVSAFAPIANPINCPWGQKAFTNYLGDNKAAWEEYDATCLISKFNNLSATILIDQGENDQFYPDQLLPNKFEEACKKVNAPLLVRLQPGYDHSYYFIATFIEDHISHHVQALEL

SEQ ID NO: 59304 - protein, 269 aa, Glycine max
  peptide (1)..(269): Ceres Seq. ID no. 15172780
MFDGYNKRYKHNSETLGCSMTFSIYFPPSSHRSPVLYWLSGLTCTDENFIIKSGAQRAASTHGIALVVPDTSPRGLNIEGEADSYDFGVGAGFYLNATQEKWKNWRMYDYVVKELPKLLSENFPQLDTTRASISGHSMGGHGALTIYLKNLDKYKSVSAFAPIANPINCPWGQKAFTNYLGDNKAAWEEYDATCLISKFNNLSATILIDQGENDQFYPDQLLPNKFEEACKKVNAPLLVRLQPGYDHSYYFIATFIEDHISHHVQALEL

SEQ ID NO: 59305 - protein, 250 aa, Glycine max
  peptide (1)..(250): Ceres Seq. ID no. 15172781
MTFSIYFPPSSHRSPVLYWLSGLTCTDENFIIKSGAQRAASTHGIALVVPDTSPRGLNIEGEADSYDFGVGAGFYLNATQEKWKNWRMYDYVVKELPKLLSENFPQLDTTRASISGHSMGGHGALTIYLKNLDKYKSVSAFAPIANPINCPWGQKAFTNYLGDNKAAWEEYDATCLISKFNNLSATILIDQGENDQFYPDQLLPNKFEEACKKVNAPLLVRLQPGYDHSYYFIATFIEDHISHHVQALEL

SEQ ID NO: 59306 - DNA, 745 bp, Glycine max
  misc_feature (1)..(745): Ceres Seq. ID no. 13595804
gagcccattggtcaggtcaggtcttcccacgcggaaggacgaggaaggttcacgaatcccctcctcacttcgcccctccccctctcctatttcttctctccgggccccgggccaaaattccatcctaagttccatcgaagagggcggcaaggggcgatccggatagcgcaagagcgaccatggcctacgtcgagagaggtgttgtgaaaggcaaacggacaatctggagactaagcataatccccgacttctttaaggctattgtgaacttcatcagaatgttcttcctcacaatgttttctatcgagaaaacagacagctataagaaaggatatggtagtggtaagaattgggatggtggacctggtgggggaggtcctggtgggggtccatatggtggtgggggcggcggtggaggtggccctcgcggtcctcgcacactatctgacctccgatcaaacgatcagagttccctccctgcttgtggatcctgctgcggatgacatcttaacaaaagaacaacatattataatgacagaaaaacttccgtatttcatttcagcagagcaaaatcattgtgatgccgtgaagagtctagcatgtccagtatatattctgtagcttgtttctgatgtgatttgcatactgtattcatcatcgctttgccatgctgaattgtcctggatggagtcaaaatcttatccttaatactggcttcctgttgtgcaatgtgaatttactatgt

SEQ ID NO: 59307 - protein, 107 aa, Glycine max
  peptide (1)..(107): Ceres Seq. ID no. 13595805
MAYVERGVVKGKRTIWRLSIIPDFFKAIVNFIRMFFLTMFSIEKTDSYKKGYGSGKNWDGGPGGGGPGGGPYGGGGGGGGGPRGPRTLSDLRSNDQSSLPACGSCCG

SEQ ID NO: 59308 - protein, 95 aa, Glycine max
  peptide (1)..(95): Ceres Seq. ID no. 13595806
MVVVRIGMVDLVGEVLVGVHMVVGAAVEVALAVLAHYLTSDQTIRVPSLLVDPAADDILTKEQHIIMTEKLPYFISAEQNHCDAVKSLACPVYIL

SEQ ID NO: 59309 - protein, 88 aa, Glycine max
  peptide (1)..(88): Ceres Seq. ID no. 13595807
MVDLVGEVLVGVHMVVGAAVEVALAVLAHYLTSDQTIRVPSLLVDPAADDILTKEQHIIMTEKLPYFISAEQNHCDAVKSLACPVYIL

SEQ ID NO: 59310 - DNA, 944 bp, Glycine max
  misc_feature (1)..(944): Ceres Seq. ID no. 13638654
acagattggcagattcccttttcgccttcccctgagcccgatcgagcaagccaatggagaagcaagccgacaaggccgcggcgccggtcgacgacggcatccacgaggagtcgccggcctccgcccagaacgggaggcccggatccgagccggcggccgcacccgaggtggaggtgcagctcttccggcggggccgggggccggtggccgtgttccggtcacccctgggcgggtacacgcaggaccagctggaggtgggggacatcctggagaagcacggcctcaagtgcgtcttcgccttcgacgccgcctcccgcgcacgcggcgtcgccatccgattcaacccccgcaacggccgctccctcctcccctacgccgccgactccaccatcttcctcgacggcgagcccaaggatcctttgctgaagcccatcaccaaggtgatgctcactgtctgcgccatgacagtggtagctgcggtgatactgaaggaggcgaagatgcccgagtggcttaagggaaccaagctaggcaacctgaaattcccaccgtgggtgctggcttgcatggtcattgtgttcatgaggctccggaagagaaccagggatgtcatgaagaagattggctggtcctcctgagaaggttactaatggcaagcacacttttggcccctccttccagtttgccgtcaatgttggagatgtactgggcagtgacatactacatgtaaatgttcagaacaaatgcatcttatagatcacttatatttgaccttatgtttagcatatacacgacgcggtttgccagtgtggcatttttgcttgtagcaagtgtgcatgaataaatgtagccgaacaaactggtgtgcactctgtttctgtgaagattttgttcactgacccttgatggtgctttaacgagaaatttaactgctaaattatttc

SEQ ID NO: 59311 - protein, 194 aa, Glycine max
  peptide (1)..(194): Ceres Seq. ID no. 13638655
MEKQADKAAAPVDDGIHEESPASAQNGRPGSEPAAAPEVEVQLFRRGRGPVAVFRSPLGGYTQDQLEVGDILEKHGLKCVFAFDAASRARGVAIRFNPRNGRSLLPYAADSTIFLDGEPKDPLLKPITKVMLTVCAMTVVAAVILKEAKMPEWLKGTKLGNLKFPPWVLACMVIVFMRLRKRTRDVMKKIGWSS

SEQ ID NO: 59312 - protein, 171 aa, Glycine max
  peptide (1)..(171): Ceres Seq. ID no. 13638656
QIGRFPFRLPLSPIEQANGEASRQGRGAGRRRHPRGVAGLRPEREARIRAGGRTRGGGAALPAGPGAGGRVPVTPGRVHAGPAGGGGHPGEARPQVRLRLRRRLPRTRRRHPIQPPQRPLPPPLRRRLHHLPRRRAQGSFAEAHHQGDAHCLRHDSGSCGDTEGGEDARVA

SEQ ID NO: 59313 - protein, 141 aa, Glycine max
  peptide (1)..(141): Ceres Seq. ID no. 13638657
TDWQIPFSPSPEPDRASQWRSKPTRPRRRSTTASTRSRRPPPRTGGPDPSRRPHPRWRCSSSGGAGGRWPCSGHPWAGTRRTSWRWGTSWRSTASSASSPSTPPPAHAASPSDSTPATAAPSSPTPPTPPSSSTASPRILC

SEQ ID NO: 59314 - DNA, 991 bp, Glycine max
  misc_feature (1)..(991): Ceres Seq. ID no. 13594738
atcctctcgattgagtaaaccctaattttcccccaaaccgcagccatgaacctcccgtcctccacggcgacctcaacttcggagtcgcctgatacggcggcgggggcgatttccccggagacgtgcggcggttgcaaaagccaagactcctgggtcatacactcggctcgtctccgcggcatcctccgcttctactgcacgcactgcctcctccgcaaccacccggcgtcgttttgccccacctgcttcgccttctacgactcctccccgccgcaccagtcccgccgcgtctcctgcaacgattgcaactccgtcactcacatccactgcgcgggagacgccaagtcccctccttaccgctgtcctccgtgccgcgaccccgacggcttctccttcttccgccccatcgtcgacgaaaacggcgcccggtgcatggataaggccctctcggaggccttcctgtgcgccgcgaagatcgcggcctcgtcgatgagcaaggccgttactttcttcagaagcgaagctgagcggaaagggaaagatgccgccgtggcgaagaagagagcgcgggaggctctcgaggacgtgctcaagctcgacgagaaggctaagttggccgtttcgaagccctccgagaatagagatcagaaaccgaaacagagtcctgcttcgaatggtggtttgaaacagattgagagctctgcggccaccgcccaagtcaagaaacagagttcgtctgtagtgcaagttaagcaagagaagtgattgcttttgaatggttatcagtgaataacttgatgtatcttttgtcttgtttgtgaaaaaaaaggttcaagcttggcatattatgtttcgggttttagtgtagatttgtgtaagtggtctccttgttttttcagtttctttttgggtttgtttgctatgtgtaggagtatgtggaacagtgtgaaagtgttagatttctaattttaattgcttcatcttgtgtctc

SEQ ID NO: 59315 - protein, 239 aa, Glycine max
  peptide (1)..(239): Ceres Seq. ID no. 13594739
MNLPSSTATSTSESPDTAAGAISPETCGGCKSQDSWVIHSARLRGILRFYCTHCLLRNHPASFCPTCFAFYDSSPPHQSRRVSCNDCNSVTHIHCAGDAKSPPYRCPPCRDPDGFSFFRPIVDENGARCMDKALSEAFLCAAKIAASSMSKAVTFFRSEAERKGKDAAVAKKRAREALEDVLKLDEKAKLAVSKPSENRDQKPKQSPASNGGLKQIESSAATAQVKKQSSSVVQVKQEK

SEQ ID NO: 59316 - DNA, 1591 bp, Glycine max
  misc_feature (1)..(1591): Ceres Seq. ID no. 14314046
actactgttctgcaaaaaagctattttggccctgtgccaccaaagccatctcccccatttttgctcctctatctcttttttctaatcatcacaattgggtgagaaaaaaacacacacacaactcaacaatgggtgagaaagatgatggcttgggtttggggttgagtttgaagttaggatggggagaaaataatgataacaataataatcaacaacaacaccctttcaacgtgcacaagcctcctcaatcggttccaaaccaaagggtttccgtcaatagcttgttccattttcatgatcggagctccgagatgcggtcgttcttccgcggaatagacgtgaatttgccaccgcccccgccttcggcggctctggcggcgttcgatgacgagaacggggtgtcctcgccgaacagcacgatatcgagcatcagcgggaagcggagcgagagagagggaaacggagaggagaacgagagaacgtcgagttctcgcggcggcggcggaagcgacgacgatgaaggcggcgcgtgtggtggagacgccgacgccgatgcgtcgaggaagaagctgaggttgtctaaggaacaggccttggtgctggaagaaacattcaaggaacacaatactctgaacccgaagcaaaagcaagctttggcaaagcagttgaatttgatgcctaggcaggtggaggtgtggtttcaaaacagaagagcaaggaccaaattgaagcagactgaagtggattgtgaatatttgaagaggtgctgtgagaatctaactgaagagaataggaggcttcaaaaggaagtgcaagagctcagggcattgaagttatccccacagctttacatgcaaatgaaccctcccaccactctcacaatgtgcccttcatgtgagcgtgttgctgtctcatccgcatcctcttcctcatcggccaccatgccctctgccctgcctccagctaatctcaacccggtgggccctaccatccagcggccaatgcccgtcaacccttgggcagcaatgttgaatcagcaccgtggccggccataatcaaaccctccaggccgtaggtaatagggtaaagttcaggatggaagctaggacattttagttgtgctagacagaaatgaatcaaagaaataggaatcttatgtgttggttaactttactaggactttgagagctcatggtttgggaaattctatttgcatccttttttttttcattgcaccttccattctcttttacattgcagaaattagttttcggaatctacaatgcaattatagaaattaatttttgaaatgtaaaagaaaaggtagagattttgaagagttaaaaaaaaaggatgcaactagaatcatcctcatgcttttggttaactctttttgtctaggcttattttactttgagcatagatagaacatgtttttagtcaactttaggatgtgtaaagtttggacatgttaaagtagttagtgttttcatctgctgaacagtgtttgttatttgttaaccttggaaagttggaaaagggaattggaatctgtattttattttatattttatttgcttcttttcattgg

SEQ ID NO: 59317 - protein, 350 aa, Glycine max
  peptide (1)..(350): Ceres Seq. ID no. 14314047
YCSAKKLFWPCATKAISPIFAPLSLFSNHHNWVRKKHTHNSTMGEKDDGLGLGLSLKLGWGENNDNNNNQQQHPFNVHKPPQSVPNQRVSVNSLFHFHDRSSEMRSFFRGIDVNLPPPPPSAALAAFDDENGVSSPNSTISSISGKRSEREGNGEENERTSSSRGGGGSDDDEGGACGGDADADASRKKLRLSKEQALVLEETFKEHNTLNPKQKQALAKQLNLMPRQVEVWFQNRRARTKLKQTEVDCEYLKRCCENLTEENRRLQKEVQELRALKLSPQLYMQMNPPTTLTMCPSCERVAVSSASSSSSATMPSALPPANLNPVGPTIQRPMPVNPWAAMLNQHRGRP

SEQ ID NO: 59318 - protein, 308 aa, Glycine max
  peptide (1)..(308): Ceres Seq. ID no. 14314048
MGEKDDGLGLGLSLKLGWGENNDNNNNQQQHPFNVHKPPQSVPNQRVSVNSLFHFHDRSSEMRSFFRGIDVNLPPPPPSAALAAFDDENGVSSPNSTISSISGKRSEREGNGEENERTSSSRGGGGSDDDEGGACGGDADADASRKKLRLSKEQALVLEETFKEHNTLNPKQKQALAKQLNLMPRQVEVWFQNRRARTKLKQTEVDCEYLKRCCENLTEENRRLQKEVQELRALKLSPQLYMQMNPPTTLTMCPSCERVAVSSASSSSSATMPSALPPANLNPVGPTIQRPMPVNPWAAMLNQHRGRP

SEQ ID NO: 59319 - protein, 247 aa, Glycine max
  peptide (1)..(247): Ceres Seq. ID no. 14314049
MRSFFRGIDVNLPPPPPSAALAAFDDENGVSSPNSTISSISGKRSEREGNGEENERTSSSRGGGGSDDDEGGACGGDADADASRKKLRLSKEQALVLEETFKEHNTLNPKQKQALAKQLNLMPRQVEVWFQNRRARTKLKQTEVDCEYLKRCCENLTEENRRLQKEVQELRALKLSPQLYMQMNPPTTLTMCPSCERVAVSSASSSSSATMPSALPPANLNPVGPTIQRPMPVNPWAAMLNQHRGRP

SEQ ID NO: 59320 - DNA, 817 bp, Glycine max
  misc_feature (1)..(817): Ceres Seq. ID no. 14306349
attaacattcctccaagcaccatcaagattcaagcacatagttatcatcaattccccagctagttttggccacgcctgcatcttcttctgctttaagctatggcctctaacttcagcttgagaactttgatgatatttgcccttgcattttctctcgccctgcaaggcactcttggagggatagaatgcgagagtctgagccatgacacatgctcattcgccgtgacatctgctggcaaacgatgtgtgcttgagaagcaggtgaagaggactggtgaggaagcatacacatgcaggacatcagagattgaagctgataaactgaaggaccacattgaaactgaacaatgcatcaaggcttgtggtttggacagaaagtcccttggaatctcatcagactctcttcttcaatctagcttcacgcaaaagctctgctcccccatctgctaccagtgttgcccaaacgttgttgacttatacttcaatctggcagctggtgaaggtgtgtttcttcccaagttgtgtgaagcacaaggtctaaatgctcgtcgaggaatggctgaactgaaaagctctggtatcgtggcaccgggacctgtgcacggtgtgcagttcacagctactcctccgattaaccctgtggagctcacaattgaacctgccgttgccccatcaccaaactaaagtcaagtctagtttttttagaacacgcaaaagaaattgagaaaagcgtgtattaaacaacttagcatatactagtatacagatgagagtggcatatatactatattttgtttgtaataatgaagttgcacct

SEQ ID NO: 59321 - protein, 194 aa, Glycine max
  peptide (1)..(194): Ceres Seq. ID no. 14306350
MASNFSLRTLMIFALAFSLALQGTLGGIECESLSHDTCSFAVTSAGKRCVLEKQVKRTGEEAYTCRTSEIEADKLKDHIETEQCIKACGLDRKSLGISSDSLLQSSFTQKLCSPICYQCCPNVVDLYFNLAAGEGVFLPKLCEAQGLNARRGMAELKSSGIVAPGPVHGVQFTATPPINPVELTIEPAVAPSPN

SEQ ID NO: 59322 - protein, 184 aa, Glycine max
  peptide (1)..(184): Ceres Seq. ID no. 14306351
MIFALAFSLALQGTLGGIECESLSHDTCSFAVTSAGKRCVLEKQVKRTGEEAYTCRTSEIEADKLKDHIETEQCIKACGLDRKSLGISSDSLLQSSFTQKLCSPICYQCCPNVVDLYFNLAAGEGVFLPKLCEAQGLNARRGMAELKSSGIVAPGPVHGVQFTATPPINPVELTIEPAVAPSPN

SEQ ID NO: 59323 - DNA, 1354 bp, Glycine max
  misc_feature (1)..(1354): Ceres Seq. ID no. 14314814
aaaataagagaaggggtgagggggcggcaccacctttccttccctcccgattgccctaggtaaaaaatgtatatagttcttttcttttgcatcaattcagcggcgacgaaaccgcaatagatctccgtttctcgccaaacaaacacaaaatagctgccttcagcggcgacgaaaccgcacctttctttggcttcctcggagccaccgctaccctcgttttttcctgtaactaactcatcaaggaggatccatctctgaaacatattttggaggagatagagactggtggtcctgctgctatgatgaggtactggaatgatgaggaggttttgcggaagttgggacaaaccatgggagtttccttaataaacgtgtaaagggattaggaacccagaacataaactgtcctaaagctacttgagaaagatgcttttctgtaattgtaatgcatgatgccatgctgtcaccaacaatcaaaggggaaactgaggggaagaagatgtttccgtgatgaaaatttaagagctgatagacaacttgagttcacccaactagacatggaaatgacctttactccttacgaggatatgttaacacttaatgaagaattgattagaaagaagtagtaaagttgcaggaaaaatggtgtgaggataaagagaaaacaaaggaagaatatgaaggagacaagcgatggtaactcaaaaaattataaataggatgagggttgcgagtggatcgagtaccttttcggatggcaatgggccagtctgactaagagtgatgagagacaggtgaggaagcaggatccatggttggaggactagttggagaaggatgagaatcacgaggggaggcttcaggtactgtagaattagctggccgtgtcctgtgatgatatgtaagtagaggtagagagacaacttcaattgaatttggtagagaagatgagacttcattgacattttggtcggagttacctagaggacaaggaattggcagtacttcctggagagaagaagaatgatctacagaggatgagaagaaaggtgtgtcttcaaagaaggttacatctgcagacatataatatcgtcttgtgattggagagtagcatttgtaacccttttgaagacgagaataacccaaaaagacacattttactgacttagctgaaagtttgtctaaatcaagggaaagatcatgaacaaaacaagtacaaccaaacactctaggagagacatgaaacaatgggtcatgaggaaagataattgagtgaggaatttggttttcaagagaagaagaaggcatcctattaattaagaagcacgcagtaagcactgcgtctccccagtga

SEQ ID NO: 59324 - protein, 58 aa, Glycine max
  peptide (1)..(58): Ceres Seq. ID no. 14314815
MMPCCHQQSKGKLRGRRCFRDENLRADRQLEFTQLDMEMTFTPYEDMLTLNEELIRKK

SEQ ID NO: 59325 - protein, 57 aa, Glycine max
  peptide (1)..(57): Ceres Seq. ID no. 14314816
MPCCHQQSKGKLRGRRCFRDENLRADRQLEFTQLDMEMTFTPYEDMLTLNEELIRKK

SEQ ID NO: 59326 - DNA, 1390 bp, Glycine max
  misc_feature (1)..(1390): Ceres Seq. ID no. 15171261
agaaccctcttcttctacctctctctctctctctctctctctccagattcttccccttccatggatgctttgaacttcctcaaattctggagaaacgccaccatgagcacaacctccgaaccccaccttgttgttgaaaccgacaccgaatccgacgaagacgactcattcttcgacttggagctcacgccactcgatttcgacaacaaagaaaacaacaccaacaccaccacaaccaaaaacgacgacgacccaaaacaaacgacaacaagcgaactcaaaagtcttggctccaaagacaacttactcagcaaaacagacaatggcgttcagcgtaaaacaccacttcccctgtctcctccttccgaacctatctccaaacgtaaggtcctcccaatcgaacctatctccaaacctcagtcccccattgcgcttctcaggtccgccccgagcttcagaatcttcatgttccgaaagcgaaacagaacacctccacaacagaaaacagagcactctgttaacgaagcaaaagtctttgcggtgaagctcagcgtcgacgattttcgttcctctcccgcgctcagcagggacaacagcacgagaagctttgggagcaaggttcggggtttgagctacgaggaagaaccgaagccggagcggttttcgaaggaggtgttgcggaagtacctgaagctgataaagccgctatatgttaaagtttctaagaggtatagtgataaggtgaggttctccggtgagggttatgcggcgtcgccgtcgtcgtcgccgtcggtcgcctctgtttcttcgaggacggagaaacaggggaaggggatgagggtggtttcgaagcatttaggaaagagtaggtcggcgtcgtcgacggtggcgggtgttagttctccggcgaagaagagcgatgacacgatgcagcagcagcttgatgggatccaaagcgccatccttcactgcaaaaggtccttcaactccagagaaggatcaatgtattcggtgaggaaatcatttgatggtgaacatggggaaaaagtgtaatcttgaggattttgttgtgaaagaagaagctcaagctgatacaacagaagagaagagaaaaaaatgttatttttttgtattatctatctagtgcattgtaaagaaaagggaaagaggggagagggatagttgtgatgattagtgagtgtgtgggaggcaggctcccctcccctggtggtcagtgaatgtatgtaaattaatggttaatggggcattatgaaaagaatcaaagggatcttctactgtatctctgtctgctgtgtgtgggttttgcactttgcactctgcttgaggtttattttgatattgatttgatgcccatcaaatgattcaaggc

SEQ ID NO: 59327 - protein, 350 aa, Glycine max
  peptide (1)..(350): Ceres Seq. ID no. 15171262
RTLFFYLSLSLSLSPDSSPSMDALNFLKFWRNATMSTTSEPHLVVETDTESDEDDSFFDLELTPLDFDNKENNTNTTTTKNDDDPKQTTTSELKSLGSKDNLLSKTDNGVQRKTPLPLSPPSEPISKRKVLPIEPISKPQSPIALLRSAPSFRIFMFRKRNRTPPQQKTEHSVNEAKVFAVKLSVDDFRSSPALSRDNSTRSFGSKVRGLSYEEEPKPERFSKEVLRKYLKLIKPLYVKVSKRYSDKVRFSGEGYAASPSSSPSVASVSSRTEKQGKGMRVVSKHLGKSRSASSTVAGVSSPAKKSDDTMQQQLDGIQSAILHCKRSFNSREGSMYSVRKSFDGEHGEKV

SEQ ID NO: 59328 - protein, 330 aa, Glycine max
  peptide (1)..(330): Ceres Seq. ID no. 15171263
MDALNFLKFWRNATMSTTSEPHLVVETDTESDEDDSFFDLELTPLDFDNKENNTNTTTTKNDDDPKQTTTSELKSLGSKDNLLSKTDNGVQRKTPLPLSPPSEPISKRKVLPIEPISKPQSPIALLRSAPSFRIFMFRKRNRTPPQQKTEHSVNEAKVFAVKLSVDDFRSSPALSRDNSTRSFGSKVRGLSYEEEPKPERFSKEVLRKYLKLIKPLYVKVSKRYSDKVRFSGEGYAASPSSSPSVASVSSRTEKQGKGMRVVSKHLGKSRSASSTVAGVSSPAKKSDDTMQQQLDGIQSAILHCKRSFNSREGSMYSVRKSFDGEHGEKV

SEQ ID NO: 59329 - protein, 316 aa, Glycine max
  peptide (1)..(316): Ceres Seq. ID no. 15171264
MSTTSEPHLVVETDTESDEDDSFFDLELTPLDFDNKENNTNTTTTKNDDDPKQTTTSELKSLGSKDNLLSKTDNGVQRKTPLPLSPPSEPISKRKVLPIEPISKPQSPIALLRSAPSFRIFMFRKRNRTPPQQKTEHSVNEAKVFAVKLSVDDFRSSPALSRDNSTRSFGSKVRGLSYEEEPKPERFSKEVLRKYLKLIKPLYVKVSKRYSDKVRFSGEGYAASPSSSPSVASVSSRTEKQGKGMRVVSKHLGKSRSASSTVAGVSSPAKKSDDTMQQQLDGIQSAILHCKRSFNSREGSMYSVRKSFDGEHGEKV

SEQ ID NO: 59330 - DNA, 847 bp, Glycine max
  misc_feature (1)..(847): Ceres Seq. ID no. 14306010
ctctttccgttcccttgatgtaatggctttatgccgattcgcttactcttattctcctgcttctgcttccaccatttttcgtttcccgaaatacccttcgaaacacactaaattctccttgctaccactctcattctcaacgatggaagctcctccagaaggttatcgtaggaacgttggtatctgtctcatgaacaatcacaaaaagattttcgcggcttcgaggctcgacattcccaatgcttggcaaatgcctcagggtggtattgatgaaggtgaggatccaagaaatgcagctatcagggagttacgagaagagacaggagttaattcagtagaagtgatcgctgaggtaccatattggttaacttatgacttcccaccaaaagtgagggagaaattaaatattcagtggggatctgattggaagggtcaggcgcagaaatggtttctttttaagttcactgggcaagatcaagaaattaatcttttgggtgatggtactgagaaagctgagtttggggaatggtcatggatatcacctgaacaagtaattgagcttgcagtggatttcaagaaacctgtctacaaggaagtcttagcagtgtttgctccacatttccaataaatcttatctttggctgaaattgttactgatgccttgggtgattatgagggctgctttaaaaagaatgtattccaattaactaacgagaccattattctcttttttctcctcttggccataataacccatagggcgggagaagagggctgtttattttgtctgaatgaaatatgtattgtcatgaaaattgttgtgcaatgtattgcatttgcatctgcc

SEQ ID NO: 59331 - protein, 208 aa, Glycine max
  peptide (1)..(208): Ceres Seq. ID no. 14306011
SFRSLDVMALCRFAYSYSPASASTIFRFPKYPSKHTKFSLLPLSFSTMEAPPEGYRRNVGICLMNNHKKIFAASRLDIPNAWQMPQGGIDEGEDPRNAAIRELREETGVNSVEVIAEVPYWLTYDFPPKVREKLNIQWGSDWKGQAQKWFLFKFTGQDQEINLLGDGTEKAEFGEWSWISPEQVIELAVDFKKPVYKEVLAVFAPHFQ

SEQ ID NO: 59332 - protein, 201 aa, Glycine max
  peptide (1)..(201): Ceres Seq. ID no. 14306012
MALCRFAYSYSPASASTIFRFPKYPSKHTKFSLLPLSFSTMEAPPEGYRRNVGICLMNNHKKIFAASRLDIPNAWQMPQGGIDEGEDPRNAAIRELREETGVNSVEVIAEVPYWLTYDFPPKVREKLNIQWGSDWKGQAQKWFLFKFTGQDQEINLLGDGTEKAEFGEWSWISPEQVIELAVDFKKPVYKEVLAVFAPHFQ

SEQ ID NO: 59333 - protein, 161 aa, Glycine max
  peptide (1)..(161): Ceres Seq. ID no. 14306013
MEAPPEGYRRNVGICLMNNHKKIFAASRLDIPNAWQMPQGGIDEGEDPRNAAIRELREETGVNSVEVIAEVPYWLTYDFPPKVREKLNIQWGSDWKGQAQKWFLFKFTGQDQEINLLGDGTEKAEFGEWSWISPEQVIELAVDFKKPVYKEVLAVFAPHFQ

SEQ ID NO: 59334 - DNA, 1305 bp, Glycine max
  misc_feature (1)..(1305): Ceres Seq. ID no. 14314408
attacttattagtatacctctcactctaaagttgtcttagtctctctattcttcacattcatcagcaggtcaggttggctggcaagttattgaaatgaagaataagaatggaaaacttaaattgacgtttgagaagttcacatggacgattagtaacttctctaaattggactccaagaaactgtactctgagaagttttagctcgatcaccatacatggaagattcttgcctatccaaaggggactgatgtgggctacttgtcaatttatttagatgctggtgttgttaatttgccttttggctggagcaaatttgcaaatttcaagttcgctttaattaatcaggccaatgacaaaatgactaaaataaaagaaactacaaaacagttcaatgcaacagaaattgcttggggttttccaaaattcatacacttagatgaacttaatgattctagcagtgggtttatggtgaatgatacttgtataattgaagttcagattttggtcagcaagtcagaacaggagaatcaagtagatcaacaagttaacaagattgatgataatcatgatattgataagcctattaaacacacagatatcttcttacccaaggaaacgttcccaacctcatttggtgagctagttgatttccaaggcttagggaaaatagaacaagcttttgttccattgttagaagaagtattttctcgacatccctcactcattgattgtcagcaaaaaagaagtggcaggtttgttgaatgggcattcacagctttgggtcgagttttacattttctcaagactaaaaaggtgaaagatatggatggtgatgcttgcaataatcttcaaattttttgggaggaattgaagatgtttagatttgatttgacttggctggaacctcatgttcaatctgccttggctatgaaaacttgtattgagagagctgttcgggtgaaaaggacgagggaggatgtgactgctttagagatggaaacaaagaggttgaaggcaaagatgattcaagcagaggtagatcttgaaatagcaagaagagacttcgtgaaagcaaaagaaggctttgaagagtgcgatttggatgctgaactaggctatggagaaccataatttgatattatgtcacttgttgaagaatatttcagtagagctagcctacatgttttggatgagcattcctaaacacctgagtgttcttctagacatcaaatcatcaatgaacttgaaagtactcaaactcaaagcagaaattgattattctgttaactgaaatgttgtttctg

SEQ ID NO: 59335 - protein, 257 aa, Glycine max
  peptide (1)..(257): Ceres Seq. ID no. 14314409
MTKIKETTKQFNATEIAWGFPKFIHLDELNDSSSGFMVNDTCIIEVQILVSKSEQENQVDQQVNKIDDNHDIDKPIKHTDIFLPKETFPTSFGELVDFQGLGKIEQAFVPLLEEVFSRHPSLIDCQQKRSGRFVEWAFTALGRVLHFLKTKKVKDMDGDACNNLQIFWEELKMFRFDLTWLEPHVQSALAMKTCIERAVRVKRTREDVTALEMETKRLKAKMIQAEVDLEIARRDFVKAKEGFEECDLDAELGYGEP

SEQ ID NO: 59336 - protein, 221 aa, Glycine max
  peptide (1)..(221): Ceres Seq. ID no. 14314410
MVNDTCIIEVQILVSKSEQENQVDQQVNKIDDNHDIDKPIKHTDIFLPKETFPTSFGELVDFQGLGKIEQAFVPLLEEVFSRHPSLIDCQQKRSGRFVEWAFTALGRVLHFLKTKKVKDMDGDACNNLQIFWEELKMFRFDLTWLEPHVQSALAMKTCIERAVRVKRTREDVTALEMETKRLKAKMIQAEVDLEIARRDFVKAKEGFEECDLDAELGYGEP

SEQ ID NO: 59337 - DNA, 1292 bp, Glycine max
  misc_feature (1)..(1292): Ceres Seq. ID no. 14314507
acacatagctgagagagaaaggaaaggttaactaagaagcaatacttcaatggccacccttgttgttcataaccaaacttcttctgctcaagatgctgaggctctccaacaggctttcaaaggatggggggctgatgacaaggccattatagcaatactgggtcacagaaatgttcatcagaggcaagaaatcagaaaagcttatgaggagatttaccaagaggatctcatcaaacgccttgagtccgagatctctggtgactttgagagagctatgtaccggtggatgttgcagcctgcggatcgtgatgctgttttggtgaatgtggcaatcaagaatggcaccaaagactaccatgtgattgcagagattgcttgtgtcctatcagctgaagagctcttggcagtgaggcgggcctaccaccgccgctacaagtgttccttggaggaagatgtggcagctaacaccaccggcaatcttcgccagcttttggttggattggtgacctcatataggtatgagggtgatgagatcaatgtaaaattttcacaaactgaagctaatgttcttcatgaatctgtcaaggagaagaaaggcaacagtgaagaagtcatcaggatccttactacaagaagcaaaactcaacttgtggcaactttcaaccgctacagagatgaacatggaatttccatcagtaagaaattgttggatcaaacatctgatgacttccacaaggtgttgcacactgctattcgctgcatcaatgaccataagaagtactatgagaaggttttgcgcaatgcagtcaagaagtttggaactgacgaggatggactaagccgtgtgattgttacaagggctgagaaggatctgaaggacatcaaagagctctactacaagagaaacagtgttcaccttgaggatgaagtgtccaaggaaacttctggggactacaagaagttcctcctcactctcttggggaaataagactaagttaagaacttgctctaagggcatcttagtaatgggtttttgttaattatgtcattggtttctggtttgtgcgatttcattatgttagttttccagtaagagtttgttatatctggttaagtttttgagacaacaagaactcgtgtcttgtttgagggcatgcgtgccatttcttagggttgtgttggtacttggcatgctcttattagaggacctctatgctgcgtgtttcctttggattatgctattacctcacctggtttgcttttaatgaaaggttgataacaaatttatatgt

SEQ ID NO: 59338 - protein, 312 aa, Glycine max; identical to SEQ ID NO: 54950
  peptide (1)..(312): Ceres Seq. ID no. 14314508

SEQ ID NO: 59339 - protein, 237 aa, Glycine max; identical to SEQ ID NO: 53326
  peptide (1)..(237): Ceres Seq. ID no. 14314509

SEQ ID NO: 59340 - protein, 233 aa, Glycine max; identical to SEQ ID NO: 53327
  peptide (1)..(233): Ceres Seq. ID no. 14314510

SEQ ID NO: 59341 - DNA, 659 bp, Glycine max
  misc_feature (1)..(659): Ceres Seq. ID no. 14305921
acggagccaaacacgccaaccagacttgttccgacaccaacagaagagcaaatctaacaccctctccggctaaatgctcccttcccgggagcctaacggcaacaacgatggcgcaaaacgtgaatcgtgatcgtcatcactcttttttgctacactctcattttttaatcactcagaatggcggtgtggcgacgaacgctggtgcggcggtggtgaagagggtgctgaagcgctttgaagagcttctgatggtttgaaacaaagcgatagagggaaaagacgcatggtactgaacgcatctagaacctttgttggttcacaacatcgaaatgggactccccgaagcagtaaaggaatttcttggcgatttggtctacgagccttgtgtcgctgcttctttcttgagtttggagcatccaaagcttcgaacttttctcgcacaggtttgtttgccggcgatcttttcgacggagattatggggacgaggttcgaggagtttccgaaggagttctggctttttttttgcaatattagaagttacaatgttttccataacttttacaaattcttgaaagcagtgtgaaattaattattataaatcttgttggcgggttgggttgatttagaaatatatgaagggtatggtattgctattggc

SEQ ID NO: 59342 - protein, 84 aa, Glycine max
  peptide (1)..(84): Ceres Seq. ID no. 14305922
GAKHANQTCSDTNRRANLTPSPAKCSLPGSLTATTMAQNVNRDRHHSFLLHSHFLITQNGGVATNAGAAVVKRVLKRFEELLMV

SEQ ID NO: 59343 - protein, 84 aa, Glycine max
  peptide (1)..(84): Ceres Seq. ID no. 14305923
MGLPEAVKEFLGDLVYEPCVAASFLSLEHPKLRTFLAQVCLPAIFSTEIMGTRFEEFPKEFWLFFCNIRSYNVFHNFYKFLKAV

SEQ ID NO: 59344 - protein, 83 aa, Glycine max
  peptide (1)..(83): Ceres Seq. ID no. 14305924
MVLNASRTFVGSQHRNGTPRSSKGISWRFGLRALCRCFFLEFGASKASNFSRTGLFAGDLFDGDYGDEVRGVSEGVLAFFLQY

SEQ ID NO: 59345 - DNA, 1984 bp, Glycine max
  misc_feature (1)..(1984): Ceres Seq. ID no. 14314585
tctctcgagtcttgtccctggtcactactcacaaatgtgaattgtccccagtctctcgagaacttagaatagaatactcgtcccacacccaattttcttctctctctcctctcatcacttcatatattcgcaatttctcttccaccgtgaaaccctagacccaactgcgagcgcggagccaagccatgtccctcaaccgcctcctctccgtggcccgccgctccgatcggcgggcctccgccctctcctccctccgatccctctctgcctccgccgccgctgtggctccctccgcctcctcccctcccgcccctcttccccccaccgccatgatctacgaccgcgccgccgaggccgtgaagtccaagctccggcagctcgagaaccccgacccccgcttcctgaagcatgggtccccccggcccaccctctctgaccacacgcgcatcctgtcctcccccgagacgcgcgtgaccacgcttcccaacggcctccgcatcgccaccgagtccaccctcagcgcccgcaccgccaccgtcggcgtctggatcgacgccggttcgcggttcgagaccgaggagaccaacggcaccgcacacttcctcgagcacatgatctttaagggcaccgagaggcgcaacgcgcgtgagctcgaggaagagattgagaacatgggaggacacctcaacgcctacacctcaagggagcaaaccacctactacgccaaggtcaccgacaaggacgtcccccaggccctcgacatcctcgccgacatcctccagaactcccgattcgaggaaactcgcatcaaccgcgagcgcgatgtcattctccgggagatggaggaggttgagggtcaaactgaggaagtgatttttgaccacctacacgctactgcattccagtacactcctcttggaagaaccattcttggacctgctcagaacattaagacgatcaccaaagctcatctgcagagttacattcagacacattacacagctcctaggatggtgatagctgcatctggagctgtcaagcatgaagacattgttgagcaagtgaaaaagttgtttactaagttgtcaacagatcccactaccacatctcaattagttgctagagagccggctatttttactggttctgaggttagaatgcttgatgatgatattcccctagctcaatttgctgtggcttttgaaggggcatcttggaaggatccggattcaattcctctcatggtcatgcaagctatgttgggttcttggaataaggcagcaggaggtggaaaacacatgggttctgagttagcacagcgaattggcattaatgaagttgccgagagcattatggctttcaacaccaattacaaggacacaggtctttttggtgtttatgccgttgccaagcctgattgcttggatgatttgtcctatgcaataatgtatgagacaaccaagttggcttatcgtgtttcagaagatgatgttacacgtgctcgtaatcagttgaaatcttcactgctactacacatagatggaacaagcccagtggctgaagatattggtcgtcagctactcacatatggtcgaagaatcccatttgctgaattgtttgctagaattgatgctgttgatgccagtacaattaaacgtgttgcgaaccgatttatctatgacaaggatgttgttattgctgccacgggtcctattcagcgtttgcctgattacaactggttccgacgcagaacctactggaaccgctattagttcattatagtttttttgcctcatttaaacttcattggaggtctggcaaatgttttattcaaatttacaagatttatgcctctggatggctgctttggcagccatttttcatttatttgtcatggacctctattttgtaacatttttgcagtaataagtatgctgttgtcagtgatgtaattggcatccttcgcaattactcattcctgtcg

SEQ ID NO: 59346 - protein, 528 aa, Glycine max
  peptide (1)..(528): Ceres Seq. ID no. 14314586
MSLNRLLSVARRSDRRASALSSLRSLSASAAAVAPSASSPPAPLPPTAMIYDRAAEAVKSKLRQLENPDPRFLKHGSPRPTLSDHTRILSSPETRVTTLPNGLRIATESTLSARTATVGVWIDAGSRFETEETNGTAHFLEHMIFKGTERRNARELEEEIENMGGHLNAYTSREQTTYYAKVTDKDVPQALDILADILQNSRFEETRINRERDVILREMEEVEGQTEEVIFDHLHATAFQYTPLGRTILGPAQNIKTITKAHLQSYIQTHYTAPRMVIAASGAVKHEDIVEQVKKLFTKLSTDPTTTSQLVAREPAIFTGSEVRMLDDDIPLAQFAVAFEGASWKDPDSIPLMVMQAMLGSWNKAAGGGKHMGSELAQRIGINEVAESIMAFNTNYKDTGLFGVYAVAKPDCLDDLSYAIMYETTKLAYRVSEDDVTRARNQLKSSLLLHIDGTSPVAEDIGRQLLTYGRRIPFAELFARIDAVDASTIKRVANRFIYDKDVVIAATGPIQRLPDYNWFRRRTYWNRY

SEQ ID NO: 59347 - protein, 480 aa, Glycine max
  peptide (1)..(480): Ceres Seq. ID no. 14314587
MIYDRAAEAVKSKLRQLENPDPRFLKHGSPRPTLSDHTRILSSPETRVTTLPNGLRIATESTLSARTATVGVWIDAGSRFETEETNGTAHFLEHMIFKGTERRNARELEEEIENMGGHLNAYTSREQTTYYAKVTDKDVPQALDILADILQNSRFEETRINRERDVILREMEEVEGQTEEVIFDHLHATAFQYTPLGRTILGPAQNIKTITKAHLQSYIQTHYTAPRMVIAASGAVKHEDIVEQVKKLFTKLSTDPTTTSQLVAREPAIFTGSEVRMLDDDIPLAQFAVAFEGASWKDPDSIPLMVMQAMLGSWNKAAGGGKHMGSELAQRIGINEVAESIMAFNTNYKDTGLFGVYAVAKPDCLDDLSYAIMYETTKLAYRVSEDDVTRARNQLKSSLLLHIDGTSPVAEDIGRQLLTYGRRIPFAELFARIDAVDASTIKRVANRFIYDKDVVIAATGPIQRLPDYNWFRRRTYWNRY

SEQ ID NO: 59348 - protein, 386 aa, Glycine max
  peptide (1)..(386): Ceres Seq. ID no. 14314588
MIFKGTERRNARELEEEIENMGGHLNAYTSREQTTYYAKVTDKDVPQALDILADILQNSRFEETRINRERDVILREMEEVEGQTEEVIFDHLHATAFQYTPLGRTILGPAQNIKTITKAHLQSYIQTHYTAPRMVIAASGAVKHEDIVEQVKKLFTKLSTDPTTTSQLVAREPAIFTGSEVRMLDDDIPLAQFAVAFEGASWKDPDSIPLMVMQAMLGSWNKAAGGGKHMGSELAQRIGINEVAESIMAFNTNYKDTGLFGVYAVAKPDCLDDLSYAIMYETTKLAYRVSEDDVTRARNQLKSSLLLHIDGTSPVAEDIGRQLLTYGRRIPFAELFARIDAVDASTIKRVANRFIYDKDVVIAATGPIQRLPDYNWFRRRTYWNRY

SEQ ID NO: 59349 - DNA, 1257 bp, Glycine max
  misc_feature (1)..(1257): Ceres Seq. ID no. 14314563
attaggggaagcgtggctagcagagactagagagatagaattagaattaaaaagcgtgaaggacagtgataggtttggtttggaaggaagaagaaaatgaaggccatagtgataacgaggccaggaggtcccgaagtgctccaacttgaggaagtggaagatccccaagtcggagacgacgagcttctcatcggagtccacgccacttcccttaacagagccgatacctttcagaggaaaggctcctaccctccccctaagggcgccagcccttacctcggtctcgaatgttccggaactgtcctttccctgggtaaaaacgtttccagctggaaaatcggtgatcaggtgtgtgctcttctcgccggaggcggatatgccgagaaagttgcagttccggtaggacaagttcttccggttccagccggtgtttctctcacggatgcagctagttttcctgaggttgcttgcactgtctggtcaactgttttcatgatgagtcgcttatctcaaggggaaaccttgttggttcatggaggttccagtgggattggtacatttgcaattcagatagccaagtatcgagggtcacgagtgtttgttactgcaggaagtgaggagaagctagctttttgcaagagtatcggagctgatgtgggcatcaattataaaacagaagactttgttgcgcgggtaaaggaagaaactggtggccaaggtgttgatgttattcttgattgtatgggagcatcctactatcaaagaaatcttgatagcttgaattttgatggaaggctttttattattggctttcaaggtggggttagtacacaagcagatctacgccctttacttgctaagcgtctcacagtacaaggagctggtttacgcaatagaagtctggaaaataaagctgtgattgttagtgaagtggagaagaatgtttggcctgcaattgccgaaggaaaggttaagcctgtggtctacaaatctttcccgctttctgaggcagcggaggctcaccagcttatggaaagcagccagcatattgggaagatattgcttttgccatgaaaattgtcgtaaatactgaagttcgtgacatacttctggatcctttgtgtttggacttgtttctttgttaagatctcaggattctaatatggttgcggattaaaataacagctaaaggaattgatatggcaagttcatttaaacaatcacaccgtatttatcaattgatatgattattgaaac

SEQ ID NO: 59350 - protein, 325 aa, Glycine max; identical to SEQ ID NO: 53559
  peptide (1)..(325): Ceres Seq. ID no. 14314564

SEQ ID NO: 59351 - protein, 193 aa, Glycine max; identical to SEQ ID NO: 53560
  peptide (1)..(193): Ceres Seq. ID no. 14314565

SEQ ID NO: 59352 - protein, 192 aa, Glycine max; identical to SEQ ID NO: 53561
  peptide (1)..(192): Ceres Seq. ID no. 14314566

SEQ ID NO: 59353 - DNA, 843 bp, Glycine max
  misc_feature (1)..(843): Ceres Seq. ID no. 14305863
aattggatttgaaattgaagttgaccaagccacttgaggatagctttgcatacttttggtgtttgaagagctcttccatctgccaaaatgaagggacgtgtaagatggaatgaagataatattggagaaattgaagcaaacaagcccatgaggcaaaaaatcactgaacctaagactccatatcatcctatgcttgatgatgacagttctccatcccccgtgctaggagattttgacggatataatggtgataaaaatctctcaccaaatgctgaacaaactggttataataatggggcatattgtagcagcaaaggaactagacaatctgacggctggacatcatctgaggatgaggcagaagaaactgaagaggatgaggaagatagaagtttgagtttcagagagcacagaaaggcccactataatgaattccgcaaagtcaaagagctgcaacaaaaggcttctctggaggatggaagtgatgaggataatcatgctgaggttgccaacggggagaagaaaaatgactcatcttctccaacgaatggtacgtgaaggagaccaacactgagaagaaaaaatgtctcttccaatcaatgcttcctacacgatcaacaaataaaacccactccagtttcatcaacctttgtgtatggcggggatagaaacaacagaaggatttactgtatttattgtgtcttttgtgtgtaaaatatcttttctttttccacctggtatgtacatctgaacttgcatgattcgtgaagtctcttgtaatatgccaaattagattttttttggcaagcaacaaacattccggttataagagtgatgatttcg

SEQ ID NO: 59354 - protein, 156 aa, Glycine max
  peptide (1)..(156): Ceres Seq. ID no. 14305864
MKGRVRWNEDNIGEIEANKPMRQKITEPKTPYHPMLDDDSSPSPVLGDFDGYNGDKNLSPNAEQTGYNNGAYCSSKGTRQSDGWTSSEDEAEETEEDEEDRSLSFREHRKAHYNEFRKVKELQQKASLEDGSDEDNHAEVANGEKKNDSSSPTNGT

SEQ ID NO: 59355 - protein, 136 aa, Glycine max
  peptide (1)..(136): Ceres Seq. ID no. 14305865
MRQKITEPKTPYHPMLDDDSSPSPVLGDFDGYNGDKNLSPNAEQTGYNNGAYCSSKGTRQSDGWTSSEDEAEETEEDEEDRSLSFREHRKAHYNEFRKVKELQQKASLEDGSDEDNHAEVANGEKKNDSSSPTNGT

SEQ ID NO: 59356 - protein, 122 aa, Glycine max
  peptide (1)..(122): Ceres Seq. ID no. 14305866
MLDDDSSPSPVLGDFDGYNGDKNLSPNAEQTGYNNGAYCSSKGTRQSDGWTSSEDEAEETEEDEEDRSLSFREHRKAHYNEFRKVKELQQKASLEDGSDEDNHAEVANGEKKNDSSSPTNGT

SEQ ID NO: 59357 - DNA, 894 bp, Glycine max
  misc_feature (1)..(894): Ceres Seq. ID no. 14305843
aaaaaacacacttctataatggatcggaaaagcctcctctccctcgcaatcatcgccattgtcgtcgccgccgtcggaggacagtctccagcggcgtcgcccaccacttctcctccggctgccaccaccactccctttgcatccccagccacagccccttctaagccaaaatcaccggcgccagttgcttctcccacgtcatcatctccaccagcttcgtcccccaatgctgcaaccgcaaccccacccgcttcatctcccacagtagcatctcctccgtctaaagctgccgctccagctccggtggctacacctcccgcagccactcctcctgcggctacaccaccggcagccacacctcctgccgtgactccagtgagttcgccgccagcgccagttccggtgagttctccacctgctcctgttccggtgagctctccacctgcactcgcaccgacaactcccgcacccgtggtagcacccagcgctgaggttccggcacccgctcccaagtcaaagaagaagacaaagaagagtaagaagcacactgcaccagcaccgtcgccgtcattgcttggccctcccgctcctccggtaggagctccgggatcaagccaggattccatgtctcctggtccagctgtatctgaggacgagagtggagctgaaaccatcaggtgcttgaagaaggtcattggatgcttagccttgagctgggctacccttgttttgttcttctagagaagaggctgaggcttcattgctgctgttacatagtattattgtatcatttattgtcttttttggaccctgtcggggggctaaaattaaatttattaccattgttttcttcaatctcttattactttataattgatgatgtttgttgacact

SEQ ID NO: 59358 - protein, 246 aa, Glycine max
  peptide (1)..(246): Ceres Seq. ID no. 14305844
KKHTSIMDRKSLLSLAIIAIVVAAVGGQSPAASPTTSPPAATTTPFASPATAPSKPKSPAPVASPTSSSPPASSPNAATATPPASSPTVASPPSKAAAPAPVATPPAATPPAATPPAATPPAVTPVSSPPAPVPVSSPPAPVPVSSPPALAPTTPAPVVAPSAEVPAPAPKSKKKTKKSKKHTAPAPSPSLLGPPAPPVGAPGSSQDSMSPGPAVSEDESGAETIRCLKKVIGCLALSWATLVLFF

SEQ ID NO: 59359 - protein, 240 aa, Glycine max
  peptide (1)..(240): Ceres Seq. ID no. 14305845
MDRKSLLSLAIIAIVVAAVGGQSPAASPTTSPPAATTTPFASPATAPSKPKSPAPVASPTSSSPPASSPNAATATPPASSPTVASPPSKAAAPAPVATPPAATPPAATPPAATPPAVTPVSSPPAPVPVSSPPAPVPVSSPPALAPTTPAPVVAPSAEVPAPAPKSKKKTKKSKKHTAPAPSPSLLGPPAPPVGAPGSSQDSMSPGPAVSEDESGAETIRCLKKVIGCLALSWATLVLFF

SEQ ID NO: 59360 - DNA, 1360 bp, Glycine max
  misc_feature (1)..(1360): Ceres Seq. ID no. 14314571
agtgatatgatcatacccaaaattaaaccttgtttattgttattccttgatgctatacctctctctaattgcgtttctttttctttcttttcaagccaattaatccttaaaaaacaccgatcgatctgaagcagctagctagccccatcccatcttatatttcatatttgtcaatttggtcatggagaccaacactagtgcattcacaaatgtgaacagcacttggaatcttgaaaagatggaaacaaatgaacaacaaaatgatgaacataatattattctccaagtccaagaccctatgggttctgggatttggcccagcaacaactaccacaaccttcttcaaatgcatcaaacacccaacacaacaaccttatccatcatagcaccaccaccctcctcatcagggttccttggagacatactgggtgttcacaacctagaagaagatgaagagccagaagaagagctaggtgccatgaaggagatgatgtacaagatcgctgctatgcaacccgtggacatcgaccccgccacgattcgaaaaccaaagagaagaaatgttcgcatcagtgatgaccctcagagtgtggctgcacgccacaggagagagaggatcagcgagaaaatccgcatcctccagagactcgttcccgggggaaccaaaatggacaccgcttcaatgcttgatgaagccattcgctatgttaagttcttgaagagacaaataaggttgcttcaatctattcctcaatcttcaaatccaccacaatgcattggtgttgctactacttctcatcatgctagtaccttgttgttagccccttcctgtgattggccttttgcaccaaatgttcttcccagttccaccgccgccaccgcctcaatggacatgtcggccggactgggattcgacgtcggccatgctcatgcttgtgatggctcctccagctttaaccatcatgaggtaatcagtgaataattagtggttataggttataattaattgtattgctttgtatgtgtatgtatatggaattgaggagtgcttggttagtattagtgtatgtgtatgtgtatgttgatgactgttttgagcttggggaaaatcaaggaaaaaagaatagagtaataatttaggggaggggagaaaggtttgttaggatattgttgactaaaggcttctgtagaataatcataacggttggcttggttacgtacacagccatatagaataatgtgtatgccagtttcggtgttggccggaaagtttgtttggtcgagtctcttcctggaataacttccactgtgacgttataacctagtattgaataatgaacaatattattgatttgtggcc

SEQ ID NO: 59361 - protein, 266 aa, Glycine max
  peptide (1)..(266): Ceres Seq. ID no. 14314572
METNTSAFTNVNSTWNLEKMETNEQQNDEHNIILQVQDPMGSGIWPSNNYHNLLQMHQTPNTTTLSIIAPPPSSSGFLGDILGVHNLEEDEEPEEELGAMKEMMYKIAAMQPVDIDPATIRKPKRRNVRISDDPQSVAARHRRERISEKIRILQRLVPGGTKMDTASMLDEAIRYVKFLKRQIRLLQSIPQSSNPPQCIGVATTSHHASTLLLAPSCDWPFAPNVLPSSTAATASMDMSAGLGFDVGHAHACDGSSSFNHHEVISE

SEQ ID NO: 59362 - protein, 247 aa, Glycine max
  peptide (1)..(247): Ceres Seq. ID no. 14314573
METNEQQNDEHNIILQVQDPMGSGIWPSNNYHNLLQMHQTPNTTTLSIIAPPPSSSGFLGDILGVHNLEEDEEPEEELGAMKEMMYKIAAMQPVDIDPATIRKPKRRNVRISDDPQSVAARHRRERISEKIRILQRLVPGGTKMDTASMLDEAIRYVKFLKRQIRLLQSIPQSSNPPQCIGVATTSHHASTLLLAPSCDWPFAPNVLPSSTAATASMDMSAGLGFDVGHAHACDGSSSFNHHEVISE

SEQ ID NO: 59363 - protein, 227 aa, Glycine max
  peptide (1)..(227): Ceres Seq. ID no. 14314574
MGSGIWPSNNYHNLLQMHQTPNTTTLSIIAPPPSSSGFLGDILGVHNLEEDEEPEEELGAMKEMMYKIAAMQPVDIDPATIRKPKRRNVRISDDPQSVAARHRRERISEKIRILQRLVPGGTKMDTASMLDEAIRYVKFLKRQIRLLQSIPQSSNPPQCIGVATTSHHASTLLLAPSCDWPFAPNVLPSSTAATASMDMSAGLGFDVGHAHACDGSSSFNHHEVISE

SEQ ID NO: 59364 - DNA, 985 bp, Glycine max
  misc_feature (1)..(985): Ceres Seq. ID no. 15177289
attattcctcttccatctctattctccataacacccaccacaccacttgtgaaaaacctcattaatatcacacactgacatgtatctctgagctccaatccaatacaagaccacaccttgtcgtgtcggacgaaccttggtgtctgtttttttttttttttcattattttctccgaagagatgaggaagggcagaggtggaggcgcctcggcggcggcggtggatgtgaacggatccattttaaaggagcctcggtaccggggcgtgaggaagagaccgtgggggagattcgccgcggagatcagagacccgttgaagaaagccagggtttggttgggaaccttcgattctgccgaggatgctgctcgtgcctacgacgccgccgctcggactctccgaggtcccaaggccaaaacaaatttcccccctctctcacctttttgctatccacaccccaccaccgatcctttcttctacactggtttccacgatcaacaccaccaccacaacaacaacaaccttaacaaccctcaaagacccacttcaagtggcatgagtagcaccgttgagtccttcagtgggccccgccctcccaccaccaccactaccaccacaaccacaactgcgacgccgtttttgactgctacgcggagatacccgcgcactccccctcttgtccctgaagactgccacagtgactgcgactcttcctcctccgtcgttgacgacggcgacgacaacatcgtttcgtcgtcgtttcgacctcccttgccgtttgatctcaacgcgctgccgtttgatgatgctgccgcggatgatgatctacgccgcaccgcgctttgtctctgatgatgattatcgtgcgatgatgatttttaatttctcatttttttacttgatttttttgttattgctatgcagaagaaatatatatttaaaatgatgatcagatgtaagattatggtaatatgatcttaattctgtg

SEQ ID NO: 59365 - protein, 222 aa, Glycine max
  peptide (1)..(222): Ceres Seq. ID no. 15177290
MRKGRGGGASAAAVDVNGSILKEPRYRGVRKRPWGRFAAEIRDPLKKARVWLGTFDSAEDAARAYDAAARTLRGPKAKTNFPPLSPFCYPHPTTDPFFYTGFHDQHHHHNNNNLNNPQRPTSSGMSSTVESFSGPRPPTTTTTTTTTTATPFLTATRRYPRTPPLVPEDCHSDCDSSSSVVDDGDDNIVSSSFRPPLPFDLNALPFDDAAADDDLRRTALCL

SEQ ID NO: 59366 - DNA, 1037 bp, Glycine max
  misc_feature (1)..(1037): Ceres Seq. ID no. 15171216
atataaaatttggtgcctcgccttacctcactttccgaccacaaccatgtcagcgttcatttcccacaaccttaaacccggcggcatcatggtgtccccttctctgcaccaccgttcctcattccctttgcaactttctttgaaagcacccttctctgcttcccatcctttagtcctcacccgaagactcttccttccttcggtttccggcatctgggacgctctcaccggcggcaacaacaacaatgcccgcgaagccgttctcgcaattcgacgcggaatgcttcttttccgccagggtgatgtttcggggtctcttgcggagtttgacaaggcaattcagttggaccctcgtcaaaaggcgtatctttggcaaaggggcttatcactttactaccttaatcgatttgaagaggcagctgagcagtttcggttagatgttgcccaaaatccaaatgacactgaagagtccatatggtgctttctgtgtgaagctcaactgtttggagtggatgaagcaaggaagcgatatcttgaggttggcagagacccaaggccagtcatgcgggaagcatataacatgtttaaagatggtggggatccagaaaagcttgtagctgcattctctggtagcagagaaggtgaatatttttatgcttcattatatgctgggctttattacgaatctcagaacggaacagatgctgctaaagttcatatagttgctgcatgccagtctccttatgggcaaaggtctgatgattatatggcctctcttgccaaggttcactgtcgctgtcgaaattgggtcttcaactaaaacttttttcagtgtgtccattgtgcacgacgaagctcattcataagtttctctatacactactcacagcttcttgtgagttactgtgctactggaacggttaaaagaatttatcatattccttttttccttaaccttttcactttgattttgtggtctatatgaatattagtagactggtagaaagtttttaaacatgagatttcttttaacagtg

SEQ ID NO: 59367 - protein, 272 aa, Glycine max
  peptide (1)..(272): Ceres Seq. ID no. 15171217
YKIWCLALPHFPTTTMSAFISHNLKPGGIMVSPSLHHRSSFPLQLSLKAPFSASHPLVLTRRLFLPSVSGIWDALTGGNNNNAREAVLAIRRGMLLFRQGDVSGSLAEFDKAIQLDPRQKAYLWQRGLSLYYLNRFEEAAEQFRLDVAQNPNDTEESIWCFLCEAQLFGVDEARKRYLEVGRDPRPVMREAYNMFKDGGDPEKLVAAFSGSREGEYFYASLYAGLYYESQNGTDAAKVHIVAACQSPYGQRSDDYMASLAKVHCRCRNWVFN

SEQ ID NO: 59368 - protein, 257 aa, Glycine max
  peptide (1)..(257): Ceres Seq. ID no. 15171218
MSAFISHNLKPGGIMVSPSLHHRSSFPLQLSLKAPFSASHPLVLTRRLFLPSVSGIWDALTGGNNNNAREAVLAIRRGMLLFRQGDVSGSLAEFDKAIQLDPRQKAYLWQRGLSLYYLNRFEEAAEQFRLDVAQNPNDTEESIWCFLCEAQLFGVDEARKRYLEVGRDPRPVMREAYNMFKDGGDPEKLVAAFSGSREGEYFYASLYAGLYYESQNGTDAAKVHIVAACQSPYGQRSDDYMASLAKVHCRCRNWVFN

SEQ ID NO: 59369 - protein, 243 aa, Glycine max
  peptide (1)..(243): Ceres Seq. ID no. 15171219
MVSPSLHHRSSFPLQLSLKAPFSASHPLVLTRRLFLPSVSGIWDALTGGNNNNAREAVLAIRRGMLLFRQGDVSGSLAEFDKAIQLDPRQKAYLWQRGLSLYYLNRFEEAAEQFRLDVAQNPNDTEESIWCFLCEAQLFGVDEARKRYLEVGRDPRPVMREAYNMFKDGGDPEKLVAAFSGSREGEYFYASLYAGLYYESQNGTDAAKVHIVAACQSPYGQRSDDYMASLAKVHCRCRNWVFN

SEQ ID NO: 59370 - DNA, 1627 bp, Glycine max
  misc_feature (1)..(1627): Ceres Seq. ID no. 15171193
tccttccattcttcctttcttctttctgcgcaacccaaaaccctagattcgtaactgtaccacgtcctcgtcccaatcaagtgaaagctcgatggctgaaatggaccagaacacgggcggtgagcatgaggcggaggaaacgattgagattgaggcggaagtgcacggtggtgaagaggcggttgttgcggagaagaagtggccggggtggcccggggagagtgtgtttcggatgttagttcctgcgcagaaggttgggggtatcattggacgcaaaggagagttcatcaagaaaattgtcgaggagacacgagctcgagttaaaattcttgatggtcctccgggaactgtgcaaagggctgtaatgatatcagctaaagaggaacctggttcctctgttcctcctgctgtggatggcttattaaggattcataaacggattattgatggtttagagagtgattttacccatgctccttcaggtgtggccgggaaggtttctacaaaacttctagtgccagcctcacaagcaggaagtttgattgggaagcaaggaggaactgtaaaatctatccaagaagcatccaattgtattgttagagttcttggagcagaagacctccctatttttgcccttcaagatgacagggtggttgaagtagttggggatcccgctggagtgcataaggcattagagttaattgcctcccacctaaggaagtttttagttgatcgcggtgtaattccaatttttgaaatgaatatgcaaacagccaatccccaccatgcagagcacatgccaccccaccaatcttggggaccacctcagggtcttcctccaaatgttggtggaggtcctggttttggacctccttctcaatacatgccacctccacgacaacttgatagttattatccatcagctgaaatgcctcctccagtggacagacagccccatcaaggtatatctgcttatggaagagatgcttcaataggtgttcatgcatcttcaaatactcaatctgcaccttccatagtcacacagatcacgcagcaaatgcaaattcctctatcttatgctgatgctgttattggaacagctggagcaagtataagctacatcagacgagctagtggggctactgttaccatacaagaagcaagaggtgttcctggggagatgacagttgaaatcagtggaactgcttctcaagtccaaacagcacagcaactaatacagaattttatggctgaagctgcagctgcagctgcagcaccagcacagccgcaaacaactgtgcctgctgcagaccaaggatacaattcttaccctgcccatggttctgtctatgcctctcctccttccaatcctggacatgctggaggctatggctcagtttatggtgcaaactatgggtactaagctgggcagagcaactaatgctgctattattgaaatttataatgctgggaacagaattaatgtaataatttaagaaattttagattattgtccgacttttgtgttctgttatactcctagtcatttggaaaggtaaaacatactattcgtggccttctgatgtatcatgtacttgttctatgattctatctaattggtgcacct

SEQ ID NO: 59371 - protein, 443 aa, Glycine max
  peptide (1)..(443): Ceres Seq. ID no. 15171194
MAEMDQNTGGEHEAEETIEIEAEVHGGEEAVVAEKKWPGWPGESVFRMLVPAQKVGGIIGRKGEFIKKIVEETRARVKILDGPPGTVQRAVMISAKEEPGSSVPPAVDGLLRIHKRIIDGLESDFTHAPSGVAGKVSTKLLVPASQAGSLIGKQGGTVKSIQEASNCIVRVLGAEDLPIFALQDDRVVEVVGDPAGVHKALELIASHLRKFLVDRGVIPIFEMNMQTANPHHAEHMPPHQSWGPPQGLPPNVGGGPGFGPPSQYMPPPRQLDSYYPSAEMPPPVDRQPHQGISAYGRDASIGVHASSNTQSAPSIVTQITQQMQIPLSYADAVIGTAGASISYIRRASGATVTIQEARGVPGEMTVEISGTASQVQTAQQLIQNFMAEAAAAAAAPAQPQTTVPAADQGYNSYPAHGSVYASPPSNPGHAGGYGSVYGANYGY

SEQ ID NO: 59372 - protein, 440 aa, Glycine max
  peptide (1)..(440): Ceres Seq. ID no. 15171195
MDQNTGGEHEAEETIEIEAEVHGGEEAVVAEKKWPGWPGESVFRMLVPAQKVGGIIGRKGEFIKKIVEETRARVKILDGPPGTVQRAVMISAKEEPGSSVPPAVDGLLRIHKRIIDGLESDFTHAPSGVAGKVSTKLLVPASQAGSLIGKQGGTVKSIQEASNCIVRVLGAEDLPIFALQDDRVVEVVGDPAGVHKALELIASHLRKFLVDRGVIPIFEMNMQTANPHHAEHMPPHQSWGPPQGLPPNVGGGPGFGPPSQYMPPPRQLDSYYPSAEMPPPVDRQPHQGISAYGRDASIGVHASSNTQSAPSIVTQITQQMQIPLSYADAVIGTAGASISYIRRASGATVTIQEARGVPGEMTVEISGTASQVQTAQQLIQNFMAEAAAAAAAPAQPQTTVPAADQGYNSYPAHGSVYASPPSNPGHAGGYGSVYGANYGY

SEQ ID NO: 59373 - protein, 396 aa, Glycine max
  peptide (1)..(396): Ceres Seq. ID no. 15171196
MLVPAQKVGGIIGRKGEFIKKIVEETRARVKILDGPPGTVQRAVMISAKEEPGSSVPPAVDGLLRIHKRIIDGLESDFTHAPSGVAGKVSTKLLVPASQAGSLIGKQGGTVKSIQEASNCIVRVLGAEDLPIFALQDDRVVEVVGDPAGVHKALELIASHLRKFLVDRGVIPIFEMNMQTANPHHAEHMPPHQSWGPPQGLPPNVGGGPGFGPPSQYMPPPRQLDSYYPSAEMPPPVDRQPHQGISAYGRDASIGVHASSNTQSAPSIVTQITQQMQIPLSYADAVIGTAGASISYIRRASGATVTIQEARGVPGEMTVEISGTASQVQTAQQLIQNFMAEAAAAAAAPAQPQTTVPAADQGYNSYPAHGSVYASPPSNPGHAGGYGSVYGANYGY

SEQ ID NO: 59374 - DNA, 1159 bp, Glycine max
  misc_feature (1)..(1159): Ceres Seq. ID no. 14314430
gagagtcacctctcaaattgaattcctagctagtacttaacataatgcagtgagattcacactcccaacgcttcctctttctcccttaaatatcttcattcatctcaacaccaccaccacttccccacttttgttactcagtatgcttggagcccttctcctcaacgccaacttcaagattcatttctcactcatatcatgccaagcccgtgtccccttacccgtcaagcccgcaccgctcagaatgccctctccccactacccccactgggcctccttgcaggccgacattgaagcccacctcaaacaaaccattcccctcaaagaacccctcgaggtcttcgagcccatgctccacctcgccttctccgccccccggaccaccgtcccggccctatgcctcgccgcctgcgagcttgtcggcggtcaccgccaacaagccatggccgcggcatcggccttgttactcaacctcgccaatgcacacgcccatgaacacctaaccgacgggcccatgtacggccccaacatagaactcctcaccggggacgggattgttccgttcgggtttgagttgctggcgaggcccgacgggccagcaagtgcgagcccggagcgagtcctacgtgtgatgattgagatatcacgtgcggtgggttcggtggggttgcaagacgcgcagtacgtgaagaaaacgttgtgggacggtggtgaggaggtgcaaaacgtggaaagcatgcagcgctttgtattggagaaaagggacggtgggttgcatgcatgtggggctgcgtctggtgccatcttgggaggtgggagtgaggaccaaattgaaaggttgagaaattttggatttcatgtggggatgatgaggggaatgctacaaatggggttcatggaaaaacatgtgcaagaggagagacatcttgcactcaaggaactgcaatttttcatggacagagatgttcatgttatttctagttttatttattaatttctagccacttttaagttttctatatatctggaatctcaagtgggttgttgtccatcttcatatgtacggaacatgatcaactgtgcggttcatagacaataattgcacgatcatgtgtttcaaattaaatctgatggtatatatagcagaagtttttaactt

SEQ ID NO: 59375 - protein, 283 aa, Glycine max
  peptide (1)..(283): Ceres Seq. ID no. 14314431
MLGALLLNANFKIHFSLISCQARVPLPVKPAPLRMPSPHYPHWASLQADIEAHLKQTIPLKEPLEVFEPMLHLAFSAPRTTVPALCLAACELVGGHRQQAMAAASALLLNLANAHAHEHLTDGPMYGPNIELLTGDGIVPFGFELLARPDGPASASPERVLRVMIEISRAVGSVGLQDAQYVKKTLWDGGEEVQNVESMQRFVLEKRDGGLHACGAASGAILGGGSEDQIERLRNFGFHVGMMRGMLQMGFMEKHVQEERHLALKELQFFMDRDVHVISSFIY

SEQ ID NO: 59376 - protein, 249 aa, Glycine max
  peptide (1)..(249): Ceres Seq. ID no. 14314432
MPSPHYPHWASLQADIEAHLKQTIPLKEPLEVFEPMLHLAFSAPRTTVPALCLAACELVGGHRQQAMAAASALLLNLANAHAHEHLTDGPMYGPNIELLTGDGIVPFGFELLARPDGPASASPERVLRVMIEISRAVGSVGLQDAQYVKKTLWDGGEEVQNVESMQRFVLEKRDGGLHACGAASGAILGGGSEDQIERLRNFGFHVGMMRGMLQMGFMEKHVQEERHLALKELQFFMDRDVHVISSFIY

SEQ ID NO: 59377 - protein, 214 aa, Glycine max
  peptide (1)..(214): Ceres Seq. ID no. 14314433
MLHLAFSAPRTTVPALCLAACELVGGHRQQAMAAASALLLNLANAHAHEHLTDGPMYGPNIELLTGDGIVPFGFELLARPDGPASASPERVLRVMIEISRAVGSVGLQDAQYVKKTLWDGGEEVQNVESMQRFVLEKRDGGLHACGAASGAILGGGSEDQIERLRNFGFHVGMMRGMLQMGFMEKHVQEERHLALKELQFFMDRDVHVISSFIY

SEQ ID NO: 59378 - DNA, 1431 bp, Glycine max
  misc_feature (1)..(1431): Ceres Seq. ID no. 14303446
gcgcagtgaagaagaagaagaagaagaagaagaagaagaagaagagatgagcgtggaagatcttcctgggaaagaggtaaacgtgctgaagggtcacgagggtggcgtgttagccgcgaggttcaacggcgatggcaattatgttctgagttgcggcaaagaccgtaccatacgcctttggaatcctcaccgtggcatccatatcaagacctataaatcccacgctcgcgaagtccgcgatgtccacgtcacacaggacaactccaagctatgttcctgtggtggagatcgacaaatattttattgggacgttgcaactggacgtgtaattaggaaatttcgtggccatgatggtgaggtaaatggtgtcaaattcaatgagtattcatctgttgtagtctctgctggctatgatcaatcattgcgtgcttgggactgcagatcccacagcacagagccaattcagattattgacacatttgcggatagtgtgatgtctgtttgtttaacaaaaactgaaattattggaggaagtgttgatggaactgttcgaacatttgacattcgtattggcagagaaacatctgataatttagggcaacctgtcaactgtgtatcaatgtcaaatgatggtaactgcattctagccggttgcttagactctacattgcgtcttttggacaggtcgacaggtgaactgttacaagaatataaaggacacactaataagtcttacaaattggattgctgccttaccaatacggatgctcatgtaactggtgtctctgaggatggcttcatttatttctgggatcttgtagatgcatctgttgtttcaagattcaaggctcatacctcagtggtaacaagtgttagttatcatccaaaggaaaactgcatggtaacttcttctgtggatggcaccattagagtatggaagacataagaacgaaatgcaaacactaagcttctatggtgtgtccacgcggtccatagcaataccaattaggataatgatgattacatgtccgattgcgtttggagttcacggacacgatgttacttccaagttatttataattcttcggcagattttgacctataatatgtgcttttcatgtggaagatggtaaacgcaaggtgagttagttggttgcagcatctatacggtcaaatctcacacattttttgactttttgtctccaaaagggatagggtattgtattattcacttgtgtccataaaaggaaaatgatttgtatactatccgttattttgtgaaaatgaggttgtattgtatccgttttggagtttttgatcttgggttttttttactggtatagttggaaaactagtggctgcgatgctcttatgtagttacaaatctatgctgtgattcaatccatggctggtgtttttccagtgatctag

SEQ ID NO: 59379 - protein, 314 aa, Glycine max
  peptide (1)..(314): Ceres Seq. ID no. 14303447
RSEEEEEEEEEEEEEMSVEDLPGKEVNVLKGHEGGVLAARFNGDGNYVLSCGKDRTIRLWNPHRGIHIKTYKSHAREVRDVHVTQDNSKLCSCGGDRQIFYWDVATGRVIRKFRGHDGEVNGVKFNEYSSVVVSAGYDQSLRAWDCRSHSTEPIQIIDTFADSVMSVCLTKTEIIGGSVDGTVRTFDIRIGRETSDNLGQPVNCVSMSNDGNCILAGCLDSTLRLLDRSTGELLQEYKGHTNKSYKLDCCLTNTDAHVTGVSEDGFIYFWDLVDASVVSRFKAHTSVVTSVSYHPKENCMVTSSVDGTIRVWKT

SEQ ID NO: 59380 - protein, 299 aa, Glycine max
  peptide (1)..(299): Ceres Seq. ID no. 14303448
MSVEDLPGKEVNVLKGHEGGVLAARFNGDGNYVLSCGKDRTIRLWNPHRGIHIKTYKSHAREVRDVHVTQDNSKLCSCGGDRQIFYWDVATGRVIRKFRGHDGEVNGVKFNEYSSVVVSAGYDQSLRAWDCRSHSTEPIQIIDTFADSVMSVCLTKTEIIGGSVDGTVRTFDIRIGRETSDNLGQPVNCVSMSNDGNCILAGCLDSTLRLLDRSTGELLQEYKGHTNKSYKLDCCLTNTDAHVTGVSEDGFIYFWDLVDASVVSRFKAHTSVVTSVSYHPKENCMVTSSVDGTIRVWKT

SEQ ID NO: 59381 - DNA, 1346 bp, Glycine max
  misc_feature (1)..(1346): Ceres Seq. ID no. 15175861
gaaaagctaagagtctaagcagatgagtctcaatgtggatgaagatttagtgactgaaatggaggaagcacccactttagctccatctataccattagaaaatgttcaagaaatggtaaggaatgatccttttcatgtgcctataggatatgtgacgagtcaagaagaattggagaaagccaattatatgcctcacctttcatctgagatccctgtcattgatttagcattgctctcaaatggaaacaaggaggagttgttaaaatttgacgtagcatgcaaggagtggggtttctttcaggtaatgctagaaatataatataaaactttttcatgtatctttacaaaaaaacttgagctttggggctacgtaattagtccatggcattgacatatatccatgcaaaaacgagatatttgcttggttttcatcaaatattaatattgcttgaaattgcaattaacatttgcttgtagatagtaaatcatggtgttcaaacagagcttatgcagaaaatgaaggatgcagcatctgagtttttcaatcttccaatagaagagaagaacaagtatgcaatggtttcaagtgagacacaaggttatgggaagggttgtgtagtttctggagagcagacacttgactggtcagattcactaatattaatcacataccccacccagtacagaaagcttcaattttggcctaaaactccagagggattcatggagataatagaggcttatgcaagtgaagttagacgagttggggaggaactgcttagttcaatgtcagtgattatgggaatgcggaagcatgttctttttggactacataaagaatcgtatcaagttttacgactgaactattatcctccttgcagcacacctgaacaagtgcagggtttgagtccacattctgacacaagcagcatcaccttgcttatgcaagacgatgatgtaactggcttagaaattcgacaccaaggaggatgggtgccagtgaacccaataccagatgctctagttgtcaatgttggagatgtaactgagatatggagtaatggcaaatacaagagtgtagaacacagagcaatgacaaataagaacaaggaaaggatttcttatggattatttttgtgcccacagcatgacgtggaagttgagccacttgatcatatgatagattctcataaccccaagttgtttcagaaagtaaggtatggagattatttgagacaatctctgaaaaggaagttggagggaaaaacacacctaaatgaggcaaagttaaaggagtctgatctaaggaatcaagatgattaagaaaagcaaaggcccagtaagag

SEQ ID NO: 59382 - protein, 271 aa, Glycine max
  peptide (1)..(271): Ceres Seq. ID no. 15175862
MQKMKDAASEFFNLPIEEKNKYAMVSSETQGYGKGCVVSGEQTLDWSDSLILITYPTQYRKLQFWPKTPEGFMEIIEAYASEVRRVGEELLSSMSVIMGMRKHVLFGLHKESYQVLRLNYYPPCSTPEQVQGLSPHSDTSSITLLMQDDDVTGLEIRHQGGWVPVNPIPDALVVNVGDVTEIWSNGKYKSVEHRAMTNKNKERISYGLFLCPQHDVEVEPLDHMIDSHNPKLFQKVRYGDYLRQSLKRKLEGKTHLNEAKLKESDLRNQDD

SEQ ID NO: 59383 - protein, 268 aa, Glycine max
  peptide (1)..(268): Ceres Seq. ID no. 15175863
MKDAASEFFNLPIEEKNKYAMVSSETQGYGKGCVVSGEQTLDWSDSLILITYPTQYRKLQFWPKTPEGFMEIIEAYASEVRRVGEELLSSMSVIMGMRKHVLFGLHKESYQVLRLNYYPPCSTPEQVQGLSPHSDTSSITLLMQDDDVTGLEIRHQGGWVPVNPIPDALVVNVGDVTEIWSNGKYKSVEHRAMTNKNKERISYGLFLCPQHDVEVEPLDHMIDSHNPKLFQKVRYGDYLRQSLKRKLEGKTHLNEAKLKESDLRNQDD

SEQ ID NO: 59384 - protein, 248 aa, Glycine max
  peptide (1)..(248): Ceres Seq. ID no. 15175864
MVSSETQGYGKGCVVSGEQTLDWSDSLILITYPTQYRKLQFWPKTPEGFMEIIEAYASEVRRVGEELLSSMSVIMGMRKHVLFGLHKESYQVLRLNYYPPCSTPEQVQGLSPHSDTSSITLLMQDDDVTGLEIRHQGGWVPVNPIPDALVVNVGDVTEIWSNGKYKSVEHRAMTNKNKERISYGLFLCPQHDVEVEPLDHMIDSHNPKLFQKVRYGDYLRQSLKRKLEGKTHLNEAKLKESDLRNQDD

SEQ ID NO: 59385 - DNA, 1469 bp, Glycine max
  misc_feature (1)..(1469): Ceres Seq. ID no. 14312320
ggccgaaggtttatttaagtttcgttttcggttgttcttcttcgcagtctctcaagcagccagcatttattctctcaccacttcaccatccagatccagatcaaatggcagccatggctatgttgcgtttatcaccactctctggtcaaaaccatgcactttctttcccatcatcaccatcaccaccacctaagcttcagaaccgtcctctgtatctcaccaatttgcctcatttgccccaaaggttgaaactttccttcgccggcggcgacggcggagatggggtgggacgtggtggcggtggcggtggcggaggtgaaagctggggtgatgaaggaaaacccaaagattcatcttttggaattttgggtctttttctgaacggttggagatcaagggttgccgctgatccacaattccctttcaaggttttgatggaggagttggtgggtgtgagtgcttgtgtattaggtgacatggcttcaaggcctaattttgggttgaatgaacttgactttgtcttttcaactttggtggttggggcaatcctcaatttcactctcatgtatctattggcacctaccatgacatcatcagcagcatcaaatctacccgccctatttgcttcatgccccaagagtcacatgtttgagcctggtgccttttctcttttggataggttaggaaccttggtgtacaaagggaccattttttctgttgttggctttggtgctggattagttggaaccacactttcaaatgggctgatcaagatgaggaagaagatggatccaacctttgagaccccaaacaagcctccaccaacctttttgaatgctctaacttgggctggtcacatgggggttagcagcaatttgaggtaccagactctgaatggagttgagttcatgttggagagggtgcttaaccccttggctttcaagtcctcagtgttggtgctgaggtgtgtgaacaatgttattgggggcatgtcttttgtggtgctggcaaggttgactggggcacagagtgttggaggggagcagaagaaggagaatgaggttgctttgattgctgagaaggagaagttggagtcagagagggaagaagggttgcagaataatcagtcgacagcaccatcaaagtgatggcatcactcactttggcttgtttcagagaggtttgtcttttactttgaccagggttgttgttggggttggagaagctaaggtttttttttttatgaaaatgtgtcctaaggtcatatgatatgagtctctggcagcaccaaataagtgaaaagggtagattgagatttgagacctagtttgtgacatttgctgcttgtatgtatgttgctgaaacctgttacctgaaacaacaataacacgccaaattagtccggccatgtattggcccccccctcccccttttataaacaaaaaatatttaggccatgcggatttttt

SEQ ID NO: 59386 - protein, 381 aa, Glycine max
  peptide (1)..(381): Ceres Seq. ID no. 14312321
PKVYLSFVFGCSSSQSLKQPAFILSPLHHPDPDQMAAMAMLRLSPLSGQNHALSFPSSPSPPPKLQNRPLYLTNLPHLPQRLKLSFAGGDGGDGVGRGGGGGGGGESWGDEGKPKDSSFGILGLFLNGWRSRVAADPQFPFKVLMEELVGVSACVLGDMASRPNFGLNELDFVFSTLVVGAILNFTLMYLLAPTMTSSAASNLPALFASCPKSHMFEPGAFSLLDRLGTLVYKGTIFSVVGFGAGLVGTTLSNGLIKMRKKMDPTFETPNKPPPTFLNALTWAGHMGVSSNLRYQTLNGVEFMLERVLNPLAFKSSVLVLRCVNNVIGGMSFVVLARLTGAQSVGGEQKKENEVALIAEKEKLESEREEGLQNNQSTAPSK

SEQ ID NO: 59387 - protein, 347 aa, Glycine max
  peptide (1)..(347): Ceres Seq. ID no. 14312322
MAAMAMLRLSPLSGQNHALSFPSSPSPPPKLQNRPLYLTNLPHLPQRLKLSFAGGDGGDGVGRGGGGGGGGESWGDEGKPKDSSFGILGLFLNGWRSRVAADPQFPFKVLMEELVGVSACVLGDMASRPNFGLNELDFVFSTLVVGAILNFTLMYLLAPTMTSSAASNLPALFASCPKSHMFEPGAFSLLDRLGTLVYKGTIFSVVGFGAGLVGTTLSNGLIKMRKKMDPTFETPNKPPPTFLNALTWAGHMGVSSNLRYQTLNGVEFMLERVLNPLAFKSSVLVLRCVNNVIGGMSFVVLARLTGAQSVGGEQKKENEVALIAEKEKLESEREEGLQNNQSTAPSK

SEQ ID NO: 59388 - protein, 344 aa, Glycine max
  peptide (1)..(344): Ceres Seq. ID no. 14312323
MAMLRLSPLSGQNHALSFPSSPSPPPKLQNRPLYLTNLPHLPQRLKLSFAGGDGGDGVGRGGGGGGGGESWGDEGKPKDSSFGILGLFLNGWRSRVAADPQFPFKVLMEELVGVSACVLGDMASRPNFGLNELDFVFSTLVVGAILNFTLMYLLAPTMTSSAASNLPALFASCPKSHMFEPGAFSLLDRLGTLVYKGTIFSVVGFGAGLVGTTLSNGLIKMRKKMDPTFETPNKPPPTFLNALTWAGHMGVSSNLRYQTLNGVEFMLERVLNPLAFKSSVLVLRCVNNVIGGMSFVVLARLTGAQSVGGEQKKENEVALIAEKEKLESEREEGLQNNQSTAPSK

SEQ ID NO: 59389 - DNA, 1293 bp, Glycine max
  misc_feature (1)..(1293): Ceres Seq. ID no. 15177126
ttcttgccctcggaacattcaagagacaacaaggatcatcatgccaaaatgtgtttatatcatcacatgccaacatatccctctttgtcctcttcttgttcccctctgtgttcttcttcgtcttcttcttcttctccagctgcaccctacttcgccgctgctgccgcggcgtatagggctgccacggccacaaggtttaatggaatttccggggaggctttcaaatctcatcatccattgcaccaccatcactcatcatcaccacactatggggttggacttggaccctctcatgagacctctgcagggttgatgagatcaaggtttttgccaaagttgccagcaaagaggagcatgagagcaccgagaatgcggtggacaagcacactccacgctcgatttgtccatgctgtggagcttcttggtggccatgaaagagctacaccaaagtcagttcttgagctcatggatgtgaaggatctcacattagctcatgtcaaaagccatttgcagatgtatcgaactgttaagaccactgacaagcctgctgcttcttcaggcctttcagatggatcaggagaagatgacatgtctccaatgggaagcagtggtggaatgcgtcaattttcagaccaaagaagcctttctgatcgaccactgcaacaagatatggactactcttcaggcaacaacactctatggagtaactcttcaagtagagaaacatggcaacaaaataactctaatgacgtagatggtttcagacccccaatcttccagtcacaacaaatatcaggagggcatcaaattcaggagtgtgattcaacccaactcaagaacagtttgtcaggatcaaatttagagtgcaagaacccaagtttggagttcacattagggagaccagattggaatggcaaaggacaagcctaattttcattggttcccttattgtctctagctagtttgcttaattagtttaattacaacccacggtaacatgtgacaaacttcgtaatctttcctgaaatagagaggtgttgtactatatatatatatatatatatatatatatatatatatatatatatatatgtattcaatcagaaaaataaaattaaaagccctatatagttctataaagttgattcttttttggaagttttacgagttcgtgaacaaatttgtttagcctttttcttgtatttaatattttatttattggtgagaggaggcacagggaaagaaactgatgtagcagctgcaaattactgcagaagaacaatgaagagaaat

SEQ ID NO: 59390 - protein, 309 aa, Glycine max
  peptide (1)..(309): Ceres Seq. ID no. 15177127
FLPSEHSRDNKDHHAKMCLYHHMPTYPSLSSSCSPLCSSSSSSSSPAAPYFAAAAAAYRAATATRFNGISGEAFKSHHPLHHHHSSSPHYGVGLGPSHETSAGLMRSRFLPKLPAKRSMRAPRMRWTSTLHARFVHAVELLGGHERATPKSVLELMDVKDLTLAHVKSHLQMYRTVKTTDKPAASSGLSDGSGEDDMSPMGSSGGMRQFSDQRSLSDRPLQQDMDYSSGNNTLWSNSSSRETWQQNNSNDVDGFRPPIFQSQQISGGHQIQECDSTQLKNSLSGSNLECKNPSLEFTLGRPDWNGKGQA

SEQ ID NO: 59391 - protein, 293 aa, Glycine max
  peptide (1)..(293): Ceres Seq. ID no. 15177128
MCLYHHMPTYPSLSSSCSPLCSSSSSSSSPAAPYFAAAAAAYRAATATRFNGISGEAFKSHHPLHHHHSSSPHYGVGLGPSHETSAGLMRSRFLPKLPAKRSMRAPRMRWTSTLHARFVHAVELLGGHERATPKSVLELMDVKDLTLAHVKSHLQMYRTVKTTDKPAASSGLSDGSGEDDMSPMGSSGGMRQFSDQRSLSDRPLQQDMDYSSGNNTLWSNSSSRETWQQNNSNDVDGFRPPIFQSQQISGGHQIQECDSTQLKNSLSGSNLECKNPSLEFTLGRPDWNGKGQA

SEQ ID NO: 59392 - protein, 287 aa, Glycine max
  peptide (1)..(287): Ceres Seq. ID no. 15177129
MPTYPSLSSSCSPLCSSSSSSSSPAAPYFAAAAAAYRAATATRFNGISGEAFKSHHPLHHHHSSSPHYGVGLGPSHETSAGLMRSRFLPKLPAKRSMRAPRMRWTSTLHARFVHAVELLGGHERATPKSVLELMDVKDLTLAHVKSHLQMYRTVKTTDKPAASSGLSDGSGEDDMSPMGSSGGMRQFSDQRSLSDRPLQQDMDYSSGNNTLWSNSSSRETWQQNNSNDVDGFRPPIFQSQQISGGHQIQECDSTQLKNSLSGSNLECKNPSLEFTLGRPDWNGKGQA

SEQ ID NO: 59393 - DNA, 2091 bp, Glycine max
  misc_feature (1)..(2091): Ceres Seq. ID no. 15174626
gcgaacaaacgaagagtgcaagtgtccgcaaagccgttactcttactcatcacatgaacccctaaatcctaattgctttgttttcccccaattcccaatggcgaacgactcgtcgtttttgttcgccggcattcgtttcgatagaaagaagttcggcgccgatattgccaggttccagaaaaaagacagtgatactgattcggcgatgattttgagcgccgccgaagacgaaggcgagaaaacaatagaacctctggaagaagagaaagtcgcggcgtcaacgacgaagaagaggaagcgcaagggaacctcttccgaaacggtcgaaggattcaatgtgttcagaagttcgacgtctgtggcgcagtcgaatgatgaagtccgagtcattgaggagtccgttgagctgtataataataataagaaggaacaaaataagcaactcgagcgggacgcaatattcagaaagcaacacaacattcatgtctctggttataacgtgccgtctccgcttcaaagctttgatgagttgaaatcaagatataactgtccttcatatttgttgcgcaatctgaaggaacttggatttagagaaccaacacctatccaaaggcaggctataccagtacttttacaaggtcgtgaatgctttgcttgtgcaccaactggctctgggaaaacccttgcgtttgtgtggccaatgcttatgaagcttaaggatccggaaaaaggcagcattcgagctgtgatcctttgtcatactcgtgaattatctgttcaaacatatcgagagtgcaaaaagcttgctaaaagaaaaaaatttcgcattaagttgatgactaagaatcttttaagaaatgctgatttttcaaaatttccatgtgatgtactaatatccacaccacttcgattacgtttggctatcaagaggaagaagattgatctcagcagagttgagtatcttgtcctggatgaatcggataagctatttgagcctgaattattcaagcagattgattctgttatcaaggcatgctcaaatccctcaataatacgctcactgttcagtgctactttacctgattttgttgaagatcgagctcgagaacttatgcatgatgctgttcgtgtaattgttggcagaaagaatatggcttctgaaacaataaagcaaaaattggtttttactggaagtgaagaaggaaaacttctagcaattcgtcaaagctttgccgagagtctaaatcctccggtattggttttcctccaaagcaaggagcgtgccaaggagctgtgcagtgaacttgcatttgacagcattagagttgatgttatccattctgatttgtctcaagcagagcgagaaaatgctgttgataacttcagagctggaaaaacatgggttttgattgctactgatgtagttgcccggggcatggatttcaaaggtgtgaactgtgtgatcaattatgatttccctgattctgctgctgcatatttccacagaattggtcgttctggcagagcagggaggactggagaagcgattactttttacacggaagatgacattccattccttcggaatgttgctaatcttatggcagcatcaggctgtgaggttccttcctatctcatgaagttgcgcaaaaagaagtggaagaagcaccgacccaaaagagattcaatctccacaaaaccagacctatagccctgtaatagcatagaatgacaacatgcttttaaccttgaaatttccagtggtgtttagtatttcttaaataggccgggcagcctagtgtcatgattgcccattcccaaaaatgcaacacgatggaaagggaagggtgaggctaggcaattgcgaccaagagagaatcacgttttatagctaatgcaaggcagtgttgcctaaatttaaaccatgattgtcgtcatatactcctcagccctcactgtaagccccctaaagtgtaatctcatgtgaaatgggaatttttgtgcctctagaaactagaatgtttatttgaacaacatttagaaatttttgtgcccccaaaaccattatttttatatgcttattcagccctt

SEQ ID NO: 59394 - protein, 569 aa, Glycine max
  peptide (1)..(569): Ceres Seq. ID no. 15174627
RTNEECKCPQSRYSYSSHEPLNPNCFVFPQFPMANDSSFLFAGIRFDRKKFGADIARFQKKDSDTDSAMILSAAEDEGEKTIEPLEEEKVAASTTKKRKRKGTSSETVEGFNVFRSSTSVAQSNDEVRVIEESVELYNNNKKEQNKQLERDAIFRKQHNIHVSGYNVPSPLQSFDELKSRYNCPSYLLRNLKELGFREPTPIQRQAIPVLLQGRECFACAPTGSGKTLAFVWPMLMKLKDPEKGSIRAVILCHTRELSVQTYRECKKLAKRKKFRIKLMTKNLLRNADFSKFPCDVLISTPLRLRLAIKRKKIDLSRVEYLVLDESDKLFEPELFKQIDSVIKACSNPSIIRSLFSATLPDFVEDRARELMHDAVRVIVGRKNMASETIKQKLVFTGSEEGKLLAIRQSFAESLNPPVLVFLQSKERAKELCSELAFDSIRVDVIHSDLSQAERENAVDNFRAGKTWVLIATDVVARGMDFKGVNCVINYDFPDSAAAYFHRIGRSGRAGRTGEAITFYTEDDIPFLRNVANLMAASGCEVPSYLMKLRKKKWKKHRPKRDSISTKPDL

SEQ ID NO: 59395 - protein, 537 aa, Glycine max
  peptide (1)..(537): Ceres Seq. ID no. 15174628
MANDSSFLFAGIRFDRKKFGADIARFQKKDSDTDSAMILSAAEDEGEKTIEPLEEEKVAASTTKKRKRKGTSSETVEGFNVFRSSTSVAQSNDEVRVIEESVELYNNNKKEQNKQLERDAIFRKQHNIHVSGYNVPSPLQSFDELKSRYNCPSYLLRNLKELGFREPTPIQRQAIPVLLQGRECFACAPTGSGKTLAFVWPMLMKLKDPEKGSIRAVILCHTRELSVQTYRECKKLAKRKKFRIKLMTKNLLRNADFSKFPCDVLISTPLRLRLAIKRKKIDLSRVEYLVLDESDKLFEPELFKQIDSVIKACSNPSIIRSLFSATLPDFVEDRARELMHDAVRVIVGRKNMASETIKQKLVFTGSEEGKLLAIRQSFAESLNPPVLVFLQSKERAKELCSELAFDSIRVDVIHSDLSQAERENAVDNFRAGKTWVLIATDVVARGMDFKGVNCVINYDFPDSAAAYFHRIGRSGRAGRTGEAITFYTEDDIPFLRNVANLMAASGCEVPSYLMKLRKKKWKKHRPKRDSISTKPDL

SEQ ID NO: 59396 - protein, 501 aa, Glycine max
  peptide (1)..(501): Ceres Seq. ID no. 15174629
MILSAAEDEGEKTIEPLEEEKVAASTTKKRKRKGTSSETVEGFNVFRSSTSVAQSNDEVRVIEESVELYNNNKKEQNKQLERDAIFRKQHNIHVSGYNVPSPLQSFDELKSRYNCPSYLLRNLKELGFREPTPIQRQAIPVLLQGRECFACAPTGSGKTLAFVWPMLMKLKDPEKGSIRAVILCHTRELSVQTYRECKKLAKRKKFRIKLMTKNLLRNADFSKFPCDVLISTPLRLRLAIKRKKIDLSRVEYLVLDESDKLFEPELFKQIDSVIKACSNPSIIRSLFSATLPDFVEDRARELMHDAVRVIVGRKNMASETIKQKLVFTGSEEGKLLAIRQSFAESLNPPVLVFLQSKERAKELCSELAFDSIRVDVIHSDLSQAERENAVDNFRAGKTWVLIATDVVARGMDFKGVNCVINYDFPDSAAAYFHRIGRSGRAGRTGEAITFYTEDDIPFLRNVANLMAASGCEVPSYLMKLRKKKWKKHRPKRDSISTKPDL

SEQ ID NO: 59397 - DNA, 1584 bp, Glycine max
  misc_feature (1)..(1584): Ceres Seq. ID no. 14307776
aactcaagatagaatggcacaggcacaacatgaagagaggatccatgaaaaccaaaaagaaaaggaaacccaagaaacaggaaactctagcttcaaattcaatgcccaagcacctgaatttgttccaagatcacatacccagatgccagtttcaggttattactacccttgcttccaaatttttggtgggtctagtgagtcagctgattggttctttgttggggaccaagatccttcttgtttgatccctactcccaatgttgcacaacccaattcctccaagaatattcttacccctgatcttcaacaaaagatcgttaaacaggtggagtatcagttcagtgacatgagtttgttagcaaatgaatcctttcataaacagatgaataaagatcctgaaggttatgttccaataaccgtaattgcttctaccaaaaaggttaaatctcttgttagtaacattaatatgcttactcaagctatacgttcatcttcaaaacttgttttgagtgttgatggaaaaaaggttaagcgtaaacatccttacactgaaaaggaaaaagaggacttgctggctcgcactgttgtggcagagaatttacctgacgatcattcccatcagaatcttcaaaaaatctttggtatagttgggagcgtgaaaacgatcagaatatgccatccccaagagcctaattcttctcgcccaaaatctgatttcatcgtcagtaataagctccatgcactagtggagtatgagacatcagatatagccgagaaagctgctgagaagttaaatgatgaaagaaattggaggaaagggatgcgtgtaaggttgttccttagatgctcgccaaaatctgttctgaagagtagaaagtcagaatttgatggatatctagatgatgacgagattataaattttgaatctgttgaggattcttctccttctcactcaaacaatgctgaattgtttgagacaaatgttgatgaaaattgggtaggatgtaagaaaggatgggctggtagaggacgtggaaagggtagagggcgcactcaaggacgtggcctacttgccccaccctctcaatcaagcagtactatcctttgtgatgcacacacaaaacacaacactaagggcccaagaatgccagatggaacaagaggcttcaccatgggacgtggcaagccaattagtccttcttctcatgtcacttcacctaaagagtgatggatatttcttaagtttttcctttggctacatatagtgaacttaggagaattctttgcatttcttcaccacagttatttaaaatcagcaaaagtgttttagaagaccctattatgtgggctactagacgggtagtcccaattttttagatttgaccagtttagtaataattcatgatgtatagtgtgatatggtatggcaatccttatgataatggccacgaagattttaaatcttacttagctttcaatttagtgaggggtattgtttttaatgtcggaaataagtgcttattgttattgtacactaaattgtttttgggattgaataagagacttaggagtcaaattctcccc

SEQ ID NO: 59398 - protein, 408 aa, Glycine max
  peptide (1)..(408): Ceres Seq. ID no. 14307777
TQDRMAQAQHEERIHENQKEKETQETGNSSFKFNAQAPEFVPRSHTQMPVSGYYYPCFQIFGGSSESADWFFVGDQDPSCLIPTPNVAQPNSSKNILTPDLQQKIVKQVEYQFSDMSLLANESFHKQMNKDPEGYVPITVIASTKKVKSLVSNINMLTQAIRSSSKLVLSVDGKKVKRKHPYTEKEKEDLLARTVVAENLPDDHSHQNLQKIFGIVGSVKTIRICHPQEPNSSRPKSDFIVSNKLHALVEYETSDIAEKAAEKLNDERNWRKGMRVRLFLRCSPKSVLKSRKSEFDGYLDDDEIINFESVEDSSPSHSNNAELFETNVDENWVGCKKGWAGRGRGKGRGRTQGRGLLAPPSQSSSTILCDAHTKHNTKGPRMPDGTRGFTMGRGKPISPSSHVTSPKE

SEQ ID NO: 59399 - protein, 404 aa, Glycine max
  peptide (1)..(404): Ceres Seq. ID no. 14307778
MAQAQHEERIHENQKEKETQETGNSSFKFNAQAPEFVPRSHTQMPVSGYYYPCFQIFGGSSESADWFFVGDQDPSCLIPTPNVAQPNSSKNILTPDLQQKIVKQVEYQFSDMSLLANESFHKQMNKDPEGYVPITVIASTKKVKSLVSNINMLTQAIRSSSKLVLSVDGKKVKRKHPYTEKEKEDLLARTVVAENLPDDHSHQNLQKIFGIVGSVKTIRICHPQEPNSSRPKSDFIVSNKLHALVEYETSDIAEKAAEKLNDERNWRKGMRVRLFLRCSPKSVLKSRKSEFDGYLDDDEIINFESVEDSSPSHSNNAELFETNVDENWVGCKKGWAGRGRGKGRGRTQGRGLLAPPSQSSSTILCDAHTKHNTKGPRMPDGTRGFTMGRGKPISPSSHVTSPKE

SEQ ID NO: 59400 - protein, 361 aa, Glycine max
  peptide (1)..(361): Ceres Seq. ID no. 14307779
MPVSGYYYPCFQIFGGSSESADWFFVGDQDPSCLIPTPNVAQPNSSKNILTPDLQQKIVKQVEYQFSDMSLLANESFHKQMNKDPEGYVPITVIASTKKVKSLVSNINMLTQAIRSSSKLVLSVDGKKVKRKHPYTEKEKEDLLARTVVAENLPDDHSHQNLQKIFGIVGSVKTIRICHPQEPNSSRPKSDFIVSNKLHALVEYETSDIAEKAAEKLNDERNWRKGMRVRLFLRCSPKSVLKSRKSEFDGYLDDDEIINFESVEDSSPSHSNNAELFETNVDENWVGCKKGWAGRGRGKGRGRTQGRGLLAPPSQSSSTILCDAHTKHNTKGPRMPDGTRGFTMGRGKPISPSSHVTSPKE

SEQ ID NO: 59401 - DNA, 1298 bp, Glycine max
  misc_feature (1)..(1298): Ceres Seq. ID no. 14315362
gaaatctaaagaagagaagggattggaacagattgaagagcaacgtgttatagaggcaaaaattaggatgcggcagcaggaacttcaggatgaagaggaaagaatgcacaaaagactggaaatgagctcctcgaatgtgaatgtggcagttgcagatgttgaatacagttcaaatgcagtgtcttcatcttcagtttctgttgttgaaaatgatgaaattgtttcttctcaagactcatgtgccacatcagtggttagagcaaatgcaaccactaggaccaatagagatgatgaatttgacgttgaccttgaggacatcatggtcatggaagcaatttggctttccattcaggagaatggcaggcggagaaatttatcttttgtcgatgctacttctggacactatgtagctgacggccgctatgtttcatccgtctcatctgtctcatccgtcatgggtccaccaacgggatcatcctcgtctccatctgggggtctcgcttgtgccattgcagctcttgctgagcgccagcaaatggctggagaatcatctatgagcctcaccaatgaaaatatgccatcattcaacaccctaccgggttccagaagattttataacagacttggtagggatatggctaattatccgcctggtgacaacctcaatgaggagccactggatgaagctgtgacaatgactaggagtcatggtgaatgggacatggaccatgggacacagttgactgaaacagcaaccagctatacaaactctgtcgcagcagaagatcgtggtgaactatcatctttgccacggtctgatgacaatgatggaagccttcaaagtgccacagaacccattgttcccgagagttttgaggagcagatgatgctcgccatggctgtctctttggctgaagctcgagccatgtcaagtggacagagtgcttcttggcagtagtttttggttgaggtgctggtttaatctttcttaaattggtgatgcttgccttggctatttgacaagccaagtccaaggttgagaatttgagggaagttcactcgtatgcaatttgttcaaggatcaggtagtgatctcttctcacaaatttatatatataagtatcaaaagaaaactaatgattctagttggtgaaaggttgctgcttaatgccattttttttacttgtgctcgatgtcctctcctgccccctcattggttttctgtaaatagtttgtctttgatagatgtactctcattcttacagtaatatatggcacattttagacacgtactgaag

SEQ ID NO: 59402 - protein, 318 aa, Glycine max
  peptide (1)..(318): Ceres Seq. ID no. 14315363
KSKEEKGLEQIEEQRVIEAKIRMRQQELQDEEERMHKRLEMSSSNVNVAVADVEYSSNAVSSSSVSVVENDEIVSSQDSCATSVVRANATTRTNRDDEFDVDLEDIMVMEAIWLSIQENGRRRNLSFVDATSGHYVADGRYVSSVSSVSSVMGPPTGSSSSPSGGLACAIAALAERQQMAGESSMSLTNENMPSFNTLPGSRRFYNRLGRDMANYPPGDNLNEEPLDEAVTMTRSHGEWDMDHGTQLTETATSYTNSVAAEDRGELSSLPRSDDNDGSLQSATEPIVPESFEEQMMLAMAVSLAEARAMSSGQSASWQ

SEQ ID NO: 59403 - protein, 296 aa, Glycine max
  peptide (1)..(296): Ceres Seq. ID no. 14315364
MRQQELQDEEERMHKRLEMSSSNVNVAVADVEYSSNAVSSSSVSVVENDEIVSSQDSCATSVVRANATTRTNRDDEFDVDLEDIMVMEAIWLSIQENGRRRNLSFVDATSGHYVADGRYVSSVSSVSSVMGPPTGSSSSPSGGLACAIAALAERQQMAGESSMSLTNENMPSFNTLPGSRRFYNRLGRDMANYPPGDNLNEEPLDEAVTMTRSHGEWDMDHGTQLTETATSYTNSVAAEDRGELSSLPRSDDNDGSLQSATEPIVPESFEEQMMLAMAVSLAEARAMSSGQSASWQ

SEQ ID NO: 59404 - protein, 284 aa, Glycine max
  peptide (1)..(284): Ceres Seq. ID no. 14315365
MHKRLEMSSSNVNVAVADVEYSSNAVSSSSVSVVENDEIVSSQDSCATSVVRANATTRTNRDDEFDVDLEDIMVMEAIWLSIQENGRRRNLSFVDATSGHYVADGRYVSSVSSVSSVMGPPTGSSSSPSGGLACAIAALAERQQMAGESSMSLTNENMPSFNTLPGSRRFYNRLGRDMANYPPGDNLNEEPLDEAVTMTRSHGEWDMDHGTQLTETATSYTNSVAAEDRGELSSLPRSDDNDGSLQSATEPIVPESFEEQMMLAMAVSLAEARAMSSGQSASWQ

SEQ ID NO: 59405 - DNA, 1307 bp, Glycine max
  misc_feature (1)..(1307): Ceres Seq. ID no. 14307427
attgttttggcctttggttaaagaatccttcatcacattaatcagtccagacagagaactgagagaagaccctcacttcctgtttggctcgacgaagacctcacttcgcccaacctccgtctccggcggcgtctcttatcctaacggctccttccctcaccgtcactgaaacggcgtccctgaactcgcaacactgccctccctctgactctgatttcgttcgaacttcgaactcattcccacttcgcagtcctcgccatgcttcgttgtcggcgactcctcgcagtggcaaacctcaaacgacatagctagagatctacaaactctccctcattgtctggtcctcttcctgctccaaactgaaccgcaaaatttttgtttttttcactgaatacagggtgcgatttgtttccattttccagtcaatcctatactccttaggctattgtaatcttctgctaataaggaggaattattattgggttctgaaaacatgttgaaacaagcaattggcagaatcttcagaaccggtgtttatgcttgtgaaggaaatagagttttgccttggatttatgtgccttcgagctttttccaccatggacaagcgcacatggcacctagaagcttttttggggtagaggatttccttgatgatgacaatagccgaccttacacataccaaaaagggaagaagtcaaagaatccaaataagcacatatcattcaaacaaagaacaattgcctacatggaaccttttacacttgatgtgtttatctcaaagcgctttgtatcggcttcactcactcatagggtaacaagcaaacaggttgcagttgccgggaccaactccaaggacataaaagctgttcttaggtctcgttcagacataccagcatgcatagcaattggtaggattttagctgaaagagcaaaagaagctgatgtttacactggttcttatactccaagggacagggacaagtttgaagggaaaatcagagctgtagttcaatcacttattgacaatgggattgatatcaaggtttatcttgattgagtttagtcactcaagtttgtgggactatcagttaaggtgttgatattttggttgaagcagtaggccccttgtgtgtttgaacatgtccatttagtttggttttgatgataatgggaatatcattattcgaattacagatttggtaatttagttttatgaatgagttatgttgtcgtaattgtagttggttattcgttttaattaatgttaaataacctgtcacaaataatacaatcatatgatattgtac

SEQ ID NO: 59406 - protein, 187 aa, Glycine max; identical to SEQ ID NO: 54850
  peptide (1)..(187): Ceres Seq. ID no. 14307428

SEQ ID NO: 59407 - protein, 148 aa, Glycine max; identical to SEQ ID NO: 54851
  peptide (1)..(148): Ceres Seq. ID no. 14307429

SEQ ID NO: 59408 - protein, 103 aa, Glycine max; identical to SEQ ID NO: 54852
  peptide (1)..(103): Ceres Seq. ID no. 14307430

SEQ ID NO: 59409 - DNA, 1399 bp, Glycine max
  misc_feature (1)..(1399): Ceres Seq. ID no. 14307446
aaccaaatatatggatttatatttggagtaaggatgaggctgtccaggaagggatcccataagaaagaagttaaattaaattaaaagctatggaccaaaggcagtttatacgttgcatttgatcataccaagttacaagaatttccaaaattcatgaataatccatggcctctggaaaaggaacagattaacacttaacaggcaacaacataaatggcttcttcaagcataacctgcaacttccatccttcaatatcctttccaatctcagccactcgtttttccatatctttttcgcaccctctactttgcacctacaatggcctttcccttcacccttcaagctccagcttcagagtttttgccaagtttgagaaattccaaagccaaccttcccaattccaagagcctgacccctcactctcaccagtagaaaatacagaaacttctgttgaggatggggaggaggatgacagttgcttgccttcagacttggagggtgcagtgcggcaatcaagtgaggccgcggccatatttgtatcttcaggagggataagagccatagttgaacttttaatcccccaactgcaatttttggatgacgaaggcgcgcaggtggaactctgggaattgtcaaggatttttttggatacactcattgaaaaaactaaattccagagagttaaagccatatttccagatgctggtgcagcagcccttctgaaatatcggtggaaagatgctctatttagatttgcaagcttaagtgaccggaagcctgtagaaagtgacgatgaggttgtggttatgattgttcctgattatcagatgttagagtatgtagagagaattgcatccaatctctctaatattccagaacctacgcccctcatcatgtggaatccacgcctgattagtgaggatgttggagttggatttaatgtccgaaagttaagacgtgtctttctaagcacttttacaactgtctatttcatgcgacctatgccatttggagcaatctttaggtgttatcctggattgtggaaagtgttcagtgacgacaaggaaaggccagatagatatttgcttgccaaggaattcgaaatccgtcctgatgctgaagacatcgagcttctatttgccgatgaagaacagaagtctgagcaagggcaaggtttgcttgacaaagcagcaggcatattctcttcaattagccggatgatgaagtctatataattattgatgatgatctttcatatttgttctcatcgttagtgcatcatgctcccattcatgtcaattatatgtttgctccttcaaaattaattttagaaacctttcagttacggcttttatcatatactacaattcaagtatacatattatgatgtgtttgaac

SEQ ID NO: 59410 - protein, 340 aa, Glycine max
  peptide (1)..(340): Ceres Seq. ID no. 14307447
MASSSITCNFHPSISFPISATRFSISFSHPLLCTYNGLSLHPSSSSFRVFAKFEKFQSQPSQFQEPDPSLSPVENTETSVEDGEEDDSCLPSDLEGAVRQSSEAAAIFVSSGGIRAIVELLIPQLQFLDDEGAQVELWELSRIFLDTLIEKTKFQRVKAIFPDAGAAALLKYRWKDALFRFASLSDRKPVESDDEVVVMIVPDYQMLEYVERIASNLSNIPEPTPLIMWNPRLISEDVGVGFNVRKLRRVFLSTFTTVYFMRPMPFGAIFRCYPGLWKVFSDDKERPDRYLLAKEFEIRPDAEDIELLFADEEQKSEQGQGLLDKAAGIFSSISRMMKSI

SEQ ID NO: 59411 - DNA, 1510 bp, Glycine max
  misc_feature (1)..(1510): Ceres Seq. ID no. 15171096
gatattgaagtatgagtacttttcttttactacactgccatggccgctgccagcctggtgtccctttgggtcctcttctccggcgttgctttgtttcctggaagttgctcgccgcagcatcataacattcttaaacttaaaatgatctcccccttcactcataacctttcaacctccaaaatcattgactcccatctccatatctgggcttctcctcaagaggcttcggaattcccttatgctcccggacaagagccccctgtaccaggaaatcttcattttttgctccagaatatggaggaggcaggagtagatggcgttctcattgtgcagccaatatttcataaatttgatcatagttatgtcacaagtgctttgaagaaatacccgaccaaatttgttggttgttgccttgctaatccaactgatgatggaagtggactgaagcagtttgaagatcttgtcttaaaggatggttatcgtgctgttcgattcaacccagaattgtggccagctggggaaaagatgacaaataaagttgggaaggcaattttccaaagggctggagaactgaatgtaccagtgggattcttgtgcatgaaggtatttttttttatttgcttgtatatataaaagaactatcttgtaaagtttcttctcctcccaatagaaccttaggttgtcaaaatatttctatgtgccgcctatggtattgctacccttctacacagtaaggggcatatttttttatgcatgaagttaatgaaaaaaagaattactgagtcgagtgatttcaggggattggtctatatatgtctgagattgagcagttgtgcacagaatttccatcaacagttgtattgattgatcacttgggcttcatcaaaccaccattgtaagctatattatatcattgtttcaaaggtaaagaaatgcacctttatatgagcattgtattgcaggaatgaagaagaaggtcttgtcttttctcagcttttgaatctatctagattcccaaaagtatatgtgaaatttagttctctttttcaagtgtcaagagagaagtttccttatctggatttggctcctcttttgtcccaagttgtcgctagctttggtgctaaccgtgttatgtggggcagtgattttccatatgctgctgctgaatgtggctacaaagaagccaaagaagcagtgcttcttattgccaaccagatctctttgcctccgtctgatttagagtggatcatggggagaactgttgcacaactcttcccaaaccaatggactgatgctaagcaaggttttcatagagagcgggagtgatgtctctcagattgagtcttataaagcactttcacatgttgtattcttaaattatatgttgaatgtaacatgtaaaattgtctctgcactgatgacatttgttcttgtctttggtaaattcgtacaccaatatttttgttggttgccctgctgttctaggtgaataaccagcattgaataagcg

SEQ ID NO: 59412 - protein, 197 aa, Glycine max
  peptide (1)..(197): Ceres Seq. ID no. 15171097
MAAASLVSLWVLFSGVALFPGSCSPQHHNILKLKMISPFTHNLSTSKIIDSHLHIWASPQEASEFPYAPGQEPPVPGNLHFLLQNMEEAGVDGVLIVQPIFHKFDHSYVTSALKKYPTKFVGCCLANPTDDGSGLKQFEDLVLKDGYRAVRFNPELWPAGEKMTNKVGKAIFQRAGELNVPVGFLCMKVFFFICLYI

SEQ ID NO: 59413 - protein, 163 aa, Glycine max
  peptide (1)..(163): Ceres Seq. ID no. 15171098
MISPFTHNLSTSKIIDSHLHIWASPQEASEFPYAPGQEPPVPGNLHFLLQNMEEAGVDGVLIVQPIFHKFDHSYVTSALKKYPTKFVGCCLANPTDDGSGLKQFEDLVLKDGYRAVRFNPELWPAGEKMTNKVGKAIFQRAGELNVPVGFLCMKVFFFICLYI

SEQ ID NO: 59414 - protein, 112 aa, Glycine max
  peptide (1)..(112): Ceres Seq. ID no. 15171099
MEEAGVDGVLIVQPIFHKFDHSYVTSALKKYPTKFVGCCLANPTDDGSGLKQFEDLVLKDGYRAVRFNPELWPAGEKMTNKVGKAIFQRAGELNVPVGFLCMKVFFFICLYI

SEQ ID NO: 59415 - DNA, 1067 bp, Glycine max
  misc_feature (1)..(1067): Ceres Seq. ID no. 12597180
ggagtcacaaattttccactcttcctcaccgattgctagaatggaatttcgatgctcagtcatctcttttaccattctcttctctcttgctcttgcaggagagagccatgtccatgcatcgctacctgaggaagattattgggaagctgtttggccaaacactcccattcccactgcactgcgagacgttctaaagcctctccctgcaggtgttgaaatcgatcaactccctaagcaaattgatgatacacagtacccaaaaacattcttctataaagaagaccttcatccaggcaaaacaatgaaagtacaattcaccaagcgtccctatgcacaaccttatggtgtatatacatggttaacggatattaaagacacctctaaagaagggtatagttttgaagagatatgcatcaagaaagaagcgtttgagggagaagagaagttttgtgcaaaatccttgggaacagtaattggttttgccatttcaaagctgggaaagaacattcaagtactttcaagttcctttgtcaataagcaagagcaatacactgtggaaggagtgcagaatcttggagacaaagcagtgatgtgtcatgggctaaatttcagaactgcagtattttactgccataaagtccgtgaaacaacagctttcgtggttccattggtggctggtgatggaaccaaaactcaggcacttgctgtttgccactcagatacttctggaatgaatcatcacattcttcatgaactcatgggagttgatcctggaactaaccctgtttgccatttccttggaagcaaggccattttatgggtacccaatatatctatggacactgcctatcagactaacgttgttgtttaattagtccatgcatctgcatcttgggcaccataagattgtatataaaataaattatggtgtgttgtgtatgttgtgcaagacctggaacttcacctttctacgtacgtgtgctgttaggatgcagtgtgctttgatgatgctttgatgaatatgcagtgtgcttttttaagtctattattttcttttattctctttt

SEQ ID NO: 59416 - protein, 289 aa, Glycine max
  peptide (1)..(289): Ceres Seq. ID no. 12597181
ESQIFHSSSPIARMEFRCSVISFTILFSLALAGESHVHASLPEEDYWEAVWPNTPIPTALRDVLKPLPAGVEIDQLPKQIDDTQYPKTFFYKEDLHPGKTMKVQFTKRPYAQPYGVYTWLTDIKDTSKEGYSFEEICIKKEAFEGEEKFCAKSLGTVIGFAISKLGKNIQVLSSSFVNKQEQYTVEGVQNLGDKAVMCHGLNFRTAVFYCHKVRETTAFVVPLVAGDGTKTQALAVCHSDTSGMNHHILHELMGVDPGTNPVCHFLGSKAILWVPNISMDTAYQTNVVV

SEQ ID NO: 59417 - protein, 276 aa, Glycine max
  peptide (1)..(276): Ceres Seq. ID no. 12597182
MEFRCSVISFTILFSLALAGESHVHASLPEEDYWEAVWPNTPIPTALRDVLKPLPAGVEIDQLPKQIDDTQYPKTFFYKEDLHPGKTMKVQFTKRPYAQPYGVYTWLTDIKDTSKEGYSFEEICIKKEAFEGEEKFCAKSLGTVIGFAISKLGKNIQVLSSSFVNKQEQYTVEGVQNLGDKAVMCHGLNFRTAVFYCHKVRETTAFVVPLVAGDGTKTQALAVCHSDTSGMNHHILHELMGVDPGTNPVCHFLGSKAILWVPNISMDTAYQTNVVV

SEQ ID NO: 59418 - protein, 189 aa, Glycine max
  peptide (1)..(189): Ceres Seq. ID no. 12597183
MKVQFTKRPYAQPYGVYTWLTDIKDTSKEGYSFEEICIKKEAFEGEEKFCAKSLGTVIGFAISKLGKNIQVLSSSFVNKQEQYTVEGVQNLGDKAVMCHGLNFRTAVFYCHKVRETTAFVVPLVAGDGTKTQALAVCHSDTSGMNHHILHELMGVDPGTNPVCHFLGSKAILWVPNISMDTAYQTNVVV

SEQ ID NO: 59419 - DNA, 1314 bp, Glycine max
  misc_feature (1)..(1314): Ceres Seq. ID no. 14307408
aagaaaaacaaaaccctccttcttgagagagaaagaagaaagatggctccgaatcttgaatgtcgcatgtacgaagcgaagtacccggaggtggacatggcggtgatgatacaggtgaagaacatagcggacatgggggcctacgtgtcgctgctggagtacaacaacatcgagggaatgatcttgttctccgagctctcccgccgtcggattcggagcgtgagcagcctcatcaaggttggacgaatcgagccggtgatggtgctccgtgtcgacaaggaaaagggttacatcgatctcagcaagcgcagggtctccgaagaagacatccaggcctgcgaggagaggtacaacaagagcaagctcgtccactccatcatgcgccacgtcgccgaaaccctcaacatcgatttggaggaactttatattcacattggatggcctttgtatcgcaaatatggtcatgcttttgaggctttcaaaataattgtgactgatcctgatactgttttaagtactctcactcgtgaagttaaggaagttggccctgacgggcaagaggtgactaaggtggtgccagctgtatcagaagaagtgaaggattctcttgtgaagaatattagaagacgaatgaccccccaacccttgaaaattagggcagatattgaaatgaaatgttttcaatttgatggagttcttcacattaaggaggcaatgcataaggctgaagctgcaggaaatgatgactgccccgtcaaaattaaacttgttgctcccccactttatgttcttaccacccagacactggacaaggagcaaggaatattggttctcaacaatgccatagcttcttgcactgaagcaatagaacaacacaagggtaaacttgtggttaaggaggcagctagagcagtgagtgaacgtgatgataaattgcttgctgagcacatggctaagctacgccaagataatgaagaggtcagtggtgatgaagacagtgaggaggaagaagatacaggaatgggcgaggttgatgtggataatggtgccgggataacggactgacaaaaaacttgtaggtatagtaaggcatagatagcagagtacggctttactaattttgtcttttttattattattctttacaaaactgtctttaaatgcggttgtataatacaagcttgaattactttatgttgagatgtcttgtattttattttttgatgtcaagtgatgtcttgtaacttgcgaagcgattttggagtttcttgacgagggtgttcaacccaaactaatgagatttacagttacttc

SEQ ID NO: 59420 - protein, 354 aa, Glycine max
  peptide (1)..(354): Ceres Seq. ID no. 14307409
KKNKTLLLERERRKMAPNLECRMYEAKYPEVDMAVMIQVKNIADMGAYVSLLEYNNIEGMILFSELSRRRIRSVSSLIKVGRIEPVMVLRVDKEKGYIDLSKRRVSEEDIQACEERYNKSKLVHSIMRHVAETLNIDLEELYIHIGWPLYRKYGHAFEAFKIIVTDPDTVLSTLTREVKEVGPDGQEVTKVVPAVSEEVKDSLVKNIRRRMTPQPLKIRADIEMKCFQFDGVLHIKEAMHKAEAAGNDDCPVKIKLVAPPLYVLTTQTLDKEQGILVLNNAIASCTEAIEQHKGKLVVKEAARAVSERDDKLLAEHMAKLRQDNEEVSGDEDSEEEEDTGMGEVDVDNGAGITD

SEQ ID NO: 59421 - protein, 340 aa, Glycine max
  peptide (1)..(340): Ceres Seq. ID no. 14307410
MAPNLECRMYEAKYPEVDMAVMIQVKNIADMGAYVSLLEYNNIEGMILFSELSRRRIRSVSSLIKVGRIEPVMVLRVDKEKGYIDLSKRRVSEEDIQACEERYNKSKLVHSIMRHVAETLNIDLEELYIHIGWPLYRKYGHAFEAFKIIVTDPDTVLSTLTREVKEVGPDGQEVTKVVPAVSEEVKDSLVKNIRRRMTPQPLKIRADIEMKCFQFDGVLHIKEAMHKAEAAGNDDCPVKIKLVAPPLYVLTTQTLDKEQGILVLNNAIASCTEAIEQHKGKLVVKEAARAVSERDDKLLAEHMAKLRQDNEEVSGDEDSEEEEDTGMGEVDVDNGAGITD

SEQ ID NO: 59422 - protein, 332 aa, Glycine max
  peptide (1)..(332): Ceres Seq. ID no. 14307411
MYEAKYPEVDMAVMIQVKNIADMGAYVSLLEYNNIEGMILFSELSRRRIRSVSSLIKVGRIEPVMVLRVDKEKGYIDLSKRRVSEEDIQACEERYNKSKLVHSIMRHVAETLNIDLEELYIHIGWPLYRKYGHAFEAFKIIVTDPDTVLSTLTREVKEVGPDGQEVTKVVPAVSEEVKDSLVKNIRRRMTPQPLKIRADIEMKCFQFDGVLHIKEAMHKAEAAGNDDCPVKIKLVAPPLYVLTTQTLDKEQGILVLNNAIASCTEAIEQHKGKLVVKEAARAVSERDDKLLAEHMAKLRQDNEEVSGDEDSEEEEDTGMGEVDVDNGAGITD

SEQ ID NO: 59423 - DNA, 1461 bp, Glycine max
  misc_feature (1)..(1461): Ceres Seq. ID no. 14303471
tatggtaaaacaagggaaaatatggagcagtgctttgaggaacttgctctaaaggtttaacttagactcttaaagtctcataaccgaacagttcaatgcagaaaagttctggaaatattataggccatttccttggaggtttatattgttatctaagaagatgcatgtttgccattttatccgtgggtcctgtgccaagtcatattgctttcatcatggatgggaatcgaaggtatgcaaagaagagaaacatggaagaaggtgatggccataaggctggatttactgctctcatgtccatccttagatactgttatgaattgggagtgaagtatgtcactgtctatgcattcagcattgataacttcaaaaggaagcctaatgaggttcagtccttgatggaattgatgcgggaaaagattgaagagttgcttcaacaagaaagtcttatcaatgaatatggtgttagattacatttcattggagacttgcaactattgactgagcctgtcatagcttctgtggaaaaggcaatgagagttactgctcacaacaaccagagagttcttttggtttgcatagcctatacttctcgtcacgagatggtgcatgctgttcaagaatgctgcaaggaaaaatggaatgaagttcaagcatcaaaagaagcaaaacttacaaatggtgcatttgcaagaattgatcagggcctgaaaggaaatggttttgatttgctttttcaagatttatgtaaagactatcaaaatgcaaccaaagcttgtaatagtgtacctaaacgagtggaacctgctgtagagaaagatggcatgttggagcatactgttgaaaaaggtaacgatagtgaagctgaaatcacatcatgcaatgagctggttgaaatgactgaagagagaaagtataaccagggtgatgttcctttaataaaactggtggatattgagaagcacatgtacatggcagtggcacctgatccagacatcttgatccgaacttctggagaggctcgactcagcaattttcttctttggcagactagtacctgccctttgtatgcaccaactgcactttggcctgaaataggcctaagacacttggtctgggcagtattgaactttcagagacaccatttttatttggaaaagaaaaggaagcagttttaactgtatccttattgtcaaaaattcatagtgtagttcatgtgatggcagtttcctttttataaagactagtttttgttttttttattttattttatttataagaattgttgaaattataagagtttaagtagcccaaggggataagaaagagaaaaaactttggatagtagaatgtaatattgatatgtgctgtgcaatgatgtcttatcaaatacaatgaacaagaacttatttatttcaagaattactataaatatgaaaattatggttgatcatttaaaat

SEQ ID NO: 59424 - protein, 360 aa, Glycine max
  peptide (1)..(360): Ceres Seq. ID no. 14303472
MQKSSGNIIGHFLGGLYCYLRRCMFAILSVGPVPSHIAFIMDGNRRYAKKRNMEEGDGHKAGFTALMSILRYCYELGVKYVTVYAFSIDNFKRKPNEVQSLMELMREKIEELLQQESLINEYGVRLHFIGDLQLLTEPVIASVEKAMRVTAHNNQRVLLVCIAYTSRHEMVHAVQECCKEKWNEVQASKEAKLTNGAFARIDQGLKGNGFDLLFQDLCKDYQNATKACNSVPKRVEPAVEKDGMLEHTVEKGNDSEAEITSCNELVEMTEERKYNQGDVPLIKLVDIEKHMYMAVAPDPDILIRTSGEARLSNFLLWQTSTCPLYAPTALWPEIGLRHLVWAVLNFQRHHFYLEKKRKQF

SEQ ID NO: 59425 - protein, 337 aa, Glycine max
  peptide (1)..(337): Ceres Seq. ID no. 14303473
MFAILSVGPVPSHIAFIMDGNRRYAKKRNMEEGDGHKAGFTALMSILRYCYELGVKYVTVYAFSIDNFKRKPNEVQSLMELMREKIEELLQQESLINEYGVRLHFIGDLQLLTEPVIASVEKAMRVTAHNNQRVLLVCIAYTSRHEMVHAVQECCKEKWNEVQASKEAKLTNGAFARIDQGLKGNGFDLLFQDLCKDYQNATKACNSVPKRVEPAVEKDGMLEHTVEKGNDSEAEITSCNELVEMTEERKYNQGDVPLIKLVDIEKHMYMAVAPDPDILIRTSGEARLSNFLLWQTSTCPLYAPTALWPEIGLRHLVWAVLNFQRHHFYLEKKRKQF

SEQ ID NO: 59426 - protein, 320 aa, Glycine max
  peptide (1)..(320): Ceres Seq. ID no. 14303474
MDGNRRYAKKRNMEEGDGHKAGFTALMSILRYCYELGVKYVTVYAFSIDNFKRKPNEVQSLMELMREKIEELLQQESLINEYGVRLHFIGDLQLLTEPVIASVEKAMRVTAHNNQRVLLVCIAYTSRHEMVHAVQECCKEKWNEVQASKEAKLTNGAFARIDQGLKGNGFDLLFQDLCKDYQNATKACNSVPKRVEPAVEKDGMLEHTVEKGNDSEAEITSCNELVEMTEERKYNQGDVPLIKLVDIEKHMYMAVAPDPDILIRTSGEARLSNFLLWQTSTCPLYAPTALWPEIGLRHLVWAVLNFQRHHFYLEKKRKQF

SEQ ID NO: 59427 - DNA, 1513 bp, Glycine max
  misc_feature (1)..(1513): Ceres Seq. ID no. 14307484
aagcactttcgttcccgatactcatactcggaacaccaactcccatcttcgccttcgggttagggttagggttagggaattagggcttcgaacttcgacgcaatgtcgtccattaacccctcacgagctaccgctccctccgccttcgccacgcgccggccgtgggaggagttcttcgcgctccactcgttcacgcgcccctacaccctcggcgagaccacgctccgcgtgaagcgcaacctcggccacttccgcgtgaactacgccatggtcgtgctcctcttcgtgttccttagcctcctctggttccctatctccctcgtcgtcttcctcgccgtcttcgccgcgtggttcttcctctactttttccgcgatggccccatcgtcgtgctccgccgcgagcttgacgaccgcctcgtcctcgcggcgctctccgccgtcaccgtcgccgggcttgtccttaccggcgtctggctcaacgttgtggtggcgttgctcttcgcggcggcggcggtggcgctgcatgcggcgcttcggaacaccgaggatttgtacgtggatgaattggaagtttctgatggaggtttggtttcggttgttggtggtagccctacgaaacgaacagggtacgctagaatatagtaatagttagttatgagatataactgattttcgttttcgtttaatcgttttttgtgttactcgcattgcatatatttgaagaaaatagaggttcgagttttaggttttggtttcgcggaaatatgaattgtgtccatatgatagatttacataccgtgttgttagcttggaattggaatagatttcttgcttgttgcttggccccttcttcttatgtttttagaatctcttgtaaattctaagataggttgaagcattcaatttgtgtatttagagttccaattcaatgtattgtctggcttgatatgctttggtatttgtaataggtttagcaatggtgggtaagatttgttttattttatatcaagtgtaaatgaagaggtaaccattttggttattcatttgtggtttcatatgcatttcagtttgctatcctactaccctctttttttttttagtagattaatatcatgatcaaattaagaacgttatataatataatgttgtgctttttggagtggcttgggttgctgttgtctgaatatctgattttgttgaattagacttgcttgtgttatgctactaagtgttgcagatccttttgtagcctgctgtgaatcaattactgagacttgtaactgtacaacatttgagagaattgaatagagaaccatggaatgccaattcatcattctcttatgtttagctgcaattagctgacacctaagttagttaatgttagctacctctttttagttagtcagttggccatttgggttgattgggatctgatctctcaaaacatgtgtataagaacagattgtaaaccacatgcaatcagactctgactattgaaactcttccctctttt

SEQ ID NO: 59428 - protein, 179 aa, Glycine max
  peptide (1)..(179): Ceres Seq. ID no. 14307485
MSSINPSRATAPSAFATRRPWEEFFALHSFTRPYTLGETTLRVKRNLGHFRVNYAMVVLLFVFLSLLWFPISLVVFLAVFAAWFFLYFFRDGPIVVLRRELDDRLVLAALSAVTVAGLVLTGVWLNVVVALLFAAAAVALHAALRNTEDLYVDELEVSDGGLVSVVGGSPTKRTGYARI

SEQ ID NO: 59429 - protein, 124 aa, Glycine max
  peptide (1)..(124): Ceres Seq. ID no. 14307486
MVVLLFVFLSLLWFPISLVVFLAVFAAWFFLYFFRDGPIVVLRRELDDRLVLAALSAVTVAGLVLTGVWLNVVVALLFAAAAVALHAALRNTEDLYVDELEVSDGGLVSVVGGSPTKRTGYARI

SEQ ID NO: 59430 - protein, 92 aa, Glycine max
  peptide (1)..(92): Ceres Seq. ID no. 14307487
MAPSSCSAASLTTASSSRRSPPSPSPGLSLPASGSTLWWRCSSRRRRWRCMRRFGTPRICTWMNWKFLMEVWFRLLVVALRNEQGTLEYSNS

SEQ ID NO: 59431 - DNA, 1299 bp, Glycine max
  misc_feature (1)..(1299): Ceres Seq. ID no. 15177787
ttttttagttgtaccatgcaatcattaattactttaaaagagagaaccaattgttaaaaggccatagccacatctaattggcacttcataaaggtggtttagttattgggaagcagagaaagaaaaggaggaaatggaggaagcactttttaagacggtgaagaagagcaaaggtgaaattatgggttcttctccggcaacatattgtgttaccggagcaacagggtatattggttcatggcttgtggaggctcttcttgaaagagggtacactgttcatgctactgttagagatcctgaaaagtcactacacctgttgtcattgtggacaagaggtgaccgattgagaattttcaaggcggatttgaatgaagaaagaagtttcgatgaggctgtgaaaggctgtgatggcgtttttcatgttgcagcttcaatggaattcaatgtggttcagaaagaaaacatcgaggcctgtgttcaagcaaatataattgatccagcaataaaaggaaccataaaccttctaaagtcctgcttgaattccaattctgtgaaaagggttgttttcacatcttcaataagtaccatcactgctaaagatagcagtgggaagtggaaacctcttgttgatgaatcttgccaaatccaaagtgaacttgtgttgaaaacacaagcaagtgggtgggtttatgcactttcaaagcttctaacagaagaggcagcatttaagtttgcaaaagagaatggcattgatcttgtgtcagtcataacagccactgttgctggtccattcttcactgctagtgtaccatcaagtgttaaagtcctactgtcaccaataacaggtgaacctgagttcttcaagatattatcttctgtaaatgcacgaatggggtcaattgctttagttcacattgaagatatatgcagtgcacacatattcctaatggagcattctaaagcagaaggtcgatacatatgcagcagccaaagttgtccattagacatgttggctaatcttcttgccaaagagtattcctactcaagcaagaaaaggattgcggagaagaattatgataatgttccttctgagatttcctctaagaagttaaaagagttgggttttagttacaagcatgggcttgaagacataatccatcagacaattatttgttgcctagattatggttatttacctcccattagacaatagtctttcaacactactgtacatgattttaaaacttttgtaattttttttttttgtgatctcaaaataaatgaagtcatattctaaag

SEQ ID NO: 59432 - protein, 359 aa, Glycine max
  peptide (1)..(359): Ceres Seq. ID no. 15177788
MEEALFKTVKKSKGEIMGSSPATYCVTGATGYIGSWLVEALLERGYTVHATVRDPEKSLHLLSLWTRGDRLRIFKADLNEERSFDEAVKGCDGVFHVAASMEFNVVQKENIEACVQANIIDPAIKGTINLLKSCLNSNSVKRVVFTSSISTITAKDSSGKWKPLVDESCQIQSELVLKTQASGWVYALSKLLTEEAAFKFAKENGIDLVSVITATVAGPFFTASVPSSVKVLLSPITGEPEFFKILSSVNARMGSIALVHIEDICSAHIFLMEHSKAEGRYICSSQSCPLDMLANLLAKEYSYSSKKRIAEKNYDNVPSEISSKKLKELGFSYKHGLEDIIHQTIICCLDYGYLPPIRQ

SEQ ID NO: 59433 - protein, 343 aa, Glycine max
  peptide (1)..(343): Ceres Seq. ID no. 15177789
MGSSPATYCVTGATGYIGSWLVEALLERGYTVHATVRDPEKSLHLLSLWTRGDRLRIFKADLNEERSFDEAVKGCDGVFHVAASMEFNVVQKENIEACVQANIIDPAIKGTINLLKSCLNSNSVKRVVFTSSISTITAKDSSGKWKPLVDESCQIQSELVLKTQASGWVYALSKLLTEEAAFKFAKENGIDLVSVITATVAGPFFTASVPSSVKVLLSPITGEPEFFKILSSVNARMGSIALVHIEDICSAHIFLMEHSKAEGRYICSSQSCPLDMLANLLAKEYSYSSKKRIAEKNYDNVPSEISSKKLKELGFSYKHGLEDIIHQTIICCLDYGYLPPIRQ

SEQ ID NO: 59434 - protein, 259 aa, Glycine max
  peptide (1)..(259): Ceres Seq. ID no. 15177790
MEFNVVQKENIEACVQANIIDPAIKGTINLLKSCLNSNSVKRVVFTSSISTITAKDSSGKWKPLVDESCQIQSELVLKTQASGWVYALSKLLTEEAAFKFAKENGIDLVSVITATVAGPFFTASVPSSVKVLLSPITGEPEFFKILSSVNARMGSIALVHIEDICSAHIFLMEHSKAEGRYICSSQSCPLDMLANLLAKEYSYSSKKRIAEKNYDNVPSEISSKKLKELGFSYKHGLEDIIHQTIICCLDYGYLPPIRQ

SEQ ID NO: 59435 - DNA, 1157 bp, Glycine max
  misc_feature (1)..(1157): Ceres Seq. ID no. 14307396
tctctctctcattgctcctctgattcattcacccaatttttttctgtcctcttttcctctcagaggagcctctgagtctgctcaggtgttccttgtcaagagatccttttgtttttgaggtgtgaagggaaagagaaaaaagatgaatcagtgtggttatcagcagaagaaggccttgacaagctgtgaggagatgaggatggaatctgtggtgtgccctaaacctcgaagattgggcctgttgaaccactcaacctttgataaccacatcagacccttgaggccaccctttatcaactaccaatcagaaattgaagattcaggagttggggctgagcttatggacattattctccccaagagatctggggggcaagtggcttcatcaccgccatttttctgtggatctccacctagcagggcttcaaaccctgtgatccaagatgagcaatttggtagtaatggtaatgagagttttggttcattttccttggcacccccttcaccatcttcctcagcaagaggctgtgttaggatgaagtttggtcacaccccagcagcagtgaggattgaaggttttgattgcctcagcagggataggcgcaactgcagcatttctgctgttgcttaattcaattttaaacaaagaaaaagaaaagaaaagaggattaaagaatcaccaaagttctaagagcagaggagatttttggaactgaggagctaatcttaatttcaatcttattgtattatatctatatgtatataccgttgttcatgagttaattaaggtgtcatgtataattgagagaaggtgggaattttatattcttagttttatcctttttgaagaataataaaaaaagggggacacatcaaggagaaaagaaaaacgcaagcaaaaagtcttgttcttctctcttgttaggttttatatgatggggtcttttagattgaaactttcatgtgagtttcatggagagtctgtaacttatatgtaatttgaaactcagctcctccttttgtaattggaatggtggaggaatttgaggatttatctttggaatcttgtaaaatatattttttgtgggtgcccctatttgcaggtgtcgcctattggattatatgaaaagaaatattgttcatactttatacatggc

SEQ ID NO: 59436 - protein, 162 aa, Glycine max
  peptide (1)..(162): Ceres Seq. ID no. 14307397
MNQCGYQQKKALTSCEEMRMESVVCPKPRRLGLLNHSTFDNHIRPLRPPFINYQSEIEDSGVGAELMDIILPKRSGGQVASSPPFFCGSPPSRASNPVIQDEQFGSNGNESFGSFSLAPPSPSSSARGCVRMKFGHTPAAVRIEGFDCLSRDRRNCSISAVA

SEQ ID NO: 59437 - protein, 145 aa, Glycine max
  peptide (1)..(145): Ceres Seq. ID no. 14307398
MRMESVVCPKPRRLGLLNHSTFDNHIRPLRPPFINYQSEIEDSGVGAELMDIILPKRSGGQVASSPPFFCGSPPSRASNPVIQDEQFGSNGNESFGSFSLAPPSPSSSARGCVRMKFGHTPAAVRIEGFDCLSRDRRNCSISAVA

SEQ ID NO: 59438 - protein, 143 aa, Glycine max
  peptide (1)..(143): Ceres Seq. ID no. 14307399
MESVVCPKPRRLGLLNHSTFDNHIRPLRPPFINYQSEIEDSGVGAELMDIILPKRSGGQVASSPPFFCGSPPSRASNPVIQDEQFGSNGNESFGSFSLAPPSPSSSARGCVRMKFGHTPAAVRIEGFDCLSRDRRNCSISAVA

SEQ ID NO: 59439 - DNA, 2209 bp, Glycine max
  misc_feature (1)..(2209): Ceres Seq. ID no. 14314168
gagggtttaagcgtttcttctcctatggcattcagcgataagcaaaagcaagaagaagaagaagaaccgcacagaatggaagaagacgacgacgaaagcgaagaagaagaagaagaagaagaagaagaagaagaagaagaagaagaagaagaagtgtgggacgattgggaaggagaagacgaaggagagagagaatctgaattcgtgtgtctattctgtgactcccggtacagttcgtgcggttccttgttcgaccactgcgcctcccttcaccgctttgatttccacacgatcagaacaactctcagcttggatttctatgcctccttcaagctcattaacttcatccgctctcgggtggcagagaacatatgttggagttgtggattaacatgccagtccaactgtgaccttcagaatcatttgcatgatgtagttgactttaatgagataaagactttgtggaatgatgataggtatctgatacctttcatgcaagatgattcactgttgtacagttttggtgattgtgacgaagacggggaagatgaacatattactcgaattgatgaagatcttataaaggatctaatgaacattgaagagagtatccatgacgatcaagatcttgtgaaaaaagtggtagttgatgatgacaaacatgagattgattctgtctctaataatcatttgaacaaggctagttcttcaaagaaacttattaatggtaaggactcaaaaggacatgttttgtgcagtgataaggatccagaaggacatttgatggttaattctcaaaatcacattgcaaagcatattaagaagatcaatgaaagttattttgggtcttacagttcatttggtatccatcgagagatgttaagtgataaggtgagaatggatgcttatggccaagcgattttgaagaatccctctctactaaatagtgctgtggttatggatgtaggttgtggaactggaattctcagcctattttcagcaaaagctggcgcttcaagggttattgcagttgaggctagtgccaagatggcagcagtagcatctcaggttgcaaaagataatggtcttttgctgagtaaaagccaaaatggagttgatggcctccaaaagggagtcatagaagtggttcatggtatggttgaagagattgataaaacagttgaacttcaacctcgcagtgttgatgtattgctaagtgaatggatgggatattgcctgctgtatgaatccatgcttggttcagtgctttatgcacgagaccggtggttgaagcctggtggtgccattcttcctgatacagcaactatttttgttgcaggatttggaaaaggagccacaagtcttcctttttgggaaaatgtgtgtgatttcgacatgtcttgcattgggaatgagcttgtcatagatgctgcccgaattcctatagttgatgttgtggactctcaagatttagttacctgttctgctattcttcagtcctttgacttggcaaccatgaagcctaatgaagtggatttcactgcaactgctactttggaattgaaaccaagtacttctggaacatgctgctggtgttatggtgttgtcctatggtttgatactggattttcaagcagattctgccgagaaacaccagccgtgttatccacattcccttacatgccaagaacacattggtcacaaacaatcttaacctttcaagaacctattgcgatgggatttggaaaagaaaacaggggtaaaccagaagcaattggcactgaggtgtatcctgctgtgaagattgatttacgtgtcagcattgtccgttctactgagcatcgcagcattgatatatccttagaagctgctggtgttggtcctgacagtcacaaacgcagttggcctgctcagcttttaatctgcagtaggatgcatgacgccacaacagcaaagatcattgtgcagcagtttttcttgttggctgccagttaaaatcagttttggaatgctacagctgtaattgctaacatttaggttcctttttttgttcactggaaatagctactgcttgttgaatgctagactctacgctgcccaattacatagaaaatgtaatgtttctccaattcatatttatgtatgacaaaacttacgtgcagtactgttttcttatactgttttccaattaaaattggttattcatttc

SEQ ID NO: 59440 - protein, 664 aa, Glycine max
  peptide (1)..(664): Ceres Seq. ID no. 14314169
EGLSVSSPMAFSDKQKQEEEEEPHRMEEDDDESEEEEEEEEEEEEEEEEEEVWDDWEGEDEGERESEFVCLFCDSRYSSCGSLFDHCASLHRFDFHTIRTTLSLDFYASFKLINFIRSRVAENICWSCGLTCQSNCDLQNHLHDVVDFNEIKTLWNDDRYLIPFMQDDSLLYSFGDCDEDGEDEHITRIDEDLIKDLMNIEESIHDDQDLVKKVVVDDDKHEIDSVSNNHLNKASSSKKLINGKDSKGHVLCSDKDPEGHLMVNSQNHIAKHIKKINESYFGSYSSFGIHREMLSDKVRMDAYGQAILKNPSLLNSAVVMDVGCGTGILSLFSAKAGASRVIAVEASAKMAAVASQVAKDNGLLLSKSQNGVDGLQKGVIEVVHGMVEEIDKTVELQPRSVDVLLSEWMGYCLLYESMLGSVLYARDRWLKPGGAILPDTATIFVAGFGKGATSLPFWENVCDFDMSCIGNELVIDAARIPIVDVVDSQDLVTCSAILQSFDLATMKPNEVDFTATATLELKPSTSGTCCWCYGVVLWFDTGFSSRFCRETPAVLSTFPYMPRTHWSQTILTFQEPIAMGFGKENRGKPEAIGTEVYPAVKIDLRVSIVRSTEHRSIDISLEAAGVGPDSHKRSWPAQLLICSRMHDATTAKIIVQQFFLLAAS

SEQ ID NO: 59441 - protein, 656 aa, Glycine max
  peptide (1)..(656): Ceres Seq. ID no. 14314170
MAFSDKQKQEEEEEPHRMEEDDDESEEEEEEEEEEEEEEEEEEVWDDWEGEDEGERESEFVCLFCDSRYSSCGSLFDHCASLHRFDFHTIRTTLSLDFYASFKLINFIRSRVAENICWSCGLTCQSNCDLQNHLHDVVDFNEIKTLWNDDRYLIPFMQDDSLLYSFGDCDEDGEDEHITRIDEDLIKDLMNIEESIHDDQDLVKKVVVDDDKHEIDSVSNNHLNKASSSKKLINGKDSKGHVLCSDKDPEGHLMVNSQNHIAKHIKKINESYFGSYSSFGIHREMLSDKVRMDAYGQAILKNPSLLNSAVVMDVGCGTGILSLFSAKAGASRVIAVEASAKMAAVASQVAKDNGLLLSKSQNGVDGLQKGVIEVVHGMVEEIDKTVELQPRSVDVLLSEWMGYCLLYESMLGSVLYARDRWLKPGGAILPDTATIFVAGFGKGATSLPFWENVCDFDMSCIGNELVIDAARIPIVDVVDSQDLVTCSAILQSFDLATMKPNEVDFTATATLELKPSTSGTCCWCYGVVLWFDTGFSSRFCRETPAVLSTFPYMPRTHWSQTILTFQEPIAMGFGKENRGKPEAIGTEVYPAVKIDLRVSIVRSTEHRSIDISLEAAGVGPDSHKRSWPAQLLICSRMHDATTAKIIVQQFFLLAAS

SEQ ID NO: 59442 - protein, 639 aa, Glycine max
  peptide (1)..(639): Ceres Seq. ID no. 14314171
MEEDDDESEEEEEEEEEEEEEEEEEEVWDDWEGEDEGERESEFVCLFCDSRYSSCGSLFDHCASLHRFDFHTIRTTLSLDFYASFKLINFIRSRVAENICWSCGLTCQSNCDLQNHLHDVVDFNEIKTLWNDDRYLIPFMQDDSLLYSFGDCDEDGEDEHITRIDEDLIKDLMNIEESIHDDQDLVKKVVVDDDKHEIDSVSNNHLNKASSSKKLINGKDSKGHVLCSDKDPEGHLMVNSQNHIAKHIKKINESYFGSYSSFGIHREMLSDKVRMDAYGQAILKNPSLLNSAVVMDVGCGTGILSLFSAKAGASRVIAVEASAKMAAVASQVAKDNGLLLSKSQNGVDGLQKGVIEVVHGMVEEIDKTVELQPRSVDVLLSEWMGYCLLYESMLGSVLYARDRWLKPGGAILPDTATIFVAGFGKGATSLPFWENVCDFDMSCIGNELVIDAARIPIVDVVDSQDLVTCSAILQSFDLATMKPNEVDFTATATLELKPSTSGTCCWCYGVVLWFDTGFSSRFCRETPAVLSTFPYMPRTHWSQTILTFQEPIAMGFGKENRGKPEAIGTEVYPAVKIDLRVSIVRSTEHRSIDISLEAAGVGPDSHKRSWPAQLLICSRMHDATTAKIIVQQFFLLAAS

SEQ ID NO: 59443 - DNA, 1300 bp, Glycine max
  misc_feature (1)..(1300): Ceres Seq. ID no. 14307280
agtgaccagagacagatgatgatggagatggcgaagcgaaacgctgtcgttgcggcactcgcggcgttggtgctactcgcggcgagtgtggcggtggatgctcaggagaactcggacgtgaagacgctggtgaagtacaagcacgggaagaagtactgcgacaaaggatgggaatgtaagggctggtcaatttactgttgtaacctcaccattaccgattatttccagacctaccagttcgagaatctgttctccaagcggaactcgccggtggcgcacgcggtcggattttgggactaccactccttcatcgccgcggccgcgctttttgagccggaagggttcggcaccaccgggaacaagacgatgcagatgatggagatcgccgccttcttcggacacgtcggcagcaagacctcttgtggttatggagtggccactggaggacctttggcctggggtctttgttacaatcatgaaatgagtcctatgcagtcatactgtgatgactacttcaaactcacatacccctgtactcctggtgctgactactatggacgtggagccattcccattttttggaactacaactatggtgctgtcggagaagctttgaagattgacctactaagccatccagaatacatagagcagaatgccacccttgctttccaggctgcaatttggagatggatgacaccaatgaaaaagtcacagccctctgctcatgatgcttttgtcggcagctggaagcctaccaagaatgacactatggagaatcgggttcctggatttggcactacaatgaacattctctatggggatggtgtttgtggacaaggagatgtggactcaatgaacaatattgtttcccattacctgtattatcttgaccttcttggtgttggtcgagaacaggctgggccccatgacatccttacatgcgctgagcaggttcctttcaacccatcttccaaacctgcttcatcatcttaagattattatatttattagcatataatattgttgtgccaatccctttgaaagtgtaagttaataagggttcttgaaattattggtatgcaataactttgaactgtgtggcagtgtgggaattcattatagcattttgttcgttcttgtgtagaagtttaagtcatttgcaatatcatacgtcttgaaaaatttgtatctggtgtatatgtacgttatgggcgattttgttatttttattatatatacattccttggttgcaatgtaaatttgaatatggtcatgtcaaacaaatccactccgagt

SEQ ID NO: 59444 - protein, 331 aa, Glycine max
  peptide (1)..(331): Ceres Seq. ID no. 14307281
SDQRQMMMEMAKRNAVVAALAALVLLAASVAVDAQENSDVKTLVKYKHGKKYCDKGWECKGWSIYCCNLTITDYFQTYQFENLFSKRNSPVAHAVGFWDYHSFIAAAALFEPEGFGTTGNKTMQMMEIAAFFGHVGSKTSCGYGVATGGPLAWGLCYNHEMSPMQSYCDDYFKLTYPCTPGADYYGRGAIPIFWNYNYGAVGEALKIDLLSHPEYIEQNATLAFQAAIWRWMTPMKKSQPSAHDAFVGSWKPTKNDTMENRVPGFGTTMNILYGDGVCGQGDVDSMNNIVSHYLYYLDLLGVGREQAGPHDILTCAEQVPFNPSSKPASSS

SEQ ID NO: 59445 - protein, 326 aa, Glycine max
  peptide (1)..(326): Ceres Seq. ID no. 14307282
MMMEMAKRNAVVAALAALVLLAASVAVDAQENSDVKTLVKYKHGKKYCDKGWECKGWSIYCCNLTITDYFQTYQFENLFSKRNSPVAHAVGFWDYHSFIAAAALFEPEGFGTTGNKTMQMMEIAAFFGHVGSKTSCGYGVATGGPLAWGLCYNHEMSPMQSYCDDYFKLTYPCTPGADYYGRGAIPIFWNYNYGAVGEALKIDLLSHPEYIEQNATLAFQAAIWRWMTPMKKSQPSAHDAFVGSWKPTKNDTMENRVPGFGTTMNILYGDGVCGQGDVDSMNNIVSHYLYYLDLLGVGREQAGPHDILTCAEQVPFNPSSKPASSS

SEQ ID NO: 59446 - protein, 325 aa, Glycine max
  peptide (1)..(325): Ceres Seq. ID no. 14307283
MMEMAKRNAVVAALAALVLLAASVAVDAQENSDVKTLVKYKHGKKYCDKGWECKGWSIYCCNLTITDYFQTYQFENLFSKRNSPVAHAVGFWDYHSFIAAAALFEPEGFGTTGNKTMQMMEIAAFFGHVGSKTSCGYGVATGGPLAWGLCYNHEMSPMQSYCDDYFKLTYPCTPGADYYGRGAIPIFWNYNYGAVGEALKIDLLSHPEYIEQNATLAFQAAIWRWMTPMKKSQPSAHDAFVGSWKPTKNDTMENRVPGFGTTMNILYGDGVCGQGDVDSMNNIVSHYLYYLDLLGVGREQAGPHDILTCAEQVPFNPSSKPASSS

SEQ ID NO: 59447 - DNA, 1204 bp, Glycine max
  misc_feature (1)..(1204): Ceres Seq. ID no. 14313060
acatcgtacacacacacacacacacttttttcaaggcataggattggtgaggcaaacttgaattgaagtgaagaaggagatggctgcaacctcttccttgtgctcatcgaccctccaatcccagatcaatggattcttccttcacaaaacctctctttcccatactccttccctcactttctccaggaggaaaatttcaaccacagtgaaggctacatctcgagtcgacaagttttcaaaaagcgatatcattgtctctccgtccattctttctgcaaacttttcaaaattgggagagcaggtgaaagcagtagaattggctggttgtgattggattcacgttgatgtaatggatggtcgctttgttccaaatattacaattggacctcttgtggttgatgcattgcgccctgtgacagatcttcctttggatgtacacctgatgattgtagagcctgaacaaagggtaccagattttattaaggcaggagctgatatagtcagtgttcattgtgaacaatcttccaccatccatttgcatcgtacagttaatcaagtgaaaagtctgggagctaaagctggagttgtcttaaaccccggtacccccttaagtgcaatagaatatatccttgatgtggttgatttggtcttaattatgtccgtaaaccctggctttggtggccagagttttattgagagtcaagtaaagaaaatttctgatttgagaagattgtgtgcggagaagggagtgaatccatggattgaagtagatggtggagttggtccagcaaatgcatacaaggtgattgaggctggagccaatgcactggttgctggctctgctgtttttggagctaaagattatgccgaagctataagaggaatcaaaaccagcaaaagacctgaagtagttgctgtgtgaaatgcctgtgtggttccatattcaccgtacgctccaatgtaagctgtattttttgccccatagaggtttatccattaaattttggcatatcgttttactgattgggtggttgaatataagcaaaattgactgccagtatgagaaacaatcaagtaaaataatggcagacattgcttatgcgccagtttcaaagtcaactatattatataattaagttatgcttgtggctcaatcatcacatgtatctgactgataattactcaatactagtagaaattttac

SEQ ID NO: 59448 - protein, 280 aa, Glycine max
  peptide (1)..(280): Ceres Seq. ID no. 14313061
MAATSSLCSSTLQSQINGFFLHKTSLSHTPSLTFSRRKISTTVKATSRVDKFSKSDIIVSPSILSANFSKLGEQVKAVELAGCDWIHVDVMDGRFVPNITIGPLVVDALRPVTDLPLDVHLMIVEPEQRVPDFIKAGADIVSVHCEQSSTIHLHRTVNQVKSLGAKAGVVLNPGTPLSAIEYILDVVDLVLIMSVNPGFGGQSFIESQVKKISDLRRLCAEKGVNPWIEVDGGVGPANAYKVIEAGANALVAGSAVFGAKDYAEAIRGIKTSKRPEVVAV

SEQ ID NO: 59449 - protein, 190 aa, Glycine max
  peptide (1)..(190): Ceres Seq. ID no. 14313062
MDGRFVPNITIGPLVVDALRPVTDLPLDVHLMIVEPEQRVPDFIKAGADIVSVHCEQSSTIHLHRTVNQVKSLGAKAGVVLNPGTPLSAIEYILDVVDLVLIMSVNPGFGGQSFIESQVKKISDLRRLCAEKGVNPWIEVDGGVGPANAYKVIEAGANALVAGSAVFGAKDYAEAIRGIKTSKRPEVVAV

SEQ ID NO: 59450 - protein, 159 aa, Glycine max
  peptide (1)..(159): Ceres Seq. ID no. 14313063
MIVEPEQRVPDFIKAGADIVSVHCEQSSTIHLHRTVNQVKSLGAKAGVVLNPGTPLSAIEYILDVVDLVLIMSVNPGFGGQSFIESQVKKISDLRRLCAEKGVNPWIEVDGGVGPANAYKVIEAGANALVAGSAVFGAKDYAEAIRGIKTSKRPEVVAV

SEQ ID NO: 59451 - DNA, 727 bp, Glycine max
  misc_feature (1)..(727): Ceres Seq. ID no. 15176099
gttttttatttttattattattattattgttgttatttctgccacaacatttaggggtgcattgcaaatggcttccattgttgcaagcttgccgccaccattgctgctccctgctagaaaatatcatccgggcaacttcccaagttcccctttttctcttctttcagggagacggaatcatgtttcttttgttgtgaaggcttctggagaaagttctgaatcttcaactacccttactgtttttaagtctgttcagaatgtttgggatcaacctgaggaccgtctgggacttattggtttgggatttgcagccatagcagcattttgggcatcaacaaatttgattgcggccattgacaaattgccagttttcccaacagtactggaattaattggaatattttactctgtgtggtttacttatcgctatctcatattcaaacctgaccgggaagagctttttcaaatcttgaacaagtcagcatcagatatcttgggccagtaagatgtgcggccgaaatgctatgctagattgggaggaaaaggtgaaaggggctttggttgtcttcactccaatcgtaaatgtcaatgcaaggattatttatttggtttaagaccactatattacatcaatgagttaaagcttacttcttttgtgttggtttctttgtataaaattttaactgagttcccttgtgcatcaaactatcaagagtaaaactagcct

SEQ ID NO: 59452 - protein, 167 aa, Glycine max
  peptide (1)..(167): Ceres Seq. ID no. 15176100
FFIFIIIIIVVISATTFRGALQMASIVASLPPPLLLPARKYHPGNFPSSPFSLLSGRRNHVSFVVKASGESSESSTTLTVFKSVQNVWDQPEDRLGLIGLGFAAIAAFWASTNLIAAIDKLPVFPTVLELIGIFYSVWFTYRYLIFKPDREELFQILNKSASDILGQ

SEQ ID NO: 59453 - protein, 145 aa, Glycine max
  peptide (1)..(145): Ceres Seq. ID no. 15176101
MASIVASLPPPLLLPARKYHPGNFPSSPFSLLSGRRNHVSFVVKASGESSESSTTLTVFKSVQNVWDQPEDRLGLIGLGFAAIAAFWASTNLIAAIDKLPVFPTVLELIGIFYSVWFTYRYLIFKPDREELFQILNKSASDILGQ

SEQ ID NO: 59454 - DNA, 1187 bp, Glycine max
  misc_feature (1)..(1187): Ceres Seq. ID no. 15170943
gagttcaatgattgattggagcagaattagagcaaaatatttatattctgttgcataagtactctgtactcaaatggaattatttcattctcaaaataaataccatacttttcttttcatttcataagagatacaaagaatgaattttgttcattcacatgtgagggattgatttccttttaatgttaaatcttggaaccatgttacatgccatataaacagggaccacataagggtaaagcaactaaagcgtaggctttaggtccaccagcaaaaaactatttgatattagtacttataaagtaaaaaaggcctcatcatatactgataaaaagaaaaccacatatgttagtaaaaatgcccaacgtatttaaagtgcaaaatttcttttaaaaattgttttaggttttgtttatcgttggacggaccctgcatatagtaacagaccaacaatagtttgcaacaaaaataaccttatgtttcatcatcatatgtatgaacataacctcggtctccacatttgtttttgtttgtttattgttgttaatttggttattgccagagactcaagaagttgccgaagtgaaaccaactgagggctctgtcaaccgagatgcagtgcttgcaagagttgcaactgagaagagattgtcactaatcaaagcatgggaagaaagtgaaaaatcaaaagctgaaaacaaggctcacaaaaagctttcatccgtttctgcatgggaaaacagcaagaaagctgctgtggaggctgacctgaaaaagattgaagaagaactggagaagaaaaaggcagaagctgcagaaaagataaaaaacaaaattgctgcaatccacaaggaagctgaagaaagaagagcaataattgaggcaaagaaaggggaagatcttcttaaggcagaggaacaagctgcaaagtatagagcaactggaacagctccaaagaaactccttggttgtttctaatgcttcaaatctcaagcattgtggggaaagaaaaagttatttttttattgtgtatctttggttattaaatatcattaatacaagtgtggttttagtttacatgttggagatttagcccatgttcatttattatgtgtgcaaacctgacacattggcgtgtatataccaactactttgtggataaagaaattaaattattcaatctgtgc

SEQ ID NO: 59455 - protein, 160 aa, Glycine max
  peptide (1)..(160): Ceres Seq. ID no. 15170944
MNITSVSTFVFVCLLLLIWLLPETQEVAEVKPTEGSVNRDAVLARVATEKRLSLIKAWEESEKSKAENKAHKKLSSVSAWENSKKAAVEADLKKIEEELEKKKAEAAEKIKNKIAAIHKEAEERRAIIEAKKGEDLLKAEEQAAKYRATGTAPKKLLGCF

SEQ ID NO: 59456 - DNA, 1515 bp, Glycine max
  misc_feature (1)..(1515): Ceres Seq. ID no. 14307678
tttcttctgtagatccatctatctagcttcggagctgcaaatggacgtcgcagtcactgccttccggtcaccgctgatcatcctccgaagaccggtcaacgagtctgcctcagctcggttcggttccacttttgggttttccagaaagcagcaacggttcagttcagtatgtatccccaaacacaagcacaagcaaggtcgtagaagagggtttgtagttagagcttctgcatcctcatctccggagtcggatgatgccaagattgctcctcttcagtttgaatcctcaattgggcagttcctttctcagattttgaaagatcatccgcatcttgtgcctgctgccgttgaccagcagctccagcaactccaaactgaccgcgatgctcatcaacaaaacgaacaaccttctgcttcaaccactgatttagttttgtacaggagaattgctgaggtgaaggctaatgaaaggaggaaagctctggaagagatcttgtatgcattggtagtgcagaagttcatggatgctaatatttctttgataccctctgtaaccccagatctttctggtaaggttgatttgtggccaaatgaagatggtaaacttgagctgcttcactcacacgaagcatatgagatgattcaaaaccacctggctctcattctcggtaacagagctggagatttaacatcaatagctgaaatcagcaaattcagggtagggcaggtctacgcagcatcagtgatgtatggttattttcttagacgagttgaccaaaggttccagttggagaagacaatgaaagttcttccaaatgcaacagaaaaagagaatagtgctcatcaaactacaatggacaatgcaagacccagtattgaagaggacacttctcaagtgatgtctcatcctgaagtatctacctggcctggtggtgatgtccgtcccggtggatttggctatggtgtaaaggcaaccaggttgcgtaactacgtgatgtcctttgatggtgatacactacaaagatatgcaacaattagatccaaagaggctgtcagcatcatcgagaagcacacagaagcattgtttggaagacctgaaattgttgtaacacctgagggggcagtctctaaggatgaaaacatcaaaattagctttggtggtttaaagaagcttgttttagaggctgtgacatttggttcttttctctgggatgttgagagctatgtggactcaaggtaccattttgtgttgaactgagtaaatctttatatgtgtacccttttagatcccaccaggtgggagggaacctcgtgcattcagttgtccttttgagttctgtttgctctcatacatcacaaggcatagtttatagtgtgttggtactgactgatggagtaaatttgaatgtaacttcggtgttaaaagtccaaatattgtttcactaattaatatgtatatactgtagtggtagtggctctggatttcactaataaagggaagcttattttctagtt

SEQ ID NO: 59457 - protein, 418 aa, Glycine max
  peptide (1)..(418): Ceres Seq. ID no. 14307679
FFCRSIYLASELQMDVAVTAFRSPLIILRRPVNESASARFGSTFGFSRKQQRFSSVCIPKHKHKQGRRRGFVVRASASSSPESDDAKIAPLQFESSIGQFLSQILKDHPHLVPAAVDQQLQQLQTDRDAHQQNEQPSASTTDLVLYRRIAEVKANERRKALEEILYALVVQKFMDANISLIPSVTPDLSGKVDLWPNEDGKLELLHSHEAYEMIQNHLALILGNRAGDLTSIAEISKFRVGQVYAASVMYGYFLRRVDQRFQLEKTMKVLPNATEKENSAHQTTMDNARPSIEEDTSQVMSHPEVSTWPGGDVRPGGFGYGVKATRLRNYVMSFDGDTLQRYATIRSKEAVSIIEKHTEALFGRPEIVVTPEGAVSKDENIKISFGGLKKLVLEAVTFGSFLWDVESYVDSRYHFVLN

SEQ ID NO: 59458 - protein, 405 aa, Glycine max
  peptide (1)..(405): Ceres Seq. ID no. 14307680
MDVAVTAFRSPLIILRRPVNESASARFGSTFGFSRKQQRFSSVCIPKHKHKQGRRRGFVVRASASSSPESDDAKIAPLQFESSIGQFLSQILKDHPHLVPAAVDQQLQQLQTDRDAHQQNEQPSASTTDLVLYRRIAEVKANERRKALEEILYALVVQKFMDANISLIPSVTPDLSGKVDLWPNEDGKLELLHSHEAYEMIQNHLALILGNRAGDLTSIAEISKFRVGQVYAASVMYGYFLRRVDQRFQLEKTMKVLPNATEKENSAHQTTMDNARPSIEEDTSQVMSHPEVSTWPGGDVRPGGFGYGVKATRLRNYVMSFDGDTLQRYATIRSKEAVSIIEKHTEALFGRPEIVVTPEGAVSKDENIKISFGGLKKLVLEAVTFGSFLWDVESYVDSRYHFVLN

SEQ ID NO: 59459 - protein, 245 aa, Glycine max
  peptide (1)..(245): Ceres Seq. ID no. 14307681
MDANISLIPSVTPDLSGKVDLWPNEDGKLELLHSHEAYEMIQNHLALILGNRAGDLTSIAEISKFRVGQVYAASVMYGYFLRRVDQRFQLEKTMKVLPNATEKENSAHQTTMDNARPSIEEDTSQVMSHPEVSTWPGGDVRPGGFGYGVKATRLRNYVMSFDGDTLQRYATIRSKEAVSIIEKHTEALFGRPEIVVTPEGAVSKDENIKISFGGLKKLVLEAVTFGSFLWDVESYVDSRYHFVLN

SEQ ID NO: 59460 - DNA, 1280 bp, Glycine max
  misc_feature (1)..(1280): Ceres Seq. ID no. 14313022
tatgaatcgatggatgattcgatggcttacaaccatattgaacgactgttttttacgaccatagaaaaaaacacatttggtccggcattgaaattattagaaaaatatccaacgcagttgggccttgcaggagatgatcaacgtaattgccaaaatgcattgaagatgctggcacgaaagccttcagtaattctaaacaaagtagagaggagagaagaggggcaagagggtctgaaattgcttgagcgattatattggggcgttaataaaatggaggattgtacggtgtggttttctttagtgaaatcaggaaaccttgacgctttaaaacgccttattggaaataatagtgaagtgctcatgaccataaaggacagcgatggaatgagcctactgcataaggctgctttatgtcgccaacgtagcattgtttcctatatacaaggtttcacatccagagaagataaccttgtactgggaggggtcgacaataaaggtaacaacgttctacacttagctgctgcgaagcagcaatcttcgtcacatctattaagaaacgcaaaggtggaaatgcaaaatgatctcgcatggtttaaggaaatcgagaagaaatttcatgaattcagctacaacacaatggtgaacgacaaaggcaagacaccagaggaggtattttatgatcaacacgaggatttatctgacaagattaaagatgattccaaagaaatagccaactcgggcatgattgtggcaatacttgtggccacggtagcatttgccgctgctctcaccgttccaggtgaaaagaccaatgcgtggtttgttgtcttcatattcacaaatgcagttgcattatttgcttcttcagcgtcaatactctctttcttgtcaaatttcacttcattgagattcggacaacgcgaatttgtcaaatcactacatccgagcttgacttttgggcccgtgttactttttatctctgttgttgctatggttgtggcttttacagcagcctcctttttgatatttgatcacacctccaagtgggtttcttacgcagttgcttcaatggggttttttccattactgctgtttattctgtttcaattcaggtttttcgacgacagcttgtggtctagatattatcgtctgtccaaatttgaaaaatttgagtaagttattacagagatacagcttgtggtctagatattattgcctagattgttgcttgtcagccggtcaaaagcttgtgtttgaatttaagattattctgtattttc

SEQ ID NO: 59461 - protein, 391 aa, Glycine max
  peptide (1)..(391): Ceres Seq. ID no. 14313023
YESMDDSMAYNHIERLFFTTIEKNTFGPALKLLEKYPTQLGLAGDDQRNCQNALKMLARKPSVILNKVERREEGQEGLKLLERLYWGVNKMEDCTVWFSLVKSGNLDALKRLIGNNSEVLMTIKDSDGMSLLHKAALCRQRSIVSYIQGFTSREDNLVLGGVDNKGNNVLHLAAAKQQSSSHLLRNAKVEMQNDLAWFKEIEKKFHEFSYNTMVNDKGKTPEEVFYDQHEDLSDKIKDDSKEIANSGMIVAILVATVAFAAALTVPGEKTNAWFVVFIFTNAVALFASSASILSFLSNFTSLRFGQREFVKSLHPSLTFGPVLLFISVVAMVVAFTAASFLIFDHTSKWVSYAVASMGFFPLLLFILFQFRFFDDSLWSRYYRLSKFEKFE

SEQ ID NO: 59462 - protein, 388 aa, Glycine max
  peptide (1)..(388): Ceres Seq. ID no. 14313024
MDDSMAYNHIERLFFTTIEKNTFGPALKLLEKYPTQLGLAGDDQRNCQNALKMLARKPSVILNKVERREEGQEGLKLLERLYWGVNKMEDCTVWFSLVKSGNLDALKRLIGNNSEVLMTIKDSDGMSLLHKAALCRQRSIVSYIQGFTSREDNLVLGGVDNKGNNVLHLAAAKQQSSSHLLRNAKVEMQNDLAWFKEIEKKFHEFSYNTMVNDKGKTPEEVFYDQHEDLSDKIKDDSKEIANSGMIVAILVATVAFAAALTVPGEKTNAWFVVFIFTNAVALFASSASILSFLSNFTSLRFGQREFVKSLHPSLTFGPVLLFISVVAMVVAFTAASFLIFDHTSKWVSYAVASMGFFPLLLFILFQFRFFDDSLWSRYYRLSKFEKFE

SEQ ID NO: 59463 - protein, 384 aa, Glycine max
  peptide (1)..(384): Ceres Seq. ID no. 14313025
MAYNHIERLFFTTIEKNTFGPALKLLEKYPTQLGLAGDDQRNCQNALKMLARKPSVILNKVERREEGQEGLKLLERLYWGVNKMEDCTVWFSLVKSGNLDALKRLIGNNSEVLMTIKDSDGMSLLHKAALCRQRSIVSYIQGFTSREDNLVLGGVDNKGNNVLHLAAAKQQSSSHLLRNAKVEMQNDLAWFKEIEKKFHEFSYNTMVNDKGKTPEEVFYDQHEDLSDKIKDDSKEIANSGMIVAILVATVAFAAALTVPGEKTNAWFVVFIFTNAVALFASSASILSFLSNFTSLRFGQREFVKSLHPSLTFGPVLLFISVVAMVVAFTAASFLIFDHTSKWVSYAVASMGFFPLLLFILFQFRFFDDSLWSRYYRLSKFEKFE

SEQ ID NO: 59464 - DNA, 1349 bp, Glycine max
  misc_feature (1)..(1349): Ceres Seq. ID no. 14313951
gatctaaatctaacggaaaatattaccttcattatctcagcttctatgaaaaagcaactatactcatcacccacttactcctcccaccaaaaatccacacccggtgttaacatgagagaaagattggttcgcttgactgaaactgtcaatgaactcagaaccaacgtcgaaaccgaagtccaaaaccaggataacctcgaaaaagttagctcaaagaactacactcttatgaacacacaaatcaaggctttgagaaaagctttcaacacccttgctgatgtgattatggaagagttggacgctattaaatcagatgttgctcgtgattctcaggaggctaatgccgctattttccgcaagcttgatgagcttggttcacaagttaatagacttcaaaatgagaagcaggatcaaagggaacaaatgagtaatgttgaacagagtttgagagaaagaatagaagctttggaaagaaagcaagatgagaccagtcaagatgtccaagcagtcgtagaaaacaccaaagaagacaatagagtcctttatgaaaagctccacagtgtcattagaagtaacacttcaaagattgaccagttagctcaggacaatgaaaatgtgaatattgctttagatgaattaaagaacaagagcaatactgatggttctaatataaaggacatattccacaagattggcgaagtggatgatgaactaaagcaccatactcatgaactagccaataagcttggtgataccagaaaccagattactacacttagagaaagcttaaagggagacatttcaaacgctgctaaagctcaaattgagataaccagaagggttgaagaagtgaacactagacttaatgagaaggttcatgctgatcagttaagtgctcaacaaagattctctgaaattgaggacttggtcaatcaagttcaacatgagttccaggataatgttcaagagttggcaaagattcacaaggaaagttcgactcagattattgtggactttgaaaaggcgattagttctattaataatgacaataagatcttgtataagaagtttgcagtattggaaggatcagtaggaaagaatagagaagatcttggggcgatgatatcagatcatgagcatagtgttagcagaaagaatgagcaacttaacagagcggtctttgatatatgcagacaattgaatattaataatcctttgctttcgtattgatttacttttgatttagtatgatccgttcaattttttttacttttgaaatttatttgcataaaaaactgactatgaatacttctataaagatttttatgaataaagatccttcttagaac

SEQ ID NO: 59465 - protein, 409 aa, Glycine max
  peptide (1)..(409): Ceres Seq. ID no. 14313952
DLNLTENITFIISASMKKQLYSSPTYSSHQKSTPGVNMRERLVRLTETVNELRTNVETEVQNQDNLEKVSSKNYTLMNTQIKALRKAFNTLADVIMEELDAIKSDVARDSQEANAAIFRKLDELGSQVNRLQNEKQDQREQMSNVEQSLRERIEALERKQDETSQDVQAVVENTKEDNRVLYEKLHSVIRSNTSKIDQLAQDNENVNIALDELKNKSNTDGSNIKDIFHKIGEVDDELKHHTHELANKLGDTRNQITTLRESLKGDISNAAKAQIEITRRVEEVNTRLNEKVHADQLSAQQRFSEIEDLVNQVQHEFQDNVQELAKIHKESSTQIIVDFEKAISSINNDNKILYKKFAVLEGSVGKNREDLGAMISDHEHSVSRKNEQLNRAVFDICRQLNINNPLLSY

SEQ ID NO: 59466 - protein, 394 aa, Glycine max
  peptide (1)..(394): Ceres Seq. ID no. 14313953
MKKQLYSSPTYSSHQKSTPGVNMRERLVRLTETVNELRTNVETEVQNQDNLEKVSSKNYTLMNTQIKALRKAFNTLADVIMEELDAIKSDVARDSQEANAAIFRKLDELGSQVNRLQNEKQDQREQMSNVEQSLRERIEALERKQDETSQDVQAVVENTKEDNRVLYEKLHSVIRSNTSKIDQLAQDNENVNIALDELKNKSNTDGSNIKDIFHKIGEVDDELKHHTHELANKLGDTRNQITTLRESLKGDISNAAKAQIEITRRVEEVNTRLNEKVHADQLSAQQRFSEIEDLVNQVQHEFQDNVQELAKIHKESSTQIIVDFEKAISSINNDNKILYKKFAVLEGSVGKNREDLGAMISDHEHSVSRKNEQLNRAVFDICRQLNINNPLLSY

SEQ ID NO: 59467 - protein, 372 aa, Glycine max
  peptide (1)..(372): Ceres Seq. ID no. 14313954
MRERLVRLTETVNELRTNVETEVQNQDNLEKVSSKNYTLMNTQIKALRKAFNTLADVIMEELDAIKSDVARDSQEANAAIFRKLDELGSQVNRLQNEKQDQREQMSNVEQSLRERIEALERKQDETSQDVQAVVENTKEDNRVLYEKLHSVIRSNTSKIDQLAQDNENVNIALDELKNKSNTDGSNIKDIFHKIGEVDDELKHHTHELANKLGDTRNQITTLRESLKGDISNAAKAQIEITRRVEEVNTRLNEKVHADQLSAQQRFSEIEDLVNQVQHEFQDNVQELAKIHKESSTQIIVDFEKAISSINNDNKILYKKFAVLEGSVGKNREDLGAMISDHEHSVSRKNEQLNRAVFDICRQLNINNPLLSY

SEQ ID NO: 59468 - DNA, 1730 bp, Glycine max
  misc_feature (1)..(1730): Ceres Seq. ID no. 15170897
acaaaaagctcctcagaacctatatggcaaggacctcatttttccaagcattggagctaatagagacgctcaaacaagcgcacctctcttctttccaaatgcaagcttctttaaaaagagtgatactaaaaagacactggactgtctcaaactgccaatgaataatctcagagaagacttttcagtgtcgtcttcaagcagatgcgactttgctaaccatcccaaggtcaaggaaaataactgtaaggagagattcaagaaaagcgaatgcatactggcccctccacaaaagagaaagcgctgtcagattcttaacgaattttcccaagaggactatttgagcccaaagcaccctcgagtcaaagctttacaaggaaatttgctcgatctcgcacgaaccgactctgaatccaggaaatcatcaaaatttgaggagtggcaaacacctcaaaagaagttccatgtcttttgggatcatcatgaaaatgaaaagcaagcaaaattatcagaaatgaagcatcatttgtttgaaagcgagtactccagactcaatagtgactataaaattcttgaagttctcggaagaggaagttttggcaaagtatatcgctgcatcaacagaattgacaagaacgaatacgcaatcaaagagacttttcgaagctttactggaaaaaacaaggtctatggcttgaacgaaacccaagctctcgcttctctcacagcatttgaggacaatacaaatgttgtcagatattttaattcatggatcgaagatgatagactttatcttgtgatggagttttgcccttcttctcttaaagaagaacgcaagcaaagaggaaagtttacagagactgctatcagaaaagcgcttcgagatgtttgtctcggccttgcttacctccatagacataacattgcacatttagatattaagccagaaaatattttaatttcaaaaactatgagatacaaaatcggagacatgggacaatcacgagttgtgaagcgagctggagatattgaagaaggtgattctcgttatgtcgcaccagagttgttaaactgtgatgactgtgaagacgaagttgacttgaaaaaatgtgatattttttcattaggcatgactgcatttgaattactcacagatcataactccccagcaaatggggatgaatggcatcagcttcgaaatggcagattagatcttttagaagcgattcctggtgtgtctcaacgattaaagatgctcatcagaaaaatgttgagcaagaatccatttgaaagaccatcggctcaagagcttttagctcatgatttgccaagtgagatggaaatcgaattaaaatgggaaaagatccaaaataggatcctccaagaaagaaagactgatttggaaaatcagttgaataaaagaaaaaagagaagaaactctgttgcttaattcaaattttgactttttgaatgctgcgccgctgttgaaattttgacctatccttacattattaaatgatattttacttttcatcgtttattattcagtgttaatatattattataagtttgagaaaaattttaaatatataatagaaattttgatgaattataccgactctctggtataatttcatctttatgtttattgttagcttgattgtatatctctaccttgctgatttgtagagtgcgtatatagagtataataatacccctccgttctttaaaac

SEQ ID NO: 59469 - protein, 481 aa, Glycine max
  peptide (1)..(481): Ceres Seq. ID no. 15170898
QKAPQNLYGKDLIFPSIGANRDAQTSAPLFFPNASFFKKSDTKKTLDCLKLPMNNLREDFSVSSSSRCDFANHPKVKENNCKERFKKSECILAPPQKRKRCQILNEFSQEDYLSPKHPRVKALQGNLLDLARTDSESRKSSKFEEWQTPQKKFHVFWDHHENEKQAKLSEMKHHLFESEYSRLNSDYKILEVLGRGSFGKVYRCINRIDKNEYAIKETFRSFTGKNKVYGLNETQALASLTAFEDNTNVVRYFNSWIEDDRLYLVMEFCPSSLKEERKQRGKFTETAIRKALRDVCLGLAYLHRHNIAHLDIKPENILISKTMRYKIGDMGQSRVVKRAGDIEEGDSRYVAPELLNCDDCEDEVDLKKCDIFSLGMTAFELLTDHNSPANGDEWHQLRNGRLDLLEAIPGVSQRLKMLIRKMLSKNPFERPSAQELLAHDLPSEMEIELKWEKIQNRILQERKTDLENQLNKRKKRRNSVA

SEQ ID NO: 59470 - protein, 429 aa, Glycine max
  peptide (1)..(429): Ceres Seq. ID no. 15170899
MNNLREDFSVSSSSRCDFANHPKVKENNCKERFKKSECILAPPQKRKRCQILNEFSQEDYLSPKHPRVKALQGNLLDLARTDSESRKSSKFEEWQTPQKKFHVFWDHHENEKQAKLSEMKHHLFESEYSRLNSDYKILEVLGRGSFGKVYRCINRIDKNEYAIKETFRSFTGKNKVYGLNETQALASLTAFEDNTNVVRYFNSWIEDDRLYLVMEFCPSSLKEERKQRGKFTETAIRKALRDVCLGLAYLHRHNIAHLDIKPENILISKTMRYKIGDMGQSRVVKRAGDIEEGDSRYVAPELLNCDDCEDEVDLKKCDIFSLGMTAFELLTDHNSPANGDEWHQLRNGRLDLLEAIPGVSQRLKMLIRKMLSKNPFERPSAQELLAHDLPSEMEIELKWEKIQNRILQERKTDLENQLNKRKKRRNSVA

SEQ ID NO: 59471 - protein, 311 aa, Glycine max
  peptide (1)..(311): Ceres Seq. ID no. 15170900
MKHHLFESEYSRLNSDYKILEVLGRGSFGKVYRCINRIDKNEYAIKETFRSFTGKNKVYGLNETQALASLTAFEDNTNVVRYFNSWIEDDRLYLVMEFCPSSLKEERKQRGKFTETAIRKALRDVCLGLAYLHRHNIAHLDIKPENILISKTMRYKIGDMGQSRVVKRAGDIEEGDSRYVAPELLNCDDCEDEVDLKKCDIFSLGMTAFELLTDHNSPANGDEWHQLRNGRLDLLEAIPGVSQRLKMLIRKMLSKNPFERPSAQELLAHDLPSEMEIELKWEKIQNRILQERKTDLENQLNKRKKRRNSVA

SEQ ID NO: 59472 - DNA, 894 bp, Glycine max
  misc_feature (1)..(894): Ceres Seq. ID no. 15170399
aatcataacaacaacaatacaaaacaagtcaaacaaacaaaacacaacacaacaatattcaaaaatgtttagcaaaactggaaccttaactgtcaagccaatcatggccgaacttaagaaagacgaagacacactcacaaagcaagatccgtacgtcgttttctacttcggtgataagaaagttaaatcaaagacttgccgtggaggaggaaagaaaccttcttggcaagatgtgttcaccttccaaagaacaagcgaggatatgctcagaattgaactctgggacagagattacctctcccgtgatgactttttgggcgaaggagtagtttctatgtctagccttatgagcaccggcagaaccactaactgggtcgacctcactcacaagggaagatttgccggcaagcttttaatcgaaacggacttcagaggtgaccaaatcaagacaaccacaacaacaaccatgcaacaacctggttatgctatggacaagggtttccctaccatgcaacaacaaggctacatgccacaacaacctggttaccctatggataagggcatccctatgcaacagccttcatatcctatgcaacaacaaaacttccctatgcaacaacaaggcttccccactatgcaacaacaaagcttccctatgcaacaaggaggatacccaatccaacaagggggatacccaatgcaacaaggaggatacccaatgcaacaaggtggttaccaacaaggctatccccaaggcaagttttagtagagtagtcggataaatgcatataattcataataagaattaactcattccatagatttgaatgtaatcttctatatgattactgatagtatcaacaggtgtacaaaataatttacttcctgatcgat

SEQ ID NO: 59473 - protein, 254 aa, Glycine max
  peptide (1)..(254): Ceres Seq. ID no. 15170400
IITTTIQNKSNKQNTTQQYSKMFSKTGTLTVKPIMAELKKDEDTLTKQDPYVVFYFGDKKVKSKTCRGGGKKPSWQDVFTFQRTSEDMLRIELWDRDYLSRDDFLGEGVVSMSSLMSTGRTTNWVDLTHKGRFAGKLLIETDFRGDQIKTTTTTTMQQPGYAMDKGFPTMQQQGYMPQQPGYPMDKGIPMQQPSYPMQQQNFPMQQQGFPTMQQQSFPMQQGGYPIQQGGYPMQQGGYPMQQGGYQQGYPQGKF

SEQ ID NO: 59474 - protein, 233 aa, Glycine max
  peptide (1)..(233): Ceres Seq. ID no. 15170401
MFSKTGTLTVKPIMAELKKDEDTLTKQDPYVVFYFGDKKVKSKTCRGGGKKPSWQDVFTFQRTSEDMLRIELWDRDYLSRDDFLGEGVVSMSSLMSTGRTTNWVDLTHKGRFAGKLLIETDFRGDQIKTTTTTTMQQPGYAMDKGFPTMQQQGYMPQQPGYPMDKGIPMQQPSYPMQQQNFPMQQQGFPTMQQQSFPMQQGGYPIQQGGYPMQQGGYPMQQGGYQQGYPQGKF

SEQ ID NO: 59475 - protein, 220 aa, Glycine max
  peptide (1)..(220): Ceres Seq. ID no. 15170402
MAELKKDEDTLTKQDPYVVFYFGDKKVKSKTCRGGGKKPSWQDVFTFQRTSEDMLRIELWDRDYLSRDDFLGEGVVSMSSLMSTGRTTNWVDLTHKGRFAGKLLIETDFRGDQIKTTTTTTMQQPGYAMDKGFPTMQQQGYMPQQPGYPMDKGIPMQQPSYPMQQQNFPMQQQGFPTMQQQSFPMQQGGYPIQQGGYPMQQGGYPMQQGGYQQGYPQGKF

SEQ ID NO: 59476 - DNA, 1550 bp, Glycine max
  misc_feature (1)..(1550): Ceres Seq. ID no. 14315134
agacaggcacagacacagagggccaatatgaagactcgtacctctaagaagatctctgcaaaatgggttccaattttctctgtatcttccttccttattggaatgctcataacaaccaggatgtgggaaccaccagaatctaacggggtgttactgtcaaatcaccgacatgagcaagaactacaagtggtgtcaggggattgtgctactaaaaagcctgtgcaggatgaggatgtaatgagtaaagtgtacaaaacccatgaagccattcaatctctagacaagcaagtttccatgcttcagatggagctggcagcagcaaggagtacacgagaacccgagatctcggatggttcgaataacaccttggcctcgggggtaaccactgaaggcccaccaaggaagaaggtgtttgtagtgattggcataaacactgccttcagtagcaggaagcggcgtgattcggttagagagacttggatgcctcaaggtgaacagcttcttcaattggaacgcgagaagggaattgtcatcagattcatgattggtcacagtgcaacttctaacagcattctagatcgagctattgattcagaagaagcccagcacaaagacttccttcgcctggaacacgctgaagggtatcatgaattgtctgcaaagacaaaaacattcttttctacagcagttgcaaaatgggatgctgagttctatgtcaaagtggatgatgatgtccatgttaatttaggtgtacttgcaacaacccttgctcgtcatcgttccaaaccaagggtctatgttggatgtatgaaatctggacctgttctttctcgaaaggatgttaaatatcatgaacctgagttttggaagtttggagaagaggggaacaaatatttccgacatgcaactgggcagatatatgcaatctctaaggatctagccacctacatttccattaaccagccaattttgcacaaatatgccaatgaagatgtgtcacttggtgcatggttcataggtctggaagttgaacatatagatgaccgcagtatgtgctgtgggactcctccagattgtgagtggaaggcacaagcaggtaacatatgtgttgcatcctttgactggagctgtagtggaatctgcaagtcggtagagaagatcaaatatgtgcactcaaagtgtggtgaaggggatggagctgtttggagtgccttagtttaggtttgatgggttcaacagaaagccaactaactaattcacgtgttggtatgcatacctcccagctttttgtttttgggtgtgggaggatatgatgatatatttttggttcaactatagtctatacttggtattatgtgacatagacctctcttgttacatgtatctctttatatttttgttcctttgacccacccttttgcacaatgcctttggaggtagttgtgcggggtcaattttcagtgtagcttactaaagagcaatgaagtgatagtgttgttgattcgttcagtgataatatgaattatgaaatcactttatttttttcgatg

SEQ ID NO: 59477 - protein, 406 aa, Glycine max
  peptide (1)..(406): Ceres Seq. ID no. 14315135
RQAQTQRANMKTRTSKKISAKWVPIFSVSSFLIGMLITTRMWEPPESNGVLLSNHRHEQELQVVSGDCATKKPVQDEDVMSKVYKTHEAIQSLDKQVSMLQMELAAARSTREPEISDGSNNTLASGVTTEGPPRKKVFVVIGINTAFSSRKRRDSVRETWMPQGEQLLQLEREKGIVIRFMIGHSATSNSILDRAIDSEEAQHKDFLRLEHAEGYHELSAKTKTFFSTAVAKWDAEFYVKVDDDVHVNLGVLATTLARHRSKPRVYVGCMKSGPVLSRKDVKYHEPEFWKFGEEGNKYFRHATGQIYAISKDLATYISINQPILHKYANEDVSLGAWFIGLEVEHIDDRSMCCGTPPDCEWKAQAGNICVASFDWSCSGICKSVEKIKYVHSKCGEGDGAVWSALV

SEQ ID NO: 59478 - protein, 397 aa, Glycine max
  peptide (1)..(397): Ceres Seq. ID no. 14315136
MKTRTSKKISAKWVPIFSVSSFLIGMLITTRMWEPPESNGVLLSNHRHEQELQVVSGDCATKKPVQDEDVMSKVYKTHEAIQSLDKQVSMLQMELAAARSTREPEISDGSNNTLASGVTTEGPPRKKVFVVIGINTAFSSRKRRDSVRETWMPQGEQLLQLEREKGIVIRFMIGHSATSNSILDRAIDSEEAQHKDFLRLEHAEGYHELSAKTKTFFSTAVAKWDAEFYVKVDDDVHVNLGVLATTLARHRSKPRVYVGCMKSGPVLSRKDVKYHEPEFWKFGEEGNKYFRHATGQIYAISKDLATYISINQPILHKYANEDVSLGAWFIGLEVEHIDDRSMCCGTPPDCEWKAQAGNICVASFDWSCSGICKSVEKIKYVHSKCGEGDGAVWSALV

SEQ ID NO: 59479 - protein, 372 aa, Glycine max
  peptide (1)..(372): Ceres Seq. ID no. 14315137
MLITTRMWEPPESNGVLLSNHRHEQELQVVSGDCATKKPVQDEDVMSKVYKTHEAIQSLDKQVSMLQMELAAARSTREPEISDGSNNTLASGVTTEGPPRKKVFVVIGINTAFSSRKRRDSVRETWMPQGEQLLQLEREKGIVIRFMIGHSATSNSILDRAIDSEEAQHKDFLRLEHAEGYHELSAKTKTFFSTAVAKWDAEFYVKVDDDVHVNLGVLATTLARHRSKPRVYVGCMKSGPVLSRKDVKYHEPEFWKFGEEGNKYFRHATGQIYAISKDLATYISINQPILHKYANEDVSLGAWFIGLEVEHIDDRSMCCGTPPDCEWKAQAGNICVASFDWSCSGICKSVEKIKYVHSKCGEGDGAVWSALV

SEQ ID NO: 59480 - DNA, 2005 bp, Glycine max
  misc_feature (1)..(2005): Ceres Seq. ID no. 14312180
tctctctctctcacacacacacacacactctccccgaggtttgagagggtactggcatccaaaaaatgggttctaaaactaatgcttcgggccatagagcacgaaggccgctgtcaatatttgctgtgcttggtctttgctgtttcttttatcttttgggagcatggcaaagaagtggatctgggaagggagataaccttgcattgaaagttaataacctgatgactgactgcactgttttacccaatttgagttttgaatctcatcacaatgatgtagaaattgtcgaacctgctgagccaaaagctaaagagttcaagccgtgtgatgtgaaatatactgattatacaccttgccaagagcaagaccgagcaatgacatttcccagagagaatatgatctatagagaaaggcattgtcccgctgaaaaggagaaattgcgctgcctcattccagcccccgaagggtacacaactccttttccgtggcctaaaagccgtgattatgcctactatgctaatgttccttacaagagcctgacagtggagaaggctgttcaaaactgggtgcaattccagggaaatgtgtttaaatttccaggtggagggaccatgttccctcacggagcagatgcatatattgatgaacttgcgtcagttattccaattgctgatggttctgttagaacagcactggacactggttgtggggttgcaagctggggagcctacttgctaaagagaaatgtgctggctatgtccttcgctccaaaggacaaccatgaagcacaagttcagtttgctctagaacgaggggtgcctgctgttattggtgtccttggcaccatccaccttccatacccatcaagagccttcgatatggcccagtgttctcgatgtctaataccatggacctcaaatgagggcatgtatctaatggaagttgaccgagtcttaaggcctggtggatactggattttgtctggccccccaattaattggaaaacatactaccaaacatggaagcgatccaaggaagatctgaaggcagaacaaacaaaacttgaggagttagctgaaagtctttgttgggaaaagaagtatgaaaagggtgatattgctatttggagaaagaaaataaatgctaaatcctgcaaaagaaagtctcccaatgtttgtggtttagataatgctgatgatgtgtggtaccaaaaaatggaggtctgtaaaacccctttacctgaggtaaccagcaaaaatgaagttgccggaggagagttacagaagtttcctgctagactttttgcagtccctcctcgaatagcccagggagctattccaggggttacagctgaatcttatcaagaggacaacaaattatggaaaaagcatgttaacgcttacaaaagaatgaataaattgattggcactactagatatcggaatgtgatggacatgaatgcaggccttggaggatttgcagctgcacttgaatcacaaaagtcttgggtgatgaatgttgtgccgtcaattgctgagaacactttgggtgttgtctatgagagaggtctgatcggcatttatcatgactggtgtgaaggcttttccacatacccaaggacatatgatcttattcatgctaatggtttattcagcatataccaggacaagtgcaacctagaagacatccttctagagatggatcgcatcctaaggcctgaaggagcaatcatcatccgggatgaagttgatgttcttaaccaggttaagaaaattgttgggggcatgagatgggatgccaaactggtggatcatgaggatggccctcttgtgcctgagaagatattggttgctctcaaagtgtattgggttggcaccagcaaaaacaaaacatccaatgaggaataaaaccactattgttcgggtgtgaatcttgtacttcagcctgcagtaacatccaaggtttctaaatccaacccaaagaaggaatggggaaaaatatgaat

SEQ ID NO: 59481 - protein, 613 aa, Glycine max
  peptide (1)..(613): Ceres Seq. ID no. 14312181
MGSKTNASGHRARRPLSIFAVLGLCCFFYLLGAWQRSGSGKGDNLALKVNNLMTDCTVLPNLSFESHHNDVEIVEPAEPKAKEFKPCDVKYTDYTPCQEQDRAMTFPRENMIYRERHCPAEKEKLRCLIPAPEGYTTPFPWPKSRDYAYYANVPYKSLTVEKAVQNWVQFQGNVFKFPGGGTMFPHGADAYIDELASVIPIADGSVRTALDTGCGVASWGAYLLKRNVLAMSFAPKDNHEAQVQFALERGVPAVIGVLGTIHLPYPSRAFDMAQCSRCLIPWTSNEGMYLMEVDRVLRPGGYWILSGPPINWKTYYQTWKRSKEDLKAEQTKLEELAESLCWEKKYEKGDIAIWRKKINAKSCKRKSPNVCGLDNADDVWYQKMEVCKTPLPEVTSKNEVAGGELQKFPARLFAVPPRIAQGAIPGVTAESYQEDNKLWKKHVNAYKRMNKLIGTTRYRNVMDMNAGLGGFAAALESQKSWVMNVVPSIAENTLGVVYERGLIGIYHDWCEGFSTYPRTYDLIHANGLFSIYQDKCNLEDILLEMDRILRPEGAIIIRDEVDVLNQVKKIVGGMRWDAKLVDHEDGPLVPEKILVALKVYWVGTSKNKTSNEE

SEQ ID NO: 59482 - protein, 561 aa, Glycine max
  peptide (1)..(561): Ceres Seq. ID no. 14312182
MTDCTVLPNLSFESHHNDVEIVEPAEPKAKEFKPCDVKYTDYTPCQEQDRAMTFPRENMIYRERHCPAEKEKLRCLIPAPEGYTTPFPWPKSRDYAYYANVPYKSLTVEKAVQNWVQFQGNVFKFPGGGTMFPHGADAYIDELASVIPIADGSVRTALDTGCGVASWGAYLLKRNVLAMSFAPKDNHEAQVQFALERGVPAVIGVLGTIHLPYPSRAFDMAQCSRCLIPWTSNEGMYLMEVDRVLRPGGYWILSGPPINWKTYYQTWKRSKEDLKAEQTKLEELAESLCWEKKYEKGDIAIWRKKINAKSCKRKSPNVCGLDNADDVWYQKMEVCKTPLPEVTSKNEVAGGELQKFPARLFAVPPRIAQGAIPGVTAESYQEDNKLWKKHVNAYKRMNKLIGTTRYRNVMDMNAGLGGFAAALESQKSWVMNVVPSIAENTLGVVYERGLIGIYHDWCEGFSTYPRTYDLIHANGLFSIYQDKCNLEDILLEMDRILRPEGAIIIRDEVDVLNQVKKIVGGMRWDAKLVDHEDGPLVPEKILVALKVYWVGTSKNKTSNEE

SEQ ID NO: 59483 - protein, 510 aa, Glycine max
  peptide (1)..(510): Ceres Seq. ID no. 14312183
MTFPRENMIYRERHCPAEKEKLRCLIPAPEGYTTPFPWPKSRDYAYYANVPYKSLTVEKAVQNWVQFQGNVFKFPGGGTMFPHGADAYIDELASVIPIADGSVRTALDTGCGVASWGAYLLKRNVLAMSFAPKDNHEAQVQFALERGVPAVIGVLGTIHLPYPSRAFDMAQCSRCLIPWTSNEGMYLMEVDRVLRPGGYWILSGPPINWKTYYQTWKRSKEDLKAEQTKLEELAESLCWEKKYEKGDIAIWRKKINAKSCKRKSPNVCGLDNADDVWYQKMEVCKTPLPEVTSKNEVAGGELQKFPARLFAVPPRIAQGAIPGVTAESYQEDNKLWKKHVNAYKRMNKLIGTTRYRNVMDMNAGLGGFAAALESQKSWVMNVVPSIAENTLGVVYERGLIGIYHDWCEGFSTYPRTYDLIHANGLFSIYQDKCNLEDILLEMDRILRPEGAIIIRDEVDVLNQVKKIVGGMRWDAKLVDHEDGPLVPEKILVALKVYWVGTSKNKTSNEE

SEQ ID NO: 59484 - DNA, 892 bp, Glycine max
  misc_feature (1)..(892): Ceres Seq. ID no. 14307709
gttgtgtacttgtgtttcaattcattcttcggttgttctctatttgcgttttctcattttctttctttcgttctcttccgtggaacgagtagtagaaacttgaaatcaaaaggcagcgggggaaaaagaaaagagagaagtagggttcgaaaatggcagcagaatcatcagagggcgaagaagaaaccaagttaagcggaggtaaccaattgctcatagttgacgatgacttaacggaaatgggaaagaaagccgcttggagcgtgagttcctgcaaacccggtaacggcgtttcctctctccgtgacgacaatctcgaaacttattggcaatccgacggagggcaaccccatttagttaacattcagtttcagaagaaagttagacttcaattaattgtgctgtacgtggatttcaagcttgacgagagttacacgccgagcaaagtttccatccgtgccggtgatggttttcacaacttgaaggagattaagaccgtggaactcgtgaagccaactgggtgggtttatctttccttgtctggagttgatcctagggatacctttgtgaatactttcatgttgcaaattgctgtgttgtcaaaccatctcaatggaagggatactcacgtgcggcagatcaaagtttacgggcctcgaccgaaccctatcccacatcagccattccaatttacttcaagggaattcatcacctactcttctataagatgagagtttatggaaggatttgatgaagccaccaagtgttaaatcaaaggatgcttcccactaagttattatagcatctggaaggtctgaaaccaaatcactacagaccgaaatgtcaaaaatacatttcacttcaatagtattcttaaaaattgtcatatcag

SEQ ID NO: 59485 - protein, 192 aa, Glycine max
  peptide (1)..(192): Ceres Seq. ID no. 14307710
MAAESSEGEEETKLSGGNQLLIVDDDLTEMGKKAAWSVSSCKPGNGVSSLRDDNLETYWQSDGGQPHLVNIQFQKKVRLQLIVLYVDFKLDESYTPSKVSIRAGDGFHNLKEIKTVELVKPTGWVYLSLSGVDPRDTFVNTFMLQIAVLSNHLNGRDTHVRQIKVYGPRPNPIPHQPFQFTSREFITYSSIR

SEQ ID NO: 59486 - protein, 163 aa, Glycine max
  peptide (1)..(163): Ceres Seq. ID no. 14307711
MGKKAAWSVSSCKPGNGVSSLRDDNLETYWQSDGGQPHLVNIQFQKKVRLQLIVLYVDFKLDESYTPSKVSIRAGDGFHNLKEIKTVELVKPTGWVYLSLSGVDPRDTFVNTFMLQIAVLSNHLNGRDTHVRQIKVYGPRPNPIPHQPFQFTSREFITYSSIR

SEQ ID NO: 59487 - DNA, 1068 bp, Glycine max
  misc_feature (1)..(1068): Ceres Seq. ID no. 15224956
gccgatgaaattgacttctttgggttcggcggtaccctacacttagttgttgtgttgctgtgcacccggtgagcggtgacctcttccgctttgatcttcttctgtccaggctggttacttgggtcaaagatttctggcatctctgtcatggcaactagacttcagtttgagaataattgtgaagttggagtcttctcaaaacttaccaatgcctattgtttggttgctattggaggttccgaaaacttctacagtgcatttgaggctgagttagcagatgttatccctgtggtcaagacctccattggtggcactcgtattgttggtcgtctttgtgttggaaacaagaacgggcttctcttgccccataccatcacagaccaagagcttcaacatttgagaaacagtctacctgatcaagttgttgttcagcgtatagaagaaagattatccgctctgggaaattgtatagcatgtaatgaccatgtggccctcacacacactgatcttgacaaggaaactgaggagatgattgcagatgttctgggagtagaagttttcaggcagacagttgccggtaatattcttgtgggcagttactgtgtattctccaacagaggtggtttggtccaccctcatacttccatcgaagacttggatgaactttctacacttcttcaggttcctttggttgccgggactgtcaatcgtggtagcgaagtaatagctgctgggatgacggtaaatgattggacagcattttgtggttcagacaccacagcaacagagctctctgtgattgagagtgttttcaagctgagagaagcccaacccagcgccattgtcgatgagatgaggaaatcactcattgatacttatgtctaaatattgctcatgttctactgcttgttgctaagatattccagttttgtgtcagtttttcccggtgaacagtttgtgatagttttatcatctaaaatatgaatgtttatttcaatcaagaatcatggtttccattaattgtatgtcatcttttatttcaatcaaagatatggatgcttttacgtc

SEQ ID NO: 59488 - protein, 245 aa, Glycine max
  peptide (1)..(245): Ceres Seq. ID no. 15224957
MATRLQFENNCEVGVFSKLTNAYCLVAIGGSENFYSAFEAELADVIPVVKTSIGGTRIVGRLCVGNKNGLLLPHTITDQELQHLRNSLPDQVVVQRIEERLSALGNCIACNDHVALTHTDLDKETEEMIADVLGVEVFRQTVAGNILVGSYCVFSNRGGLVHPHTSIEDLDELSTLLQVPLVAGTVNRGSEVIAAGMTVNDWTAFCGSDTTATELSVIESVFKLREAQPSAIVDEMRKSLIDTYV

SEQ ID NO: 59489 - DNA, 566 bp, Glycine max
  misc_feature (1)..(566): Ceres Seq. ID no. 13593925
aaaacccatcaaattctttctaactcttacgtctattttcccccctcttcctctctctctttctctaatggagttcctcactttactttatggtgctatggcattgtacttgtgtttcctgatctggaaactgtttgatcagagaagggaccaagagagttacatattggactaccaactttacaagccaagcgatgaaagaaagcttggaactgaactctgtgggaagatcatagggaggaacaagcaattgggtctgaacgagtacaagttcctcctcaaggccattgtcaactctggcattggtgaggaaacttatgccccaagaaacgtcatcgagggccgagagacgaatccaacattggatgatagtgtcacagaaatggaggagtttttccatgacagcattgccaaactcctcgaaaggtcagggatttccccctcacagatcgatgtgcttgtggtgaatgtgtccatgttcgctgtagttccttccttaacttcaagaatcattaaccactacaagatgagggaggacataaaggcttacaacctcactgggatgg

SEQ ID NO: 59490 - protein, 188 aa, Glycine max
  peptide (1)..(188): Ceres Seq. ID no. 13593926
KPIKFFLTLTSIFPPLPLSLSLMEFLTLLYGAMALYLCFLIWKLFDQRRDQESYILDYQLYKPSDERKLGTELCGKIIGRNKQLGLNEYKFLLKAIVNSGIGEETYAPRNVIEGRETNPTLDDSVTEMEEFFHDSIAKLLERSGISPSQIDVLVVNVSMFAVVPSLTSRIINHYKMREDIKAYNLTGM

SEQ ID NO: 59491 - protein, 166 aa, Glycine max
  peptide (1)..(166): Ceres Seq. ID no. 13593927
MEFLTLLYGAMALYLCFLIWKLFDQRRDQESYILDYQLYKPSDERKLGTELCGKIIGRNKQLGLNEYKFLLKAIVNSGIGEETYAPRNVIEGRETNPTLDDSVTEMEEFFHDSIAKLLERSGISPSQIDVLVVNVSMFAVVPSLTSRIINHYKMREDIKAYNLTGM

SEQ ID NO: 59492 - protein, 156 aa, Glycine max
  peptide (1)..(156): Ceres Seq. ID no. 13593928
MALYLCFLIWKLFDQRRDQESYILDYQLYKPSDERKLGTELCGKIIGRNKQLGLNEYKFLLKAIVNSGIGEETYAPRNVIEGRETNPTLDDSVTEMEEFFHDSIAKLLERSGISPSQIDVLVVNVSMFAVVPSLTSRIINHYKMREDIKAYNLTGM

SEQ ID NO: 59493 - DNA, 1731 bp, Glycine max
  misc_feature (1)..(1731): Ceres Seq. ID no. 14307218
taaacctcttacactacgtaatactccctttatcaaacctgatatgtctccagacccactaagtggagctttaggtgtttacaagaagaattgaataacttttcccaattactagctaaataatttttatggcatttttcataaaatatccaaatgctgaaactttctccctttggcacatccaatataattcatgcatttcatttcaacattttatcatatatttttcctaagtgattttctttctagtttcaaaagtaaccgaaatgacggatcctcctaaagaacaagaacaccaggaatccatagtttcaccttccacagatgaagctttgacatcttcgaaacgtggaaggtcacgaaaaacaaagcctaccaagttcataattaaccagaaatccaataccccatcaacaccccgaagatctaaaagaataaagcatgtggcagataaaactgccaacaatgttcccgaagtatcttcatccgaggaattattgaagggacgtacagctgaaaattcacaagtagatggcaaagaagtctcttcagatatcgatgccttagtaatctacaaaagaaaaagactacctcgaaggaggtcttctggtcaaataggcaagtccccaaagaaaactgttcctacagagcctccaactgctgcaatttcaagctctactactgcatcacctcctcatcaagatcctcctgcagctgctccagccaatgctgatgcttctcatattgaaaatacaaacactgctgagccagtattgagtaaaagccttgtcgaagaggtcgggaaagtgaaccctgctccagccaatgctcaagaacaaattgcttccagcaagggtcaagaatctccagatcaagttgactcaaaggctgatgaagtctctactgggaacaccccactcgatctagaagccattaacaaaatgattgaagatgaccctttgagtgctattgaaaatattctgacagggaaggtttccatttcttccaagactccacaatctatcactcaggcagaacaaccaaaagttcaaggctcccctgcagatgttctgtctaaagagctaaaagacttaatgcagacctttagcttaggtgattttgttactgactatgaacaaatgtcaaaggtcctacttattcttgaagagttgcagaagaatgagaagtttctttctcatgaacagcaaacattcataaaggccttcagactcttcttcaacaatgctgttactcaccgcaaagaatgtgatatggctagaataaagaaagtcgacttgaaccgagctaaagaagatatccttcgcaaactgcaagaagttaaacatacacaggaacaaatcacaatgtccatttcaaatgccgacaacagggtcaatgaaatatcttcttgtattgaacaacttgaagaacagttatacaaactgaaggaagagagggagacctttcagttggctattaaggaacgggagaaacaaagggagacattgaagaatgatagcatcttatgggctcatcagactaaggacctggtttttgatcttgcagagattgaggccaaagaaaaaatccttggacagcaacttgaagccgacaatgatgcatatgaccaatttaaagcgtcctttcctttttaatttccatttgaacaattgatagttgtaattacactgttatgttcaattcatgtgtggtttagttcatgtatgtttg

SEQ ID NO: 59494 - protein, 462 aa, Glycine max
  peptide (1)..(462): Ceres Seq. ID no. 14307219
MTDPPKEQEHQESIVSPSTDEALTSSKRGRSRKTKPTKFIINQKSNTPSTPRRSKRIKHVADKTANNVPEVSSSEELLKGRTAENSQVDGKEVSSDIDALVIYKRKRLPRRRSSGQIGKSPKKTVPTEPPTAAISSSTTASPPHQDPPAAAPANADASHIENTNTAEPVLSKSLVEEVGKVNPAPANAQEQIASSKGQESPDQVDSKADEVSTGNTPLDLEAINKMIEDDPLSAIENILTGKVSISSKTPQSITQAEQPKVQGSPADVLSKELKDLMQTFSLGDFVTDYEQMSKVLLILEELQKNEKFLSHEQQTFIKAFRLFFNNAVTHRKECDMARIKKVDLNRAKEDILRKLQEVKHTQEQITMSISNADNRVNEISSCIEQLEEQLYKLKEERETFQLAIKEREKQRETLKNDSILWAHQTKDLVFDLAEIEAKEKILGQQLEADNDAYDQFKASFPF

SEQ ID NO: 59495 - protein, 237 aa, Glycine max
  peptide (1)..(237): Ceres Seq. ID no. 14307220
MIEDDPLSAIENILTGKVSISSKTPQSITQAEQPKVQGSPADVLSKELKDLMQTFSLGDFVTDYEQMSKVLLILEELQKNEKFLSHEQQTFIKAFRLFFNNAVTHRKECDMARIKKVDLNRAKEDILRKLQEVKHTQEQITMSISNADNRVNEISSCIEQLEEQLYKLKEERETFQLAIKEREKQRETLKNDSILWAHQTKDLVFDLAEIEAKEKILGQQLEADNDAYDQFKASFPF

SEQ ID NO: 59496 - DNA, 1749 bp, Glycine max
  misc_feature (1)..(1749): Ceres Seq. ID no. 14303440
gattcacacctccacactgtctctatcaccaatcccttatatcccccctccacttagcataccataattcaccgtcaatttccccattgatgatccatttggcatttcatcatatttcaccacttgtcctactccacttggataatttcctaacgtatagttttcaaaaatccttgttcttcatgagcttatagtttatgagtcctacgatttttggcaattcagcaacactatagatatatcttaggctaagagaagccttagcagcaactcaaatccaaaagtgtaagcctttcttcttgttattagtccatcttcaccaatggaagagaatatgaagtgtgaactagttggtctcattgatgagttaatgcaagggaaggagctagcaaagcagctttgtgaccatctagtctcattatcatcatcatcttctcatgaaacaaatgaagtcctaattgagaaaatactttccacctatgagaaagcacttgccatgctgaattgcaaggctaatgtaggagaaagtaaggccaacattaatggcagcatgatggattccccttgttctttcacaaatggtagccccaaaagtgaggtcatggagcctgagattaagaacaaagatgtctttaagaaaagaaagaccatgtcaacgtgcacagaacaagtgaaggtgtgcttgggaacggcgcatgaaggatctctggatgatggctatagttggagaaaatatggacagaaggatattctcggagctaagtttccaagaggatattacagatgcacatatagaaatgtacaaggatgtctggccacaaagcaggtgcaaaagtcagatgaagacccaatgatatgtgaaataacctacaaaggaagacacacatgcacccaagcaagtcacttaaacaaaacagtgatacccccatcaaagacaaaggtgaacttgttgggagaaaataagcaccaaacccatcaaattaagaatcaaccacggcaagagaaaatagaacaacaaccaccagagacatttttcacatttggatcatcatcaggtcttgaagttaaaatagaggacatcgaccacaaggagggcatattcccatcattttgcttttcttctccatcaatagtagggtcagaaaatggggacgacaacaacagcagcatattctcatacaccatgattgagaacaacttaatggaaagcttctctcctgccttcatatctccaacaacttcagatatagaatcaaacactttctgccactgggggagcactggactaggccaaagtgtgcaaagctcagggtctgatatcactgatatagtttcagcaccaacttcagtcaccaattcaccaataatggaccttgatttctttttcgataagatcgatttcgacacagatttccctttgagcaccatggaactttgcacttaataaattgtccccacttctaagtttacagcatatgtgatttctatgcggattaactgtgagttttgtagatcctgactagcaccataaccgagggaaggaagtctataataatcaccatagatcatgtccataaatgaagacaatgaaaaacttccctcttgtgctaattaagagagttttcatgtacctaggctgcaatgtgaaaataatttgtaggttgtagcttaatttggtgcatgtttggtttgcaatggaaattgttgtaatgcgcgttccaatgtagatcttatggataaaagtaaaac

SEQ ID NO: 59497 - protein, 373 aa, Glycine max
  peptide (1)..(373): Ceres Seq. ID no. 14303441
MEENMKCELVGLIDELMQGKELAKQLCDHLVSLSSSSSHETNEVLIEKILSTYEKALAMLNCKANVGESKANINGSMMDSPCSFTNGSPKSEVMEPEIKNKDVFKKRKTMSTCTEQVKVCLGTAHEGSLDDGYSWRKYGQKDILGAKFPRGYYRCTYRNVQGCLATKQVQKSDEDPMICEITYKGRHTCTQASHLNKTVIPPSKTKVNLLGENKHQTHQIKNQPRQEKIEQQPPETFFTFGSSSGLEVKIEDIDHKEGIFPSFCFSSPSIVGSENGDDNNSSIFSYTMIENNLMESFSPAFISPTTSDIESNTFCHWGSTGLGQSVQSSGSDITDIVSAPTSVTNSPIMDLDFFFDKIDFDTDFPLSTMELCT

SEQ ID NO: 59498 - protein, 369 aa, Glycine max
  peptide (1)..(369): Ceres Seq. ID no. 14303442
MKCELVGLIDELMQGKELAKQLCDHLVSLSSSSSHETNEVLIEKILSTYEKALAMLNCKANVGESKANINGSMMDSPCSFTNGSPKSEVMEPEIKNKDVFKKRKTMSTCTEQVKVCLGTAHEGSLDDGYSWRKYGQKDILGAKFPRGYYRCTYRNVQGCLATKQVQKSDEDPMICEITYKGRHTCTQASHLNKTVIPPSKTKVNLLGENKHQTHQIKNQPRQEKIEQQPPETFFTFGSSSGLEVKIEDIDHKEGIFPSFCFSSPSIVGSENGDDNNSSIFSYTMIENNLMESFSPAFISPTTSDIESNTFCHWGSTGLGQSVQSSGSDITDIVSAPTSVTNSPIMDLDFFFDKIDFDTDFPLSTMELCT

SEQ ID NO: 59499 - protein, 357 aa, Glycine max
  peptide (1)..(357): Ceres Seq. ID no. 14303443
MQGKELAKQLCDHLVSLSSSSSHETNEVLIEKILSTYEKALAMLNCKANVGESKANINGSMMDSPCSFTNGSPKSEVMEPEIKNKDVFKKRKTMSTCTEQVKVCLGTAHEGSLDDGYSWRKYGQKDILGAKFPRGYYRCTYRNVQGCLATKQVQKSDEDPMICEITYKGRHTCTQASHLNKTVIPPSKTKVNLLGENKHQTHQIKNQPRQEKIEQQPPETFFTFGSSSGLEVKIEDIDHKEGIFPSFCFSSPSIVGSENGDDNNSSIFSYTMIENNLMESFSPAFISPTTSDIESNTFCHWGSTGLGQSVQSSGSDITDIVSAPTSVTNSPIMDLDFFFDKIDFDTDFPLSTMELCT

SEQ ID NO: 59500 - DNA, 2206 bp, Glycine max
  misc_feature (1)..(2206): Ceres Seq. ID no. 14303524
gaagatggcaacgttcacataccacgtagaaacagttcaatcattcttagccctaagcagacttcacatactcatccacttagtggcagtgttgtctctctgttactaccgcatcacccacttcttcctccaacctccaacagcgccatggcttctcatgactgctgcggagcttcttctctcgctgctctggttcttcaaccaagccttccggtggcgaccggtgtcgcggagcgtcatgactgagaagcttccgagtgaggagaagctgccggggcttgacatcttcgtgtgcacgctcgatcccgagaaggagcccaccgtggaggtcattgacaccatcatctccgccgtgtccatggattacccctccgacaagctttccgtctatctctccgacgacggcgggtgcgacgtgactctctatgggatccgagaggctgctgagttcgccaaggagtgggttccgttctgtaaaaagtatggggtgaagtcaaggtgtcccaaagtcttcttctctccctttggggatgaggatcaagagactcttcgggacgatcaattcagaacacagagagacctcgtcaaggctaaatacgagaaaatgcagaaaaatatcgagaaatttggttcagaccctaaaagtcgtcgtattgtgagtgacagacaacctcgtattgagattataaatgaccaaccgggaatgccacttattgtttatgtgtctcgcgaaagaaggccatcccttcctcacaaattcaaaggaggagccgtcaacacattgctcagagtctcaggtttaatcagtaatggaccttatgttctagtaatggactgtgatatgtatagcaatgatccaacctctgccaaacaagccatgtgcttctttcttgatcctgaaacgtccaaatatattgcatttgttcaattccctcaaatgtttcacaaccttagcaaaaaggacatttatgatagtcaagctagaactgcttttaagacaatgtggcaaggcatggatggactaagaggtccaggtctttctggcagcggcaattacttaagtagaagtgctttactatttggaagtccaaaccaaaaagatgactatctgcaagatgcacaaaagtacttcggcaagtctaccgcctacattgaatcactgaaggccatccgtggacagaaaagtagcaaaaagaatatttcaagagatgaaatgttaagagaagctcaagtagtggcctcttgttcctacgaaaataacacaaattggggcacagaggtgggattctcatatggcatattactagagagttctattactggctatattcttcacagcagaggatggaaatcagcatatctttacccgaaaacaccatgtttcttaggttgtgctcccactgacatcaaggaaggcatgcttcagttggttaagtggttgtctgaacttttgttgcttggtgtctcctccaaatacagcccattcacttatggattttcaagaatgtccatacttcacacattcacttattgcttcatcacaatgtcatccctttatgctgttgtcttcatcctctacggcattgtacctcaagtatgcctcctcaaaggaatccctgtgtttccaaaggccacagacccttggtttgccgtgtttgcatttgtgtatgtatctactcagattcaacatttgattgagattctctctggggatggatctgtgacaatgtggtgggatgaacaaagaatttggattctgaagtcagttaccagcatatttgcaattatagatggaatcaagaagtggttggggttgagcaaggtgaaattcaacttgtcaaacaaagccattgacaaagagaagctcaagaaatatgagcaaggtagattcgatttccaaggtgcagctgtgttcatggctccattggttctattactcacagccaacattgttagcttcttagttggtatatggagactatttaatttcaatgtgaaggattttgaagaaatgtttggtcaacttttcttagttacctatgtaatggttcttagttatccacttcttgaggccatggtaacaatgaaaagcaagagtggatagtgaaatttggtcacaaataattaggctcattcaagagtctaaattgattatgtatcttgagatgaaattgcttaatgcaatcttgttcgttcagtttaaaag

SEQ ID NO: 59501 - protein, 700 aa, Glycine max
  peptide (1)..(700): Ceres Seq. ID no. 14303525
KMATFTYHVETVQSFLALSRLHILIHLVAVLSLCYYRITHFFLQPPTAPWLLMTAAELLLSLLWFFNQAFRWRPVSRSVMTEKLPSEEKLPGLDIFVCTLDPEKEPTVEVIDTIISAVSMDYPSDKLSVYLSDDGGCDVTLYGIREAAEFAKEWVPFCKKYGVKSRCPKVFFSPFGDEDQETLRDDQFRTQRDLVKAKYEKMQKNIEKFGSDPKSRRIVSDRQPRIEIINDQPGMPLIVYVSRERRPSLPHKFKGGAVNTLLRVSGLISNGPYVLVMDCDMYSNDPTSAKQAMCFFLDPETSKYIAFVQFPQMFHNLSKKDIYDSQARTAFKTMWQGMDGLRGPGLSGSGNYLSRSALLFGSPNQKDDYLQDAQKYFGKSTAYIESLKAIRGQKSSKKNISRDEMLREAQVVASCSYENNTNWGTEVGFSYGILLESSITGYILHSRGWKSAYLYPKTPCFLGCAPTDIKEGMLQLVKWLSELLLLGVSSKYSPFTYGFSRMSILHTFTYCFITMSSLYAVVFILYGIVPQVCLLKGIPVFPKATDPWFAVFAFVYVSTQIQHLIEILSGDGSVTMWWDEQRIWILKSVTSIFAIIDGIKKWLGLSKVKFNLSNKAIDKEKLKKYEQGRFDFQGAAVFMAPLVLLLTANIVSFLVGIWRLFNFNVKDFEEMFGQLFLVTYVMVLSYPLLEAMVTMKSKSG

SEQ ID NO: 59502 - protein, 699 aa, Glycine max
  peptide (1)..(699): Ceres Seq. ID no. 14303526
MATFTYHVETVQSFLALSRLHILIHLVAVLSLCYYRITHFFLQPPTAPWLLMTAAELLLSLLWFFNQAFRWRPVSRSVMTEKLPSEEKLPGLDIFVCTLDPEKEPTVEVIDTIISAVSMDYPSDKLSVYLSDDGGCDVTLYGIREAAEFAKEWVPFCKKYGVKSRCPKVFFSPFGDEDQETLRDDQFRTQRDLVKAKYEKMQKNIEKFGSDPKSRRIVSDRQPRIEIINDQPGMPLIVYVSRERRPSLPHKFKGGAVNTLLRVSGLISNGPYVLVMDCDMYSNDPTSAKQAMCFFLDPETSKYIAFVQFPQMFHNLSKKDIYDSQARTAFKTMWQGMDGLRGPGLSGSGNYLSRSALLFGSPNQKDDYLQDAQKYFGKSTAYIESLKAIRGQKSSKKNISRDEMLREAQVVASCSYENNTNWGTEVGFSYGILLESSITGYILHSRGWKSAYLYPKTPCFLGCAPTDIKEGMLQLVKWLSELLLLGVSSKYSPFTYGFSRMSILHTFTYCFITMSSLYAVVFILYGIVPQVCLLKGIPVFPKATDPWFAVFAFVYVSTQIQHLIEILSGDGSVTMWWDEQRIWILKSVTSIFAIIDGIKKWLGLSKVKFNLSNKAIDKEKLKKYEQGRFDFQGAAVFMAPLVLLLTANIVSFLVGIWRLFNFNVKDFEEMFGQLFLVTYVMVLSYPLLEAMVTMKSKSG

SEQ ID NO: 59503 - protein, 648 aa, Glycine max
  peptide (1)..(648): Ceres Seq. ID no. 14303527
MTAAELLLSLLWFFNQAFRWRPVSRSVMTEKLPSEEKLPGLDIFVCTLDPEKEPTVEVIDTIISAVSMDYPSDKLSVYLSDDGGCDVTLYGIREAAEFAKEWVPFCKKYGVKSRCPKVFFSPFGDEDQETLRDDQFRTQRDLVKAKYEKMQKNIEKFGSDPKSRRIVSDRQPRIEIINDQPGMPLIVYVSRERRPSLPHKFKGGAVNTLLRVSGLISNGPYVLVMDCDMYSNDPTSAKQAMCFFLDPETSKYIAFVQFPQMFHNLSKKDIYDSQARTAFKTMWQGMDGLRGPGLSGSGNYLSRSALLFGSPNQKDDYLQDAQKYFGKSTAYIESLKAIRGQKSSKKNISRDEMLREAQVVASCSYENNTNWGTEVGFSYGILLESSITGYILHSRGWKSAYLYPKTPCFLGCAPTDIKEGMLQLVKWLSELLLLGVSSKYSPFTYGFSRMSILHTFTYCFITMSSLYAVVFILYGIVPQVCLLKGIPVFPKATDPWFAVFAFVYVSTQIQHLIEILSGDGSVTMWWDEQRIWILKSVTSIFAIIDGIKKWLGLSKVKFNLSNKAIDKEKLKKYEQGRFDFQGAAVFMAPLVLLLTANIVSFLVGIWRLFNFNVKDFEEMFGQLFLVTYVMVLSYPLLEAMVTMKSKSG

SEQ ID NO: 59504 - DNA, 1190 bp, Glycine max
  misc_feature (1)..(1190): Ceres Seq. ID no. 14307492
acgttgtcatcaaatcaaaacacatcacttcacttcacttcccttctctctctcttcgacgtacatttccatcttattagggtttctttccatggattccgattcttggatttccacgcgcatgtcgtcctcttcacgccgctatcattcgcgatctgatctgtacgtggaggagagtgaagggagcgatgatttcagggcggagtttctgtgccctttctgcgccgaggattacgacgtcgtttccctctgttgccacattgacgaccaccaccctatccaagccaaaaacggggtgtgtcccatttgtgggaagaaggtgggattggatctcgttggacatattactacgcaacatgggaacttcttgagggtgcagcgtaaaaggagggtcaggaaagtaggctctggttcaacaatgtctatattgagaaaagagttacgagaaggagccttgcactcccttcttggaggttcttcatacttagcttcctgcaattctgagcctgatcctctgttatcatcttttatgtttaacccagctgtaactgatgattctgcgagtgcaaaacctccttctgttgaagatgctctagtaaaagaaagttcaaaagacgatttcttggaaagaaaacctcaacagttacagctgtcagaagaagatcaagtagagaaggctcggaggtttgaattcgtgcaaggacttctgatgtccaccattcttgatgatatgttatgactgcatctgtagctcatatgccattattgtattaggagctggagctataagcaagagaaagatagagttatgcaaaatgatacgaagtggtagtagctgcatcggataaaatatgcaatttgtctatagttatgttcataaaatgcaacctttttttatatcctgcttgtgttctatgttagttccaaataatcaatggaaataaaattcgtttcacgagcatgggaacagcagaattcgtagaccatttttctgttttttttaggtttgtcttctagaatttagtcgatgacccatgtatataaaaagtgtgagagtgctcgagtgttgtcaatttgagctagtcttctgcaccaattggttgaattttcgtatggagcttgacgagaagagttgttgttgggaccaagtataagttcgttattagttaaatgtttcaaaatatctgatc

SEQ ID NO: 59505 - protein, 245 aa, Glycine max
  peptide (1)..(245): Ceres Seq. ID no. 14307493
RCHQIKTHHFTSLPFSLSSTYISILLGFLSMDSDSWISTRMSSSSRRYHSRSDLYVEESEGSDDFRAEFLCPFCAEDYDVVSLCCHIDDHHPIQAKNGVCPICGKKVGLDLVGHITTQHGNFLRVQRKRRVRKVGSGSTMSILRKELREGALHSLLGGSSYLASCNSEPDPLLSSFMFNPAVTDDSASAKPPSVEDALVKESSKDDFLERKPQQLQLSEEDQVEKARRFEFVQGLLMSTILDDML

SEQ ID NO: 59506 - protein, 215 aa, Glycine max
  peptide (1)..(215): Ceres Seq. ID no. 14307494
MDSDSWISTRMSSSSRRYHSRSDLYVEESEGSDDFRAEFLCPFCAEDYDVVSLCCHIDDHHPIQAKNGVCPICGKKVGLDLVGHITTQHGNFLRVQRKRRVRKVGSGSTMSILRKELREGALHSLLGGSSYLASCNSEPDPLLSSFMFNPAVTDDSASAKPPSVEDALVKESSKDDFLERKPQQLQLSEEDQVEKARRFEFVQGLLMSTILDDML

SEQ ID NO: 59507 - protein, 205 aa, Glycine max
  peptide (1)..(205): Ceres Seq. ID no. 14307495
MSSSSRRYHSRSDLYVEESEGSDDFRAEFLCPFCAEDYDVVSLCCHIDDHHPIQAKNGVCPICGKKVGLDLVGHITTQHGNFLRVQRKRRVRKVGSGSTMSILRKELREGALHSLLGGSSYLASCNSEPDPLLSSFMFNPAVTDDSASAKPPSVEDALVKESSKDDFLERKPQQLQLSEEDQVEKARRFEFVQGLLMSTILDDML

SEQ ID NO: 59508 - DNA, 1384 bp, Glycine max
  misc_feature (1)..(1384): Ceres Seq. ID no. 12607391
gttagttgaggtgtccactgaaatggtgtccttcatgagaccttggaattgaaacgaacgtcgaagggacgtgtctgactccgatggcttcctcataccgtgaccgtacgtcggagttccgattactatcggagactatgaagaagatcggaggtccggttcaacccgagaatcctccttcgacctctcgcggcggcgagtcgtcgtattcgagatccgaattcaaccgaaaggcctcgcgaatcgggttggggatccacgagacctcgcagaagatcgcgaggctcgcgcagctggcgaggaaatcgtccatgttcaacgatcccgccgtggagattcaggagctgactgttctgatcaagaacgagatcacgacactgaactcggctctctccgatttgcaaaccattcagaacacggatatggctgacggcggttactcgcaggatacgattgtgcattccaccgcggtttgtgatgacttgaagagcaaactcatgggagccacaaaacaccttcaagatgtcttaactgctaggacagagaatatcaaggctcatgagaacaggaagcagatattttccaagaatgcatcaagagagaaccctttccagcatcagccaaagccagctaatgagccgccaccttggtcaaattcatcgaatgcatcagagagtttgcaacaagaatcagcattaccatcaaatggagctcctgttggcaatcaactaagacgaaggttggctgtggacaacactccatcccagcaaatggaaatgtctatggtacagcaggttgtgcctcggcatgaaaactatgctcaaagtcgagcaactgctctgcacaatgtggaatctactatcacagaactaagtgggattttctcacatttggctacaatggttgcccatcaaggggagcttgctatcaggattgatgacaatatggatgagtcattggcaaatgttgaaggagctcacagttctttattgaggcatctcaaccgaatatcatcaaataggtggcttctaataaagatatttgccattctgatacttttcctcacgatcttcatattctttgtcgcctaatatacttccatatgctaatcatggaagtttcacttcgtggcttacttggatttgttttcgttcttctgtggagacaaaaacacaagagcaggtaaatgtgcggatgtattctatttgaatgtagatagagagctccgtcatctgtaaacattttacaatattcccatattcttagtttggcaatcattataggtgttattaaaatttcgttggtatgtaatccccatattaagcaaattgagtaagaaatatacgagtgtttggtaaattgatatagattcataatatttttc

SEQ ID NO: 59509 - protein, 335 aa, Glycine max
  peptide (1)..(335): Ceres Seq. ID no. 12607392
MASSYRDRTSEFRLLSETMKKIGGPVQPENPPSTSRGGESSYSRSEFNRKASRIGLGIHETSQKIARLAQLARKSSMFNDPAVEIQELTVLIKNEITTLNSALSDLQTIQNTDMADGGYSQDTIVHSTAVCDDLKSKLMGATKHLQDVLTARTENIKAHENRKQIFSKNASRENPFQHQPKPANEPPPWSNSSNASESLQQESALPSNGAPVGNQLRRRLAVDNTPSQQMEMSMVQQVVPRHENYAQSRATALHNVESTITELSGIFSHLATMVAHQGELAIRIDDNMDESLANVEGAHSSLLRHLNRISSNRWLLIKIFAILILFLTIFIFFVA

SEQ ID NO: 59510 - protein, 317 aa, Glycine max
  peptide (1)..(317): Ceres Seq. ID no. 12607393
MKKIGGPVQPENPPSTSRGGESSYSRSEFNRKASRIGLGIHETSQKIARLAQLARKSSMFNDPAVEIQELTVLIKNEITTLNSALSDLQTIQNTDMADGGYSQDTIVHSTAVCDDLKSKLMGATKHLQDVLTARTENIKAHENRKQIFSKNASRENPFQHQPKPANEPPPWSNSSNASESLQQESALPSNGAPVGNQLRRRLAVDNTPSQQMEMSMVQQVVPRHENYAQSRATALHNVESTITELSGIFSHLATMVAHQGELAIRIDDNMDESLANVEGAHSSLLRHLNRISSNRWLLIKIFAILILFLTIFIFFVA

SEQ ID NO: 59511 - protein, 259 aa, Glycine max
  peptide (1)..(259): Ceres Seq. ID no. 12607394
MFNDPAVEIQELTVLIKNEITTLNSALSDLQTIQNTDMADGGYSQDTIVHSTAVCDDLKSKLMGATKHLQDVLTARTENIKAHENRKQIFSKNASRENPFQHQPKPANEPPPWSNSSNASESLQQESALPSNGAPVGNQLRRRLAVDNTPSQQMEMSMVQQVVPRHENYAQSRATALHNVESTITELSGIFSHLATMVAHQGELAIRIDDNMDESLANVEGAHSSLLRHLNRISSNRWLLIKIFAILILFLTIFIFFVA

SEQ ID NO: 59512 - DNA, 1391 bp, Glycine max
  misc_feature (1)..(1391): Ceres Seq. ID no. 14307801
acactttttttgtctgttgaatcttgcgcttttagcttttatccattgaatagcaagagaccccttttgttcccttttgttttttagtcctttaaacattcttggcttctttgcagagctggaattttcactcttcaacccacattgttttgatcccaaatcagaaaaaaaaaaaaaaaaaattgggtttgatatgatccgtaagctgaaaggctgaaactagtatcattggagacaccctttttcatctcataatttgaggttgatcaacgagatcgtttcgttcagagttcagactaatcatggcgtgttccttgaacagtgttttctgtgttcctgacttgaatgagagcatgtttggttccagaaccaaaggggctttagtgccttgtccttcaaaaactggcaaagttaaatcatggggttgttctgttttgagtaatgctttcatgggaaaatccatttctcttgatgaaaagggttcaggatgttgcaactcaaaatcctccagtaatatccctgttcatgcacaagcaacaatttgtgttagcaaggctttgaagtggtggaagaagaccctaaagcctaatatgattgagatccattcagcacaagaactggtccattctttggtcaacgctggcgattcattgcttgtggttgatttctattcacttggttgtggaggctgcaaagcccttcatcctaagatctgtcaaatagctgaattgtacccaaatgcaacctttctgaaagtcaattacgaggaactgaaaacaatgtgtcacggtttacgaattcacgtgttacccttcttcaggttctatagaggttcggagggtcgagtttgtagcttcagctgtaccaatgccactatcaagaaatttaaggacgctttggcaaagcatgggagtgaacggtgtagttttggtccaacaaaaggtttggaagaatccgagttaaaaattttggcttctattggtgaaattaattcttctccgttactatgtcctaagctagggaaattggaagatttggttatggagagccatgatttttctggggtttggagcatggaaagtaatagcaggggaattatgctggatgctatatattgatttattttcaaactagctagtagggcatttattttgccatcttacagaatgaagattataatggagtaaagcacttccatatcatttgttttcctaaaatatttactgttttttattttttctgtaaattattattttattattttttttggaggggcttgtaacattattttggttggatttgagccctacaatttagcaagtgctgctgggatactatcttctgtatctgaaccctctcagattatttttaatagttctctaaatcatctt

SEQ ID NO: 59513 - protein, 271 aa, Glycine max
  peptide (1)..(271): Ceres Seq. ID no. 14307802
MACSLNSVFCVPDLNESMFGSRTKGALVPCPSKTGKVKSWGCSVLSNAFMGKSISLDEKGSGCCNSKSSSNIPVHAQATICVSKALKWWKKTLKPNMIEIHSAQELVHSLVNAGDSLLVVDFYSLGCGGCKALHPKICQIAELYPNATFLKVNYEELKTMCHGLRIHVLPFFRFYRGSEGRVCSFSCTNATIKKFKDALAKHGSERCSFGPTKGLEESELKILASIGEINSSPLLCPKLGKLEDLVMESHDFSGVWSMESNSRGIMLDAIY

SEQ ID NO: 59514 - protein, 254 aa, Glycine max
  peptide (1)..(254): Ceres Seq. ID no. 14307803
MFGSRTKGALVPCPSKTGKVKSWGCSVLSNAFMGKSISLDEKGSGCCNSKSSSNIPVHAQATICVSKALKWWKKTLKPNMIEIHSAQELVHSLVNAGDSLLVVDFYSLGCGGCKALHPKICQIAELYPNATFLKVNYEELKTMCHGLRIHVLPFFRFYRGSEGRVCSFSCTNATIKKFKDALAKHGSERCSFGPTKGLEESELKILASIGEINSSPLLCPKLGKLEDLVMESHDFSGVWSMESNSRGIMLDAIY

SEQ ID NO: 59515 - protein, 222 aa, Glycine max
  peptide (1)..(222): Ceres Seq. ID no. 14307804
MGKSISLDEKGSGCCNSKSSSNIPVHAQATICVSKALKWWKKTLKPNMIEIHSAQELVHSLVNAGDSLLVVDFYSLGCGGCKALHPKICQIAELYPNATFLKVNYEELKTMCHGLRIHVLPFFRFYRGSEGRVCSFSCTNATIKKFKDALAKHGSERCSFGPTKGLEESELKILASIGEINSSPLLCPKLGKLEDLVMESHDFSGVWSMESNSRGIMLDAIY

SEQ ID NO: 59516 - DNA, 887 bp, Glycine max
  misc_feature (1)..(887): Ceres Seq. ID no. 14303453
aattaacactcacacccttttcagtttataccaaacaaatgatgttacagccttctttcttgtgcttctctttcatgtttctcatcacactccctcttggaaaaagctctaccaccttgaatgtacccaaggacataatcaatcaaacatgccaaaaatgtgccaaccaatccatcatcttgagctacaacctatgctccacttctcttccggcggttccggtgagtcactccgcgaatctcgaagggttggcgttggttgcaatggagctagcactagagaatgtgactagcactttggccaccatagagaagctattagacagcacaagccttgataactttgcgctggggtgcttggcagattgcttggagctgtactctgatgcagcatggacaatagtgaattctgtaggggttttcctctctgggaactatgatgtaactaggatttggatgagttcggttatggaagcagcatcaacgtgccaacaaggttttactgggagaggtgaagcttctcctttgacacaggagaactataatctctttcagttgtgtggtattgcactttgcattattcatttggccacacctggagtaccttctcaattaatccacagataaatttgccagtatatgctgtctttctcatcaataaagtgagagacattgtattagtatctcaaaatggacaatattagtgagtggtggaaacgttgtatcttaatagagatggaaattaagggaggaagacagagtagagatgctagtgctagacattaatagatatagaaattagaatgatctatgttttctttattttagtttttagtagagcgaaattttttgtagtagtgaaaaagaaagaaaggtgtattattatag

SEQ ID NO: 59517 - protein, 207 aa, Glycine max
  peptide (1)..(207): Ceres Seq. ID no. 14303454
LTLTPFSVYTKQMMLQPSFLCFSFMFLITLPLGKSSTTLNVPKDIINQTCQKCANQSIILSYNLCSTSLPAVPVSHSANLEGLALVAMELALENVTSTLATIEKLLDSTSLDNFALGCLADCLELYSDAAWTIVNSVGVFLSGNYDVTRIWMSSVMEAASTCQQGFTGRGEASPLTQENYNLFQLCGIALCIIHLATPGVPSQLIHR

SEQ ID NO: 59518 - protein, 195 aa, Glycine max
  peptide (1)..(195): Ceres Seq. ID no. 14303455
MMLQPSFLCFSFMFLITLPLGKSSTTLNVPKDIINQTCQKCANQSIILSYNLCSTSLPAVPVSHSANLEGLALVAMELALENVTSTLATIEKLLDSTSLDNFALGCLADCLELYSDAAWTIVNSVGVFLSGNYDVTRIWMSSVMEAASTCQQGFTGRGEASPLTQENYNLFQLCGIALCIIHLATPGVPSQLIHR

SEQ ID NO: 59519 - protein, 194 aa, Glycine max
  peptide (1)..(194): Ceres Seq. ID no. 14303456
MLQPSFLCFSFMFLITLPLGKSSTTLNVPKDIINQTCQKCANQSIILSYNLCSTSLPAVPVSHSANLEGLALVAMELALENVTSTLATIEKLLDSTSLDNFALGCLADCLELYSDAAWTIVNSVGVFLSGNYDVTRIWMSSVMEAASTCQQGFTGRGEASPLTQENYNLFQLCGIALCIIHLATPGVPSQLIHR

SEQ ID NO: 59520 - DNA, 1198 bp, Glycine max
  misc_feature (1)..(1198): Ceres Seq. ID no. 14313038
agtttactttagagaggttttatttttatctcgcgtgaagtatcaagtgggaaatttcttttattaggtgatgttggaattagtgcttcaggtgtaataattcttgtggagaaattcacattcacaattgctactagtcttgactcttgagaatatttcatcaattcccttcttcccttttatgtttgatctttatttgacattgaccttgctgaaagcatacgttttggccagcaaaattcatcattccctttttgtactattattattattattattagtgcacctttaatgttaggttgataaaagttgttacaatttagctttcattaattggggtattttagaataggcatgttgttcaaataaaagcactttgctagattcttaaattgaagcctaagttctctgttttggcttaatggaagggcatctaaaaatggtgcttacatccgagactggtcttgagcctaaagagcaaaggttactatttagagggaaagagaaagaggatgaggaatgcttgcatatggtgggagtgaaagacatgtctaaggttatattgctagaggatccagccagcaaagagagaaagcttgaggagatgcataagagtgaagatatctcaaaggcatgtgaagccatctccaaagtcagaacagaagttgacaagctatatcaaaaggtggttgctttggagacaactgtttgtggtggtgctaaggttgaagacaaagaatttgctatcttgacagaattgctaatggttcaattgcttaaactggattccattgctgctgagggagaagccaaagggcagagaagagttgaggttcgtcgtgtacagagttatgtggacacaattgacaacctgaaggcaagaaattttgctgcatttagcaatgctggtaacaatgcagtccctgtgatttgggaggccttggaatccggagttggaagcttgaagtcaccaacttcatttccaacatctacagtgattactcaaaactgggagcactttgaataaatacaagttaatccttccactttatttatagaagaggcttctatgatgacacttggttttttgtaatgacaagctgtttttggtagggaagggttatgcttgtacaaaattaatacatgtacatgttacttctctatgtccaaataaacactgattttgccttgtgtgttc

SEQ ID NO: 59521 - protein, 201 aa, Glycine max
  peptide (1)..(201): Ceres Seq. ID no. 14313039
MEGHLKMVLTSETGLEPKEQRLLFRGKEKEDEECLHMVGVKDMSKVILLEDPASKERKLEEMHKSEDISKACEAISKVRTEVDKLYQKVVALETTVCGGAKVEDKEFAILTELLMVQLLKLDSIAAEGEAKGQRRVEVRRVQSYVDTIDNLKARNFAAFSNAGNNAVPVIWEALESGVGSLKSPTSFPTSTVITQNWEHFE

SEQ ID NO: 59522 - protein, 195 aa, Glycine max
  peptide (1)..(195): Ceres Seq. ID no. 14313040
MVLTSETGLEPKEQRLLFRGKEKEDEECLHMVGVKDMSKVILLEDPASKERKLEEMHKSEDISKACEAISKVRTEVDKLYQKVVALETTVCGGAKVEDKEFAILTELLMVQLLKLDSIAAEGEAKGQRRVEVRRVQSYVDTIDNLKARNFAAFSNAGNNAVPVIWEALESGVGSLKSPTSFPTSTVITQNWEHFE

SEQ ID NO: 59523 - protein, 165 aa, Glycine max
  peptide (1)..(165): Ceres Seq. ID no. 14313041
MVGVKDMSKVILLEDPASKERKLEEMHKSEDISKACEAISKVRTEVDKLYQKVVALETTVCGGAKVEDKEFAILTELLMVQLLKLDSIAAEGEAKGQRRVEVRRVQSYVDTIDNLKARNFAAFSNAGNNAVPVIWEALESGVGSLKSPTSFPTSTVITQNWEHFE

SEQ ID NO: 59524 - DNA, 1102 bp, Glycine max
  misc_feature (1)..(1102): Ceres Seq. ID no. 14303970
acctaagattcagaatgtctggtcgtcactccgattccgattccaagcgatgccattctagattcgattcagaccccaacaagagatatagaagggatgaatatggaaaagaagacagagagagagtgtcaagtagcactgatgttcaaaatgaagctcttttcgctaagcacaacaaaccaaatgatcctatccaacttccaacatctctctcttattttcagcacaatgaacaaggtggcactgggcaggttggccgaagctctggtcaaaggaaggagcgtggacggtggaaggacacaaagaaacggtttaatattaatgaaagggaagagaaaaatcatggtagagagcagagaaatgagaaatcacaagctaaactggatgataatactttccagagaagagatggttttaccggaaggtcgagaaaaagagcttcatttagagagaagaagattgtagcggattcaggtgatgctaatgtggctgcagtaaagtcaggccagaaggaggaaagaaacagcaatccacagcatttggatagacctgagaagcattttgcagatgacaagggtgaagctaggaggggaagaaggtatggaggcaatgacagttacaagggaagagataaatttaatggaagacaaggctatcgtcctgagaagtggaaacatgatttgtatcaagaggtaaataaggatcccattccagagaatgaggatggccagattgcgaagctggaagcactcttggcttcataatatcatacgtgtgtatgtgtcaagctatcaccatcttcaactgtcaattttagaagatgcaaactagattcaattgaggcaggcaggttttaaaattggaatggagcacagagcaatttgcaatttggaattgtaataaagcatttttgcttgttttagacaatttctagttcgcaaagtatctacatgtctatgatttttattttggtcaatttatgtacacaccactattacggtggtttagctgaattggaaaagagtgtctcaattgcatgatcgccggttatggacatcacatatgtgaaagtagattttttaactttaaggtgaatttaatt

SEQ ID NO: 59525 - protein, 253 aa, Glycine max
  peptide (1)..(253): Ceres Seq. ID no. 14303971
LRFRMSGRHSDSDSKRCHSRFDSDPNKRYRRDEYGKEDRERVSSSTDVQNEALFAKHNKPNDPIQLPTSLSYFQHNEQGGTGQVGRSSGQRKERGRWKDTKKRFNINEREEKNHGREQRNEKSQAKLDDNTFQRRDGFTGRSRKRASFREKKIVADSGDANVAAVKSGQKEERNSNPQHLDRPEKHFADDKGEARRGRRYGGNDSYKGRDKFNGRQGYRPEKWKHDLYQEVNKDPIPENEDGQIAKLEALLAS

SEQ ID NO: 59526 - protein, 249 aa, Glycine max
  peptide (1)..(249): Ceres Seq. ID no. 14303972
MSGRHSDSDSKRCHSRFDSDPNKRYRRDEYGKEDRERVSSSTDVQNEALFAKHNKPNDPIQLPTSLSYFQHNEQGGTGQVGRSSGQRKERGRWKDTKKRFNINEREEKNHGREQRNEKSQAKLDDNTFQRRDGFTGRSRKRASFREKKIVADSGDANVAAVKSGQKEERNSNPQHLDRPEKHFADDKGEARRGRRYGGNDSYKGRDKFNGRQGYRPEKWKHDLYQEVNKDPIPENEDGQIAKLEALLAS

SEQ ID NO: 59527 - DNA, 1401 bp, Glycine max
  misc_feature (1)..(1401): Ceres Seq. ID no. 15225703
aannnnnngggccccccctcgagtcagctacgtaggccccccccccgataatctctgtttgtgaagttcttactgcggcagttagtaaatgacatacccttgccactaactaatgtcctctcattcccccgtttaaactcattcaccaattccacctctataaactataaacaccttacgttacagaataaaagtttctgactgacagaaattatggccagaagagatcttgaaagtggcggtggagtaaccaagaacaacagaagtgcagaggaaaactactctgcgcccgaatcttcccatgtttatgattctgagacccattggacatcatggctcgtgcccatgtttgtggttgctaatattgctgtctttgttattaccatgtacatcaacaattgtcccaggaacaaccttcgtttccaaggtcgctgcgtggcaaggtttcttggaaggttctcttttcagcctatgcaggagaatcccttgcttggtccttcttcttcaacattgaccaagatgggagctcttcgatgggataatgttgtgaatagacatcagggatggagacttgtcacttgcatttggttacatgctggggttattcatttgctggctaatatgttgagtctggtcttcattggcattcgccttgaacaacaattcgggtttattaagattggaatcatatacttggtgtctgggtttggtggaagtgtactgtcgtctctatttatcagagaccacatctctgtgggtgcttctggtgccctttttggacttcttggcgcaatgctgtctgaacttatcacaaactggactatatattccaataaagcaatggctttaataacccttctagtgatcattgtaatcaaccttggcattggcattttgccacacgtagataattttgctcacatcggaggattcctggtgggattactccttggctttattttgctgccacgtcctcagttcggttggttagagcagcgacgtcttcctgccggtgttcagatgaagtcaaagtacaagactcaccaatatgttctaggggttgtgtctcttattctgttgattgcagggttatcgactgcattggtgatgctatttcggggtgagaaagggtatgaccactgccattggtgtcgctacttaacatgtgtccctacttctaaatgggaatgcagcaatgacagttaaataagaaaggggaaatgattttcacttgcaatatcttttcttgtgtatagccatagagctcttagaaactggcttgttttgtctcttttagttttttttgttctttaaataattggtctgcctttatgaatttatgctttttttaaaaaaaaaattatacatattagtatatgatatataaagaaatttgcttgt

SEQ ID NO: 59528 - protein, 330 aa, Glycine max
  peptide (1)..(330): Ceres Seq. ID no. 15225704
MARRDLESGGGVTKNNRSAEENYSAPESSHVYDSETHWTSWLVPMFVVANIAVFVITMYINNCPRNNLRFQGRCVARFLGRFSFQPMQENPLLGPSSSTLTKMGALRWDNVVNRHQGWRLVTCIWLHAGVIHLLANMLSLVFIGIRLEQQFGFIKIGIIYLVSGFGGSVLSSLFIRDHISVGASGALFGLLGAMLSELITNWTIYSNKAMALITLLVIIVINLGIGILPHVDNFAHIGGFLVGLLLGFILLPRPQFGWLEQRRLPAGVQMKSKYKTHQYVLGVVSLILLIAGLSTALVMLFRGEKGYDHCHWCRYLTCVPTSKWECSNDS

SEQ ID NO: 59529 - protein, 286 aa, Glycine max
  peptide (1)..(286): Ceres Seq. ID no. 15225705
MFVVANIAVFVITMYINNCPRNNLRFQGRCVARFLGRFSFQPMQENPLLGPSSSTLTKMGALRWDNVVNRHQGWRLVTCIWLHAGVIHLLANMLSLVFIGIRLEQQFGFIKIGIIYLVSGFGGSVLSSLFIRDHISVGASGALFGLLGAMLSELITNWTIYSNKAMALITLLVIIVINLGIGILPHVDNFAHIGGFLVGLLLGFILLPRPQFGWLEQRRLPAGVQMKSKYKTHQYVLGVVSLILLIAGLSTALVMLFRGEKGYDHCHWCRYLTCVPTSKWECSNDS

SEQ ID NO: 59530 - protein, 273 aa, Glycine max
  peptide (1)..(273): Ceres Seq. ID no. 15225706
MYINNCPRNNLRFQGRCVARFLGRFSFQPMQENPLLGPSSSTLTKMGALRWDNVVNRHQGWRLVTCIWLHAGVIHLLANMLSLVFIGIRLEQQFGFIKIGIIYLVSGFGGSVLSSLFIRDHISVGASGALFGLLGAMLSELITNWTIYSNKAMALITLLVIIVINLGIGILPHVDNFAHIGGFLVGLLLGFILLPRPQFGWLEQRRLPAGVQMKSKYKTHQYVLGVVSLILLIAGLSTALVMLFRGEKGYDHCHWCRYLTCVPTSKWECSNDS

SEQ ID NO: 59531 - DNA, 1330 bp, Glycine max
  misc_feature (1)..(1330): Ceres Seq. ID no. 15172032
tctttggatctcacagccgccgctcgcggtggtgccaccgttgcactctccgctgctctctattcgatctccctctcaccgatactaagaaggtaaagtcgttaacgatggacgaagtctctggtagtaagagttgtggcactttggctctttctggaggttgatgaaggctatagttggatgaacacaactgaaatgaatggaaaccagcaccgttacaatcctttgctaatcagtaagcattgacaaggttcaaataaggctctgcgtttagattcggtgcagaatcagaggttggataagttgaattactaacttagataataattataattgtggaggtagtgaaattgaacagtggaaggcacgtgaagatgaaggtggacaaacagtggacattatgcgtattattttaacttatgggcttgatccaattaatggttcagtggagaacaaaccatgtctaacgaaaagggtagaagaatctgggagaagactgctgaaagaaatagtagagcacagtaacaaagcggaaaattctaattttccagacagcacagaggttgtcactggacatgttaaatgagcaagacaagggaaaaatagatgtttcaaatatgaagcaaggcgactggctttgcccgaagtagaacttaatttccatctactaattatttattgtattaaattgaaatcttgtgctagtttctcctgcacttgtttatgttttcattttcaattttcattggccagatgcaatttcatgaactttactagaaacattaggtgcttgcgctgtgacagcttctttgaggaaagaatcaaccaattgaaggaggataataatcaccttcctttgaagaagggagactggatatgcaataagtaatggttgttattatcttgtaggcttatatgacactagtatttaattttaaattataatcaattttgatttttgaagatgcaatttcctaaattttgcaaagaatacaagatgtttgcaatgcaaagaaaggacttccaatcgtcaaattaatcccggggagtggtaatgtgactcaggtgcatctacatcaatttcagaagaaacatggttttcctgaaatgtgatcatagacgccttatagtgtcaaaggcttcaagctcttcccttcaacctcagccagaagatatagaccacgataagaatagcaaatttgcctttgtggcacattagggtaatagaagtgatgaaacaccaatggtgtttgaaagaaaaaataggaacaaagattcacctatgtggagatttgtagaggattgaaatgaaaataacaagtgcttaaat

SEQ ID NO: 59532 - protein, 61 aa, Glycine max
  peptide (1)..(61): Ceres Seq. ID no. 15172033
MRIILTYGLDPINGSVENKPCLTKRVEESGRRLLKEIVEHSNKAENSNFPDSTEVVTGHVK

SEQ ID NO: 59533 - protein, 53 aa, Glycine max
  peptide (1)..(53): Ceres Seq. ID no. 15172034
FGSHSRRSRWCHRCTLRCSLFDLPLTDTKKVKSLTMDEVSGSKSCGTLALSGG

SEQ ID NO: 59534 - protein, 41 aa, Glycine max
  peptide (1)..(41): Ceres Seq. ID no. 15172035
MNFTRNIRCLRCDSFFEERINQLKEDNNHLPLKKGDWICNK

SEQ ID NO: 59535 - DNA, 1304 bp, Glycine max
  misc_feature (1)..(1304): Ceres Seq. ID no. 13593946
actaataattttatggctaaatgtaatgatttagtctttaacaatgtttgcatgtctatttattgtattacttttagttgctaattcttcagcatgaacaattaagattttccaaggataattctggtcacatattattaaaattacttactttgataggaataggctaataaataatgataataataataatccatcacatgggaaaggtgtattgaaaagatgctgttgaatttaccgatgaagttcctagttgggccaccttgtacaactaaatataatgcactatgtttctataaagattttgatatatggtgatcctatctaatttcgtatgatattaaactatcatcatctgatgcgatattacctgatatatctctggagacgatgggggcttattgtatactgagttactttacaggtgatgaatgaaggacctggacacatcccaatgcacaagattcctgaaaacatgcagaaacagttagaatggtgtagtgaagcgcctttttacactcttggtcctttaacaactgatattgcccccggctatgatcacatcacctctgcaattggtgctgccaatattggggcacttggtactgctcttctctgttatgtgactccaaaggaacatcttgggttgccaaaccgggatgacgtgaaggctggagttatagcctacaagatagcggctcatgctgctgatttagccaaaggtcatccatatgctcaagcctgggatgatgcattaagcaaggcaagatttgagttccgatggatggaccagtttgctttgtcattggatccgatgacagccatgtccttccatgacgaaaccctgccagcagatggtgcaaaagtggctcatttctgctcaatgtgtggccctaaattctgctctatgaagataacggaggatgtgaggaagtatgctgaggaacatggctatggaactgatgaagctttgcagcgtgggatggatgctatgagtgctgaatttcaagctgccaagaaaactatcagcggggagcaacatggtgaagctggcggagagatttacttgccagaagaatacgttagttccaagaggacttaaatggagcaaatcagttggaagaacttggagctagcttcccaactggcttatcagggtgtggagaagcattattaagccttaggaataggagagtaagtactgtttgtgaatgtctttggtttaagaactccgtcttatgtcaacttgtattctgttatacagttctcagcaataaactgctctggcaatctagtttcatgtg

SEQ ID NO: 59536 - protein, 224 aa, Glycine max
  peptide (1)..(224): Ceres Seq. ID no. 13593947
MNEGPGHIPMHKIPENMQKQLEWCSEAPFYTLGPLTTDIAPGYDHITSAIGAANIGALGTALLCYVTPKEHLGLPNRDDVKAGVIAYKIAAHAADLAKGHPYAQAWDDALSKARFEFRWMDQFALSLDPMTAMSFHDETLPADGAKVAHFCSMCGPKFCSMKITEDVRKYAEEHGYGTDEALQRGMDAMSAEFQAAKKTISGEQHGEAGGEIYLPEEYVSSKRT

SEQ ID NO: 59537 - protein, 215 aa, Glycine max
  peptide (1)..(215): Ceres Seq. ID no. 13593948
MHKIPENMQKQLEWCSEAPFYTLGPLTTDIAPGYDHITSAIGAANIGALGTALLCYVTPKEHLGLPNRDDVKAGVIAYKIAAHAADLAKGHPYAQAWDDALSKARFEFRWMDQFALSLDPMTAMSFHDETLPADGAKVAHFCSMCGPKFCSMKITEDVRKYAEEHGYGTDEALQRGMDAMSAEFQAAKKTISGEQHGEAGGEIYLPEEYVSSKRT

SEQ ID NO: 59538 - protein, 208 aa, Glycine max
  peptide (1)..(208): Ceres Seq. ID no. 13593949
MQKQLEWCSEAPFYTLGPLTTDIAPGYDHITSAIGAANIGALGTALLCYVTPKEHLGLPNRDDVKAGVIAYKIAAHAADLAKGHPYAQAWDDALSKARFEFRWMDQFALSLDPMTAMSFHDETLPADGAKVAHFCSMCGPKFCSMKITEDVRKYAEEHGYGTDEALQRGMDAMSAEFQAAKKTISGEQHGEAGGEIYLPEEYVSSKRT

SEQ ID NO: 59539 - DNA, 1732 bp, Glycine max
  misc_feature (1)..(1732): Ceres Seq. ID no. 15176433
atcactcgggtggcgtgctttggcttcccttccccctcttcttagcaaatgtttcaatattccaaggccatgttgcttaatttagttcttgtttcctttgtcctcttgagttctatcagagatgggagtgcagggatcaccagctctttcgttcggccacagtggccaggagttgacattcccgtggatcatgaagtatttgcagttccaaagggttataatgcacctcaacaagtgcacatcacgcaaggtgactatgatggaaaagcagtaatagtctcatgggtgaccccagatgaaccagggactcgccatgtgcaatatggcacatcaaaggataagtttaaaactagtgcagaaggcacagttgcaaactacactttctataactacaagtctggctacattcatcattgtcttattgaaggccttgagtataagacaaaatactactatagaattggaagtggtgattctgctcgagacttttggttcgaaacacctcctaaagttgggccagatactccctacaaatttgggatcattggtgatttggggcaaacgtttaattctctttcgacccttgagcattatttggagagtggaggagaggctgtgttatatgttggagatctttcttattctgatgaacatgactacaaagatatgggtttacggtgggatacatggggccgatttgctgaaaggagtgcagcatatcagccatggatgtggaatgtgggaaaccacgaagtagagtttttgcctgaagtgggagaagttgaacctttcaaaaactatctttaccgatatactactccctattcggcttccaaaagcaccagccccctctggtatgcagtcaggcgtgcctctgctcatatcattgtgctatcaagctattctccatttgtgaagtacacgcctcaatacatatggcttaaagaagagctggcgcgggttgatagaaagaagacaccttggctcattgtgctcgtgcacaagccactctacagcagcaacgtagctcactacatggagggtgaagccatgcgatcagtttttgagacatggttcgtccaatacaaagttgatgtcatctttgccggccatgtccatgcttatgaaagatcatatcgatactccaatatagactacaacataactggcggtagaaggtatcccatacctgacaaatcagcacctatttacataacaatcggagatggaggaaatctagaaggtcttgcctcaagttatttggatccacagccagaatattctgcattcagagaagcgagctatggacacgccacactggagataaaaaacaggacccatgctatctaccactggtatcgcaatgatgacggaaagaaagtcccagctgactctctcgtattgcataaccagtattggggaagcaatggaagaaaacagaatgaggttattgatgaagttgtcaatgttaaatgaagttggagcactcgtaaatcgtaaatatggtgttttgaaaagaataaaaatgtgcctatatattgtaatgtatgtagttcaatagtctccgagcgtgcgaaaaggttccattccatgtacttggcttgtattatacagctagcgctaagaaatattaaataaacgcgcttttagcaaggagaaaacaatcgagaccaagatattatctgttcacatctgtgtataatttttgaagcgtggattattttgctgctag

SEQ ID NO: 59540 - protein, 475 aa, Glycine max
  peptide (1)..(475): Ceres Seq. ID no. 15176434
MFQYSKAMLLNLVLVSFVLLSSIRDGSAGITSSFVRPQWPGVDIPVDHEVFAVPKGYNAPQQVHITQGDYDGKAVIVSWVTPDEPGTRHVQYGTSKDKFKTSAEGTVANYTFYNYKSGYIHHCLIEGLEYKTKYYYRIGSGDSARDFWFETPPKVGPDTPYKFGIIGDLGQTFNSLSTLEHYLESGGEAVLYVGDLSYSDEHDYKDMGLRWDTWGRFAERSAAYQPWMWNVGNHEVEFLPEVGEVEPFKNYLYRYTTPYSASKSTSPLWYAVRRASAHIIVLSSYSPFVKYTPQYIWLKEELARVDRKKTPWLIVLVHKPLYSSNVAHYMEGEAMRSVFETWFVQYKVDVIFAGHVHAYERSYRYSNIDYNITGGRRYPIPDKSAPIYITIGDGGNLEGLASSYLDPQPEYSAFREASYGHATLEIKNRTHAIYHWYRNDDGKKVPADSLVLHNQYWGSNGRKQNEVIDEVVNVK

SEQ ID NO: 59541 - protein, 468 aa, Glycine max
  peptide (1)..(468): Ceres Seq. ID no. 15176435
MLLNLVLVSFVLLSSIRDGSAGITSSFVRPQWPGVDIPVDHEVFAVPKGYNAPQQVHITQGDYDGKAVIVSWVTPDEPGTRHVQYGTSKDKFKTSAEGTVANYTFYNYKSGYIHHCLIEGLEYKTKYYYRIGSGDSARDFWFETPPKVGPDTPYKFGIIGDLGQTFNSLSTLEHYLESGGEAVLYVGDLSYSDEHDYKDMGLRWDTWGRFAERSAAYQPWMWNVGNHEVEFLPEVGEVEPFKNYLYRYTTPYSASKSTSPLWYAVRRASAHIIVLSSYSPFVKYTPQYIWLKEELARVDRKKTPWLIVLVHKPLYSSNVAHYMEGEAMRSVFETWFVQYKVDVIFAGHVHAYERSYRYSNIDYNITGGRRYPIPDKSAPIYITIGDGGNLEGLASSYLDPQPEYSAFREASYGHATLEIKNRTHAIYHWYRNDDGKKVPADSLVLHNQYWGSNGRKQNEVIDEVVNVK

SEQ ID NO: 59542 - protein, 269 aa, Glycine max
  peptide (1)..(269): Ceres Seq. ID no. 15176436
MGLRWDTWGRFAERSAAYQPWMWNVGNHEVEFLPEVGEVEPFKNYLYRYTTPYSASKSTSPLWYAVRRASAHIIVLSSYSPFVKYTPQYIWLKEELARVDRKKTPWLIVLVHKPLYSSNVAHYMEGEAMRSVFETWFVQYKVDVIFAGHVHAYERSYRYSNIDYNITGGRRYPIPDKSAPIYITIGDGGNLEGLASSYLDPQPEYSAFREASYGHATLEIKNRTHAIYHWYRNDDGKKVPADSLVLHNQYWGSNGRKQNEVIDEVVNVK

SEQ ID NO: 59543 - DNA, 1337 bp, Glycine max
  misc_feature (1)..(1337): Ceres Seq. ID no. 14313064
actcgaactcatcatttctaattgttctgatccatatatatcatactttctttgtaataacttaaagaaccccacaaaaacaccaaccatgtccacaattgcaaagagagatttgagttctaatgaagaagagagtgagctgagaagaggtccttggactcttgaagaagacagcttactcatacactatattgctcgtcatggtgaaggccgttggaatatgttagccaaaagtgcaggattgaagaggactggaaaaagttgcagacttagatggctgaattatttgaaaccagacattaagagagggaacctcactccacaggagcaactcttgatccttgaactccattccaagtggggtaacaggtggtcaaaaattgctcagcatctgccaggaagaacagacaatgagatcaagaactattggagaacaaggatacagaaacaggcacgccaacttaacattgaatctggtagcaagagattcattgatgctgtcaagtgtttttggatgccaagattgctccaaaagatggaacagagcaattctccaagccctcatcactcttccatgacaaacatgatgaatttagggaattccggagaagcttctatgagttcaatgtcaagcagcttcaatattaatccttctatgtcttcttcctcatctcctccacaaagggaatttattatggatgatgcaaatcattttaatactatgtccaaccccatcaatccatccccagattccttccaattttcacagctacttgaaatttctgaacaccccaaaagtccttcaaatgtgtttgagaacaatgtttgcagttatccaatccaggacaattgctatgttgataccaataactatggcatggaaggcataaacatggatcccctttcagcaatggatacttacgacttcccacagtttgattttcagacagcaggaaatggatggatgctagacagcatgggggattctactttatggaacatggaggctatgtgacagtgttggcaagagaaggcatgcatctcaagctcttttcatcgtgggatgttatattatcgaaagaaaaaaaagtttgaagattcttatgctatactgattcttagtgtgagtatacattctcataggtagaaattagtactaagtgtaaggttatttgatatgaacctcttgaaatatagtattttaaatagaaaatgcaggagatggtattagagttcccctgtttcagatttattagaagttggaaaagttgtaatttgaccaagacagtgtatcttggctgttataagtggcattttgaacataattcgttttaaag

SEQ ID NO: 59544 - protein, 337 aa, Glycine max
  peptide (1)..(337): Ceres Seq. ID no. 14313065
LELIISNCSDPYISYFLCNNLKNPTKTPTMSTIAKRDLSSNEEESELRRGPWTLEEDSLLIHYIARHGEGRWNMLAKSAGLKRTGKSCRLRWLNYLKPDIKRGNLTPQEQLLILELHSKWGNRWSKIAQHLPGRTDNEIKNYWRTRIQKQARQLNIESGSKRFIDAVKCFWMPRLLQKMEQSNSPSPHHSSMTNMMNLGNSGEASMSSMSSSFNINPSMSSSSSPPQREFIMDDANHFNTMSNPINPSPDSFQFSQLLEISEHPKSPSNVFENNVCSYPIQDNCYVDTNNYGMEGINMDPLSAMDTYDFPQFDFQTAGNGWMLDSMGDSTLWNMEAM

SEQ ID NO: 59545 - protein, 308 aa, Glycine max
  peptide (1)..(308): Ceres Seq. ID no. 14313066
MSTIAKRDLSSNEEESELRRGPWTLEEDSLLIHYIARHGEGRWNMLAKSAGLKRTGKSCRLRWLNYLKPDIKRGNLTPQEQLLILELHSKWGNRWSKIAQHLPGRTDNEIKNYWRTRIQKQARQLNIESGSKRFIDAVKCFWMPRLLQKMEQSNSPSPHHSSMTNMMNLGNSGEASMSSMSSSFNINPSMSSSSSPPQREFIMDDANHFNTMSNPINPSPDSFQFSQLLEISEHPKSPSNVFENNVCSYPIQDNCYVDTNNYGMEGINMDPLSAMDTYDFPQFDFQTAGNGWMLDSMGDSTLWNMEAM

SEQ ID NO: 59546 - protein, 264 aa, Glycine max
  peptide (1)..(264): Ceres Seq. ID no. 14313067
MLAKSAGLKRTGKSCRLRWLNYLKPDIKRGNLTPQEQLLILELHSKWGNRWSKIAQHLPGRTDNEIKNYWRTRIQKQARQLNIESGSKRFIDAVKCFWMPRLLQKMEQSNSPSPHHSSMTNMMNLGNSGEASMSSMSSSFNINPSMSSSSSPPQREFIMDDANHFNTMSNPINPSPDSFQFSQLLEISEHPKSPSNVFENNVCSYPIQDNCYVDTNNYGMEGINMDPLSAMDTYDFPQFDFQTAGNGWMLDSMGDSTLWNMEAM

SEQ ID NO: 59547 - DNA, 1845 bp, Glycine max
  misc_feature (1)..(1845): Ceres Seq. ID no. 14313963
gagggaaagcaaaatatctgatctttctccctcccttgcactgagtaggcaatggcggaggaagcacagtactcatcgggacccgattccgcgcccctcaagcgcaagtacgaagaccaaccctccggcatcgagcttgccaagcagcgtgctcaggaagtcgccgcacgcctcctcaacgccgctcctcctccgccactcgacgccaagcgtcccaaacccgacaccggcttcgattctctcgatttgaagcctctgtattccgcatctcctcctcccgtctcctacggtcaccaaggttccagcaagaagattgatatccctaatggcagggttggtgtgattattggtaaaggcggagagactattaagtatctccagttgcagtctggtgccaaaattcaaattactcgtgatattgatgcggaccctaattcttccactaggacggttgagcttatgggcactcctgaagcaatttcctctgccgagaaactcatcaatgaagttcttgctgaggctgaatctgggggttctggcattgttactcgaagattcacgggacaagctgggtcggatgaatttgtcatgaaaatcccaaataataaggttggccttataattggcaaaggtggagaaactataaagaatatgcaagcttctactggagcacggattcaggtgatacctctgcatcttcccccgggtgacacatcaactgaaagaacattaaaaattgatggtactcctgagcaaattgagtctgcaaagcagttggtttatcaagtcatcagtggcgagaatcgtgttagaaatccagcaatgtctggtggttatcctcaacaaggttaccaatctcgaccaccatctaactgggctccccctgctccaacgcagcaacctggttatggctacgtgcaacctggagcatactctggtccatcaccccagtataacatgcctcagcaaccatatgcaggctatcctccccagcaacctgatggatattccaccaattgggatcagtctactgcaccacctcaccaacagtctactcatggtggtggttattattactatagtcaacagccacagcaaccacaaaatcctgggggtcctgcccctccagctgatggctctgcatacaattacagtcagccaccttcctctggttataaccaatcagcacagcagggttatgcacaggacagctataatgcatataatgcgcaatcacaatcagggtatgggcagccacctacatatgatcagcagcaaggctatggtagtgaaagcaacccggcacaagagggccacactgcaaactatgcagtacagggagattcagcccaagctccttctgcccaaccaattaccgtagcgcagcaaggttatcctaccaaccaactgcccagttcaaacactgccaactacccacctcaaggaactcctcagccaggttatggggttccccctacatcccaagcagcttatggcaatcaatcacagcctggttatggtggtgcagtgcaaccagggtacggtcctcaaacatatggtgctccgcagggtggccagcctggttatggtcaggcgctgccttcatacagcaacagttcttatggtgctggttatacacagactccggcgtataccggtgatggtaatgggaatgctcaggcaccccagagtgccattgctaaagcatccccttgatattttggccacccttcccctccccttctcatagacgatttttattgtgtttcaccgtttatggtactagtgacaccaatgtagcattgcattgtttagatggaagaaatggtgtattgtttttttttc

SEQ ID NO: 59548 - protein, 554 aa, Glycine max
  peptide (1)..(554): Ceres Seq. ID no. 14313964
MAEEAQYSSGPDSAPLKRKYEDQPSGIELAKQRAQEVAARLLNAAPPPPLDAKRPKPDTGFDSLDLKPLYSASPPPVSYGHQGSSKKIDIPNGRVGVIIGKGGETIKYLQLQSGAKIQITRDIDADPNSSTRTVELMGTPEAISSAEKLINEVLAEAESGGSGIVTRRFTGQAGSDEFVMKIPNNKVGLIIGKGGETIKNMQASTGARIQVIPLHLPPGDTSTERTLKIDGTPEQIESAKQLVYQVISGENRVRNPAMSGGYPQQGYQSRPPSNWAPPAPTQQPGYGYVQPGAYSGPSPQYNMPQQPYAGYPPQQPDGYSTNWDQSTAPPHQQSTHGGGYYYYSQQPQQPQNPGGPAPPADGSAYNYSQPPSSGYNQSAQQGYAQDSYNAYNAQSQSGYGQPPTYDQQQGYGSESNPAQEGHTANYAVQGDSAQAPSAQPITVAQQGYPTNQLPSSNTANYPPQGTPQPGYGVPPTSQAAYGNQSQPGYGGAVQPGYGPQTYGAPQGGQPGYGQALPSYSNSSYGAGYTQTPAYTGDGNGNAQAPQSAIAKASP

SEQ ID NO: 59549 - protein, 418 aa, Glycine max
  peptide (1)..(418): Ceres Seq. ID no. 14313965
MGTPEAISSAEKLINEVLAEAESGGSGIVTRRFTGQAGSDEFVMKIPNNKVGLIIGKGGETIKNMQASTGARIQVIPLHLPPGDTSTERTLKIDGTPEQIESAKQLVYQVISGENRVRNPAMSGGYPQQGYQSRPPSNWAPPAPTQQPGYGYVQPGAYSGPSPQYNMPQQPYAGYPPQQPDGYSTNWDQSTAPPHQQSTHGGGYYYYSQQPQQPQNPGGPAPPADGSAYNYSQPPSSGYNQSAQQGYAQDSYNAYNAQSQSGYGQPPTYDQQQGYGSESNPAQEGHTANYAVQGDSAQAPSAQPITVAQQGYPTNQLPSSNTANYPPQGTPQPGYGVPPTSQAAYGNQSQPGYGGAVQPGYGPQTYGAPQGGQPGYGQALPSYSNSSYGAGYTQTPAYTGDGNGNAQAPQSAIAKASP

SEQ ID NO: 59550 - protein, 375 aa, Glycine max
  peptide (1)..(375): Ceres Seq. ID no. 14313966
MKIPNNKVGLIIGKGGETIKNMQASTGARIQVIPLHLPPGDTSTERTLKIDGTPEQIESAKQLVYQVISGENRVRNPAMSGGYPQQGYQSRPPSNWAPPAPTQQPGYGYVQPGAYSGPSPQYNMPQQPYAGYPPQQPDGYSTNWDQSTAPPHQQSTHGGGYYYYSQQPQQPQNPGGPAPPADGSAYNYSQPPSSGYNQSAQQGYAQDSYNAYNAQSQSGYGQPPTYDQQQGYGSESNPAQEGHTANYAVQGDSAQAPSAQPITVAQQGYPTNQLPSSNTANYPPQGTPQPGYGVPPTSQAAYGNQSQPGYGGAVQPGYGPQTYGAPQGGQPGYGQALPSYSNSSYGAGYTQTPAYTGDGNGNAQAPQSAIAKASP

SEQ ID NO: 59551 - DNA, 1455 bp, Glycine max
  misc_feature (1)..(1455): Ceres Seq. ID no. 14307004
taagaaggattaatggatgccaaataagaaaccacaaatatcccctgattataaaaaacatatttttaaatctgttttagccaattttagtttcaaggaataaaataaaataattttttttatatatataataagattcaaaatgaataattattagatgtaacaactaaaatataaaaattgtacggatataaagattaaataagtaattaaatcaataaatataaaagtatatctaatgaaacatgagaagtaagaaaatgttaaacatatatatcttagccttaaccatatacaattctatatggttaaaactattatagttaactttaactttaaccatttattaaactatacaattgaagtgtacttgtcttccatctcgtttgtgctttccctgcatgtagggtccaaattagtagtaaatgttagtagtatttaatgattttgttttacattaagtaattttatgtggggtgtgagaaaatacagaaacagatattggaaccggcgataaaaggaacggttaatgtgttgaaggcggcgaaggaagcaggggtggagcgcgtggtggcgacttcatcgatttcgtcgattatgccaagtcctaattggccagctgataagattaagggagaagagtgttggacggaccttgaatactgcaagcaaaaggggttgtattatcccattgcaaagactctagcagagaaagcgggttgggactttgcgaaggagacaggttttgatgttgtcatgataaaccctggtacagcattgggccctctgcttcctccaagaatcaattcaagcatggctgtgcttgttagtgttctcaaagggggcaaagagacctacgaggacttctttatgggaacggctcacttcaaagacatagcattggcacatattttggcacttgagaacaagaaagcagcaggaaggcacttgtgtgtggaatctattcgtcactttagtgatcttgtggacaaggttgctgagttataccctgaatacgatgtggctaagttgccaaaggatacccaaccagggttgttgagagcaagtggaaaggatgcatcaaagaagctgattgatttaggtctagaattcactcctgttgagcaaatcatcaaggatgcagtggagagtttgaagagcaggggctatgtctaatttctctgctactgcagaggaactgagtgcactgttacaagtggtggtggcgttaatattattgttctgccattgctttgactcattgttcatgccatttatgtttttacctatggtcttgtgttgtgcacttgtgcgtgtaactgtattctaaaataagggtcacttggatcagtggttgtaacgatatcaatgttttgcgagagttttaatttactcttgcagttattagtgaaagattgagcggtctcatcttcattgctcagtttaatcatcaag

SEQ ID NO: 59552 - protein, 192 aa, Glycine max
  peptide (1)..(192): Ceres Seq. ID no. 14307005
MPSPNWPADKIKGEECWTDLEYCKQKGLYYPIAKTLAEKAGWDFAKETGFDVVMINPGTALGPLLPPRINSSMAVLVSVLKGGKETYEDFFMGTAHFKDIALAHILALENKKAAGRHLCVESIRHFSDLVDKVAELYPEYDVAKLPKDTQPGLLRASGKDASKKLIDLGLEFTPVEQIIKDAVESLKSRGYV

SEQ ID NO: 59553 - protein, 139 aa, Glycine max
  peptide (1)..(139): Ceres Seq. ID no. 14307006
MINPGTALGPLLPPRINSSMAVLVSVLKGGKETYEDFFMGTAHFKDIALAHILALENKKAAGRHLCVESIRHFSDLVDKVAELYPEYDVAKLPKDTQPGLLRASGKDASKKLIDLGLEFTPVEQIIKDAVESLKSRGYV

SEQ ID NO: 59554 - protein, 120 aa, Glycine max
  peptide (1)..(120): Ceres Seq. ID no. 14307007
MAVLVSVLKGGKETYEDFFMGTAHFKDIALAHILALENKKAAGRHLCVESIRHFSDLVDKVAELYPEYDVAKLPKDTQPGLLRASGKDASKKLIDLGLEFTPVEQIIKDAVESLKSRGYV

SEQ ID NO: 59555 - DNA, 1744 bp, Glycine max
  misc_feature (1)..(1744): Ceres Seq. ID no. 14313743
atactcacactcaacacaatcttgggagaggtaacaacaacagctctggtttttctttgcagccttcacagctagctaacacaaaaatgagaatcttgagttacctttacattgttctcatttgcattattcaagactcaagagagcttaaatagggaaagaggaacaaggcctttttcagttacctctaaatccagttcttgcaattccatttgtgagtgagttgttggaattggaatttggaagtagctaggcagtgtctcaaattaatggcatccatgtctcttattcttctttggttcctcttttttgctagtgaaatgatgtcaatgggaaatagtttacacaaggggcacatggtaatggaagaggaggaactgttgggattgtttgaagtgatggatgctcttctggaagacccttactgggcccaagcacatccaaagccatgcactgatactccatggccaggtgttgagtgtgaacttggcagcaataaccaacaaatctttcatgtcaccaaaatccacattggtcctgatatagtcttcccattctcaccttgcaaaccctcagcttatctctcacactccttgctgaaactcaagtatataaaaaccctttcaatttttaactgttttgttgcttcaccagttactctacccaaaactctctttggtcctttctcttcactagaacacttagctttggagaataacccttccctctatggtgaaatacctacaagtttgggaggtgttgctggtcttagggtcctgagcctctcccagaacagcttacaaggaaacatccctagccagattggtggtttggttagtctagagcaacttgaccttagttataacaacttgagtggtcaaatcccaaaggaaattggaggtttgaaaagcatgaccatattggacctaagttgcaatgcagttgaagggtttctgccttgttctcttggaaagcttcaacttctccagaagatggatttgcactctaacagactcagtgaaaacattcctcctgatataggaaacctcaagaggttagtcttgcttgatttgagtcataattttattgtagggcctattagtgaaaccttctcaagtttagaccttttggaatatttactcattgatgacaaccccattaaaggagggataccccagttcatagggaagcttaagaagctcaaatcattgagtttatcagggtgtggattaacaggttctataccctactctttctcttccttgaaaaatcttacagctctctccttaggtaacaatagtcttattggacaagttcctccaaatttgggttcactcccaagcctagatcaactgaatatcagccacaacaagctgagtggggttctagagctacctggtgacttcattcaaaagttaggtaaaagattggatttaagaggaaacagtgaactctgcatcaatgatcagtcaaagaagaagaacctctcttcttacttggaaatcccttcttgtttgaacacacgacagagaaatgatgataattattttgccggtggaccacttcaagatctttcaggactaaagccgtcttggtatgatagcaacccaagttcatgttcatcatggcctaatgatctacatgtcatcatatttaccttggttttaaacctggttatctgattcctgaatatcattttgtgtaacactagaaattaatattatataaatgttattctactctg

SEQ ID NO: 59556 - protein, 470 aa, Glycine max
  peptide (1)..(470): Ceres Seq. ID no. 14313744
MASMSLILLWFLFFASEMMSMGNSLHKGHMVMEEEELLGLFEVMDALLEDPYWAQAHPKPCTDTPWPGVECELGSNNQQIFHVTKIHIGPDIVFPFSPCKPSAYLSHSLLKLKYIKTLSIFNCFVASPVTLPKTLFGPFSSLEHLALENNPSLYGEIPTSLGGVAGLRVLSLSQNSLQGNIPSQIGGLVSLEQLDLSYNNLSGQIPKEIGGLKSMTILDLSCNAVEGFLPCSLGKLQLLQKMDLHSNRLSENIPPDIGNLKRLVLLDLSHNFIVGPISETFSSLDLLEYLLIDDNPIKGGIPQFIGKLKKLKSLSLSGCGLTGSIPYSFSSLKNLTALSLGNNSLIGQVPPNLGSLPSLDQLNISHNKLSGVLELPGDFIQKLGKRLDLRGNSELCINDQSKKKNLSSYLEIPSCLNTRQRNDDNYFAGGPLQDLSGLKPSWYDSNPSSCSSWPNDLHVIIFTLVLNLVI

SEQ ID NO: 59557 - protein, 467 aa, Glycine max
  peptide (1)..(467): Ceres Seq. ID no. 14313745
MSLILLWFLFFASEMMSMGNSLHKGHMVMEEEELLGLFEVMDALLEDPYWAQAHPKPCTDTPWPGVECELGSNNQQIFHVTKIHIGPDIVFPFSPCKPSAYLSHSLLKLKYIKTLSIFNCFVASPVTLPKTLFGPFSSLEHLALENNPSLYGEIPTSLGGVAGLRVLSLSQNSLQGNIPSQIGGLVSLEQLDLSYNNLSGQIPKEIGGLKSMTILDLSCNAVEGFLPCSLGKLQLLQKMDLHSNRLSENIPPDIGNLKRLVLLDLSHNFIVGPISETFSSLDLLEYLLIDDNPIKGGIPQFIGKLKKLKSLSLSGCGLTGSIPYSFSSLKNLTALSLGNNSLIGQVPPNLGSLPSLDQLNISHNKLSGVLELPGDFIQKLGKRLDLRGNSELCINDQSKKKNLSSYLEIPSCLNTRQRNDDNYFAGGPLQDLSGLKPSWYDSNPSSCSSWPNDLHVIIFTLVLNLVI

SEQ ID NO: 59558 - protein, 453 aa, Glycine max
  peptide (1)..(453): Ceres Seq. ID no. 14313746
MMSMGNSLHKGHMVMEEEELLGLFEVMDALLEDPYWAQAHPKPCTDTPWPGVECELGSNNQQIFHVTKIHIGPDIVFPFSPCKPSAYLSHSLLKLKYIKTLSIFNCFVASPVTLPKTLFGPFSSLEHLALENNPSLYGEIPTSLGGVAGLRVLSLSQNSLQGNIPSQIGGLVSLEQLDLSYNNLSGQIPKEIGGLKSMTILDLSCNAVEGFLPCSLGKLQLLQKMDLHSNRLSENIPPDIGNLKRLVLLDLSHNFIVGPISETFSSLDLLEYLLIDDNPIKGGIPQFIGKLKKLKSLSLSGCGLTGSIPYSFSSLKNLTALSLGNNSLIGQVPPNLGSLPSLDQLNISHNKLSGVLELPGDFIQKLGKRLDLRGNSELCINDQSKKKNLSSYLEIPSCLNTRQRNDDNYFAGGPLQDLSGLKPSWYDSNPSSCSSWPNDLHVIIFTLVLNLVI

SEQ ID NO: 59559 - DNA, 1136 bp, Glycine max
  misc_feature (1)..(1136): Ceres Seq. ID no. 14313718
aaacaaacatcaaacccatttttctatttttttttcttttcttttctctcttacacaccttccatgccttctcttttcaagagatctttcttccttctcctcctcctccttcatctccacaactcttaaaaaccctcctcatcgatccaacaagcagcaacctcactgaatctacaaacagtaacaaagattattactcgtagatccaataacagtaataacacctcagtttcttctcttaacagatcatgaattcctttcaagaatttgactcatcaaacacggacagtaacagtaccaaagccatcatcaacttcacatcaggtaacagcaccaatttcccaccagcgccaccaccatcatcatcttcaccgccatgttcctcttcttcttctggcaccaccaccctgagccgctacgagaaccaaaagcgccgcgactggaacacgttcgggcagtacctccgcaaccacaggcccccactctcgcttgcacggtgcagcggcgcgcacgtgctggagttcctgcggtacctggaccagttcgggaaaaccaaggttcacacgcagctttgtccattcttcgggcacccgaaccctcctgcagcgtgcccttgccttctacggcaagcgtgggggagcctggatgcactcatagggcgcctcagagctgcctttgaagagaatggagggaagcctgaggctaaccctttcggtgctcgcgctgtcagactctaccttcgcgaagtgcgtgattcgcaagccaaggctaggggaattagctacgagaagaagaagcgcaagcgtccccaacaacctcctttgcctccctcaaataatgcaaaagttgtgatttgacaatgggctgggggcactgcaatatgggcacaccctttgcaatggcattagaaaaatattgtgtaaacctaaactgcagtactctcggtagatgcagcagtaatttatgtagtggcagtaataaacactagggagggctgtgcatgtgtgtctgtgacaaatcaacaatatcacaacattgtccgatttgtattaataaaataaaaatgtgtatgaactcttgaagatgttatgaagaaaataataatggatctcaagatcttgtcagtttccatattg

SEQ ID NO: 59560 - protein, 202 aa, Glycine max
  peptide (1)..(202): Ceres Seq. ID no. 14313719
MNSFQEFDSSNTDSNSTKAIINFTSGNSTNFPPAPPPSSSSPPCSSSSSGTTTLSRYENQKRRDWNTFGQYLRNHRPPLSLARCSGAHVLEFLRYLDQFGKTKVHTQLCPFFGHPNPPAACPCLLRQAWGSLDALIGRLRAAFEENGGKPEANPFGARAVRLYLREVRDSQAKARGISYEKKKRKRPQQPPLPPSNNAKVVI

SEQ ID NO: 59561 - DNA, 1294 bp, Glycine max
  misc_feature (1)..(1294): Ceres Seq. ID no. 14303348
gtttcatgctgttgcgctaaatctctctctgaactctgaactctgaactgcacaaagccgtaactaatttctcagttcagaaagatctgctactctctctctctctctctctacttttagagcgttataataaatataagctgcataagttgaagactcagcaccgattcttcttcgtctgctgcaaattcagaagtagagatggcaagtcgagtgaaggaagatgagaaaaatgaacgaataattcgaggtcttctcaaactcgcaccaaatcgaagatgcattaactgtaacagcttgggaccacaatatgtgtgcacaaatttctggacgtttgtttgcactaactgtagcggaatacaccgagagtttacacatcgggtaaaatcagtttcaatggctaaatttagtgcacaggaagttagtgcacttcaagaaggaggaaatcagcgtgcaaaggaaatctattttaaagaatgggatccacaacgtcattctttgcctgatagcagcaatattgacaggctccgggactttattaagcatgtttatgtggatagaagattcagcggtgagaggacttatgacaaacctccaagagtaaagggtgacaaggatgatttccatgaaaacaagaggacagagacttatcacagaagcccttcatatgaggacacacatgaacgtcgttacagtgacaggtctagtcctggtggaagaagtcctgtatatgatcaagaaaataggcaatatggtgattacaagaaaagccctggtcgtcctccaataatcaatgattggcgtcgagaagatagatttggggatggatggaaatttgaagatcatagaatatctgatggaaatcataatgtggaaagtacttctcctgagcaaaccaaggatctggattcttccagcccacctgcagtccgacctgttagagagatcttgggagaaaatgtagtacctcttcgaataagtgaaccacccaaaacaaacagtggacaggctactaatggctcagcactcacacaggtgaagttattactgatgatgttccatatgcttcaaccatctgtgttgggagttaggacatttaatacactgttataatagttagttagtaggaggggttttagttaggcggattttctaggtaaatagctaggaggagggtggaaaggaatgggattttgattaatatcttttttgtaaaatgagcaatgctctgtaagcatcaaacgaacatggtaagtggcaataagcatgaacatcaacatgttcatttataaag

SEQ ID NO: 59562 - protein, 303 aa, Glycine max
  peptide (1)..(303): Ceres Seq. ID no. 14303349
MASRVKEDEKNERIIRGLLKLAPNRRCINCNSLGPQYVCTNFWTFVCTNCSGIHREFTHRVKSVSMAKFSAQEVSALQEGGNQRAKEIYFKEWDPQRHSLPDSSNIDRLRDFIKHVYVDRRFSGERTYDKPPRVKGDKDDFHENKRTETYHRSPSYEDTHERRYSDRSSPGGRSPVYDQENRQYGDYKKSPGRPPIINDWRREDRFGDGWKFEDHRISDGNHNVESTSPEQTKDLDSSSPPAVRPVREILGENVVPLRISEPPKTNSGQATNGSALTQVKLLLMMFHMLQPSVLGVRTFNTLL

SEQ ID NO: 59563 - protein, 238 aa, Glycine max
  peptide (1)..(238): Ceres Seq. ID no. 14303350
MAKFSAQEVSALQEGGNQRAKEIYFKEWDPQRHSLPDSSNIDRLRDFIKHVYVDRRFSGERTYDKPPRVKGDKDDFHENKRTETYHRSPSYEDTHERRYSDRSSPGGRSPVYDQENRQYGDYKKSPGRPPIINDWRREDRFGDGWKFEDHRISDGNHNVESTSPEQTKDLDSSSPPAVRPVREILGENVVPLRISEPPKTNSGQATNGSALTQVKLLLMMFHMLQPSVLGVRTFNTLL

SEQ ID NO: 59564 - DNA, 1544 bp, Glycine max
  misc_feature (1)..(1544): Ceres Seq. ID no. 14313807
gtcattcttgatggttctggagttcagaacaataataaagcgcaatcaacaagtgataaaattggaatgtctgattcaaaaaataaaatcgatgaagatgagactaatcctatcagtgcaggtagattttgtgaaaccatgcagggtgagacatctgtggaaaatatagttcttcgaaggcatactaatcctgatgctgcagctagaaatgggaaatcactaccaccagtgtatttttatgccctagaaagtgatcagcctatactggatatattaaagccgtctatagtcattgtttaccatccagatatgacctttgttagggaaattgaagtctacaaagctgagaatccctcaaaaaggttgaaagtatattttattttctatgaagattcaagtgaggttcagaagtttgaagcaagtatacgtagagagaatggagcatttgaatctttaattaggcaaaaatctttgatgatgattccagttgaccagagtgggcattctttaggattgaattctactttagagtcagatttaaatactcctcaaaacttcgtaaccagaaaagcaggtgggagaaaggaagctgagaaagaaatgcaggttattgtggacatgcgggagttcatgagcagccttccaaatgttcttcatcaaaagggaatgaacatcattccagtgaccctagaagttggtgactatattctatcaccattaatttgtgtggaaagaaaaagtattcaagatctctttatgagcttcacatcaggtcgtctataccaccaggtggagacaatggtacgatattacagaatacctgtactcttgatcgagttttcacaggataagagcttttcattccagtctgctagtgatattggtgatgatgtgacaccaaatagcattatatcaaagttgtctttgcttgctctacacttcccccgactacgaataatctggtctcgaagtttgcatgctactgccgaaatatttgcttcactgaaggcaaatcaagacgagccagatgaaacaaaagcaatcagagtgggtgtcccttcggaagaaggaattgtggaaaatgatgtgagggctgaaaattacaatacatccgctgtggagtttctaagacgatgtccaggtgttacagactcaaactacagggccataatggatggctgtaagagcttggcagaacttgcacttcttcctgtagagaagttagcggaattaatgggtggtcataaagctgctaggactcttagagattttctagatgctaaatacccaactttgttgtgagactatttgaataatttatttgtacaaaaaggtgctatccatttattcaagtcttctgttgtttcgattctacatcattgaattatgatggcaatccattgtaggaaattggaaaacgatccattgagttatttaatatttctccttctcgtggttcagtctgttgtaatttaacaatattgtattacttcacactaggtgagttcggttactgtggcagtgggatgttgtatatgtttaac

SEQ ID NO: 59565 - protein, 433 aa, Glycine max
  peptide (1)..(433): Ceres Seq. ID no. 14313808
VILDGSGVQNNNKAQSTSDKIGMSDSKNKIDEDETNPISAGRFCETMQGETSVENIVLRRHTNPDAAARNGKSLPPVYFYALESDQPILDILKPSIVIVYHPDMTFVREIEVYKAENPSKRLKVYFIFYEDSSEVQKFEASIRRENGAFESLIRQKSLMMIPVDQSGHSLGLNSTLESDLNTPQNFVTRKAGGRKEAEKEMQVIVDMREFMSSLPNVLHQKGMNIIPVTLEVGDYILSPLICVERKSIQDLFMSFTSGRLYHQVETMVRYYRIPVLLIEFSQDKSFSFQSASDIGDDVTPNSIISKLSLLALHFPRLRIIWSRSLHATAEIFASLKANQDEPDETKAIRVGVPSEEGIVENDVRAENYNTSAVEFLRRCPGVTDSNYRAIMDGCKSLAELALLPVEKLAELMGGHKAARTLRDFLDAKYPTLL

SEQ ID NO: 59566 - protein, 411 aa, Glycine max
  peptide (1)..(411): Ceres Seq. ID no. 14313809
MSDSKNKIDEDETNPISAGRFCETMQGETSVENIVLRRHTNPDAAARNGKSLPPVYFYALESDQPILDILKPSIVIVYHPDMTFVREIEVYKAENPSKRLKVYFIFYEDSSEVQKFEASIRRENGAFESLIRQKSLMMIPVDQSGHSLGLNSTLESDLNTPQNFVTRKAGGRKEAEKEMQVIVDMREFMSSLPNVLHQKGMNIIPVTLEVGDYILSPLICVERKSIQDLFMSFTSGRLYHQVETMVRYYRIPVLLIEFSQDKSFSFQSASDIGDDVTPNSIISKLSLLALHFPRLRIIWSRSLHATAEIFASLKANQDEPDETKAIRVGVPSEEGIVENDVRAENYNTSAVEFLRRCPGVTDSNYRAIMDGCKSLAELALLPVEKLAELMGGHKAARTLRDFLDAKYPTLL

SEQ ID NO: 59567 - protein, 387 aa, Glycine max
  peptide (1)..(387): Ceres Seq. ID no. 14313810
MQGETSVENIVLRRHTNPDAAARNGKSLPPVYFYALESDQPILDILKPSIVIVYHPDMTFVREIEVYKAENPSKRLKVYFIFYEDSSEVQKFEASIRRENGAFESLIRQKSLMMIPVDQSGHSLGLNSTLESDLNTPQNFVTRKAGGRKEAEKEMQVIVDMREFMSSLPNVLHQKGMNIIPVTLEVGDYILSPLICVERKSIQDLFMSFTSGRLYHQVETMVRYYRIPVLLIEFSQDKSFSFQSASDIGDDVTPNSIISKLSLLALHFPRLRIIWSRSLHATAEIFASLKANQDEPDETKAIRVGVPSEEGIVENDVRAENYNTSAVEFLRRCPGVTDSNYRAIMDGCKSLAELALLPVEKLAELMGGHKAARTLRDFLDAKYPTLL

SEQ ID NO: 59568 - DNA, 1489 bp, Glycine max
  misc_feature (1)..(1489): Ceres Seq. ID no. 14313840
gttgcagaacaaacaccaacttggtaaccaggcttgcctcctcccggaatcaagaaaggagaaaggtgctattgtactggaaatgaaggacagaggacattgctcagagaagaaaattgattggaacagaaggcttcagaagcagcttatattagatgatcttcgcgttcgttcaatgcaaaacaggattcgaagagtagcctccacccataatgtagaagcttcacaaacccaaattccattatcttctggtataaacttgcaaaccttaaactacatagtgacaatgggattgggtagcaagaatatgactgtgataattgacactggaagcgacttgacatgggtccaatgtgagccttgcatgtcatgttataatcaacaaggaccaatattcaaaccttctacctcctcttcctatcaatcagtttcatgcaattcatcaacctgccaatctcttcaatttgccacaggaaacacaggagcctgtggaagtagtaatccatcaacttgtaactatgtggttaactatggtgatggatcttacactaatggtgagctaggtgttgaagcacttagttttggaggtgtttcagtgagtgattttgtatttggttgtggtaggaacaacaaaggtctatttggaggagtctctggccttatggggttgggaagaagttacctctcattggtatctcaaactaatgccacatttggaggagttttctcatactgcttaccaacaacagaagctggttcttctgggtcattagttatgggtaatgagtcttcagttttcaagaacgctaatcccatcacttacaccagaatgctttcaaatccacagctttccaacttctatattctcaatctcactggcatagatgttggtggtgtggctttgaaggccccattaagctttggcaatggtgggattttgattgattctggcactgtgatcacaagactgccctcatctgtgtacaaggctttgaaggcagagttcttgaaaaagttcacgggtttcccttcagcaccagggttttcaattttggacacttgtttcaatctcactgggtatgatgaagtgagcatacctaccataagtttgcgttttgagggcaatgctcagctaaacgtggatgcaactggcacattctacgttgtgaaagaggatgcttcgcaagtttgcttggcacttgcaagtctttctgatgcatatgacactgctattattgggaattatcagcaaaggaaccaaagggtaatatatgacaccaaacagtccaaagtgggatttgctgaggagccatgcagtttcgcttgaacagggaaatttcatagtataatagatgccaatgccattaaggaggatgcaaaaccttccagttcttctttttcatttttctatttggaccacatatatatacataactacatttgccatataaagaattactagcaacaagagtatcatcatttgacattc

SEQ ID NO: 59569 - protein, 441 aa, Glycine max
  peptide (1)..(441): Ceres Seq. ID no. 14313841
LQNKHQLGNQACLLPESRKEKGAIVLEMKDRGHCSEKKIDWNRRLQKQLILDDLRVRSMQNRIRRVASTHNVEASQTQIPLSSGINLQTLNYIVTMGLGSKNMTVIIDTGSDLTWVQCEPCMSCYNQQGPIFKPSTSSSYQSVSCNSSTCQSLQFATGNTGACGSSNPSTCNYVVNYGDGSYTNGELGVEALSFGGVSVSDFVFGCGRNNKGLFGGVSGLMGLGRSYLSLVSQTNATFGGVFSYCLPTTEAGSSGSLVMGNESSVFKNANPITYTRMLSNPQLSNFYILNLTGIDVGGVALKAPLSFGNGGILIDSGTVITRLPSSVYKALKAEFLKKFTGFPSAPGFSILDTCFNLTGYDEVSIPTISLRFEGNAQLNVDATGTFYVVKEDASQVCLALASLSDAYDTAIIGNYQQRNQRVIYDTKQSKVGFAEEPCSFA

SEQ ID NO: 59570 - protein, 414 aa, Glycine max
  peptide (1)..(414): Ceres Seq. ID no. 14313842
MKDRGHCSEKKIDWNRRLQKQLILDDLRVRSMQNRIRRVASTHNVEASQTQIPLSSGINLQTLNYIVTMGLGSKNMTVIIDTGSDLTWVQCEPCMSCYNQQGPIFKPSTSSSYQSVSCNSSTCQSLQFATGNTGACGSSNPSTCNYVVNYGDGSYTNGELGVEALSFGGVSVSDFVFGCGRNNKGLFGGVSGLMGLGRSYLSLVSQTNATFGGVFSYCLPTTEAGSSGSLVMGNESSVFKNANPITYTRMLSNPQLSNFYILNLTGIDVGGVALKAPLSFGNGGILIDSGTVITRLPSSVYKALKAEFLKKFTGFPSAPGFSILDTCFNLTGYDEVSIPTISLRFEGNAQLNVDATGTFYVVKEDASQVCLALASLSDAYDTAIIGNYQQRNQRVIYDTKQSKVGFAEEPCSFA

SEQ ID NO: 59571 - protein, 383 aa, Glycine max
  peptide (1)..(383): Ceres Seq. ID no. 14313843
MQNRIRRVASTHNVEASQTQIPLSSGINLQTLNYIVTMGLGSKNMTVIIDTGSDLTWVQCEPCMSCYNQQGPIFKPSTSSSYQSVSCNSSTCQSLQFATGNTGACGSSNPSTCNYVVNYGDGSYTNGELGVEALSFGGVSVSDFVFGCGRNNKGLFGGVSGLMGLGRSYLSLVSQTNATFGGVFSYCLPTTEAGSSGSLVMGNESSVFKNANPITYTRMLSNPQLSNFYILNLTGIDVGGVALKAPLSFGNGGILIDSGTVITRLPSSVYKALKAEFLKKFTGFPSAPGFSILDTCFNLTGYDEVSIPTISLRFEGNAQLNVDATGTFYVVKEDASQVCLALASLSDAYDTAIIGNYQQRNQRVIYDTKQSKVGFAEEPCSFA

SEQ ID NO: 59572 - DNA, 1471 bp, Glycine max
  misc_feature (1)..(1471): Ceres Seq. ID no. 15169300
gtgttagtagagagacagagacaccggtcacagtcacaccacaccggcaaatattttgcattgcttagggttttggaacagattcaattcagcgttacttcaatccaagcacatggcgaaaggaaagcatacgcatacccgagcacaggggaagaagtggtcaacgttctcgctggttctgtgggcgcttttcttcctcacactcatcctcgtcgtgctccttgctctcggcattgtttatcttccaactaccgacgacgattttccaaccacggatctcagcgccttcaggcgcaagacctctcaaagtgccgagagtttggtggaaaatccgccggagcagtggaccgagattctctcctgggagcctagagcgttcatctatcacaattttctgtcaaaagaagaatgtgagtacttgattgaacttgccaaacctcaaatggtaaaatcaagtgttgttgatagcaagactgggaagagtacagaaagcagggttcgaaccagttcaggaatgttcttgaagagaggaaaggacaaaattgtccagaatatagagaaaagaattgctgactttaccttcatacctgaagagaatggagaaggacttcaaattcttcactacgaagtaggacaaaaatatgagcctcactatgattacttccttgatgagttcaacactaagaatggaggccaacgtattgctacagttcttatgtacctttcagatgttgaagaaggcggtgagactgtatttccggctgccaatgcaaattttagttctgtgccttggtggaatgatttatcccaatgtgcaagaaagggtctctcagtgaaaccaaaaatgggtgatgctctgctattttggagcatgaggcctgatgccacactagatccatctagtttacatggtggttgcccagtaattaaaggaaataaatggtcttcaacaaagtggatgcatcttcgtgagtacaaggtttgacccatcaactgcacaggattaacgtggtacagggtgagtatttcatcacattttggattggataaacacaagttcagtgcatttcatgttcaccttttatgctacctagtgatgttcccctttgctcaggtgcgccagcattttcttcacttgtagaataaaccatttggtttctctttctcatggatagacaattttggcattgccaagggaaaaaagaatactttcagttaatgatctgagttttagtcttgtagagttttcaagcgaatatgtctattaggtaagaggctcaccagggagtgatgtgttgaatacaagtagagataaatttgcaatttactggggagtgatgtgttgaatacaagtagagataaatttgcaatttagcatagtgaaaggatggtatgttggtcatagataagtttttgagaatgtgctatatttcacagaagtaagaaaaacaataatttttttagtttgtat

SEQ ID NO: 59573 - protein, 290 aa, Glycine max
  peptide (1)..(290): Ceres Seq. ID no. 15169301
MAKGKHTHTRAQGKKWSTFSLVLWALFFLTLILVVLLALGIVYLPTTDDDFPTTDLSAFRRKTSQSAESLVENPPEQWTEILSWEPRAFIYHNFLSKEECEYLIELAKPQMVKSSVVDSKTGKSTESRVRTSSGMFLKRGKDKIVQNIEKRIADFTFIPEENGEGLQILHYEVGQKYEPHYDYFLDEFNTKNGGQRIATVLMYLSDVEEGGETVFPAANANFSSVPWWNDLSQCARKGLSVKPKMGDALLFWSMRPDATLDPSSLHGGCPVIKGNKWSSTKWMHLREYKV

SEQ ID NO: 59574 - protein, 180 aa, Glycine max
  peptide (1)..(180): Ceres Seq. ID no. 15169302
MVKSSVVDSKTGKSTESRVRTSSGMFLKRGKDKIVQNIEKRIADFTFIPEENGEGLQILHYEVGQKYEPHYDYFLDEFNTKNGGQRIATVLMYLSDVEEGGETVFPAANANFSSVPWWNDLSQCARKGLSVKPKMGDALLFWSMRPDATLDPSSLHGGCPVIKGNKWSSTKWMHLREYKV

SEQ ID NO: 59575 - protein, 156 aa, Glycine max
  peptide (1)..(156): Ceres Seq. ID no. 15169303
MFLKRGKDKIVQNIEKRIADFTFIPEENGEGLQILHYEVGQKYEPHYDYFLDEFNTKNGGQRIATVLMYLSDVEEGGETVFPAANANFSSVPWWNDLSQCARKGLSVKPKMGDALLFWSMRPDATLDPSSLHGGCPVIKGNKWSSTKWMHLREYKV

SEQ ID NO: 59576 - DNA, 1292 bp, Glycine max
  misc_feature (1)..(1292): Ceres Seq. ID no. 15171109
acatattattttctgtggtttgtattttttgttctatctattttgtttcctcttgtgtgagcacatgtttgaaaatcaaatcaaaggcattcacttgaaccgttgttttcttttgacaaatttgtctgcacacttcattgggctcgcttaaagtgattcgtggttcatacttgttcacataaaaaagctacaagagaaagacgagcgctttcatatttgttgtaatcttaaaatcagacaaatggatgttgaagtagtagggcctatagtaggattttttcaaacttagttttctttcatctaccaaaatcttcgcattcacatttcacacactgtctggcatcccctaacaatattcattcatttattcattaccatttatgatgggattaatgcttaggtggcaaaagagagagccctaccagttggaccagaggaaggtggttttggaatgtcatatgatcttctgtatggacgagctggattcttatggggtgcattgttcgtgaacaagcacctaggagaagatgcagtgcccaaagacattttgatgcttattattgatgcggtgttggctggtggtagagcaggagcatctgatattaaagactgcccattgatgtatagatggcatggaacaaggtacttgggtgcagcaaatggccttgctggtatccttcatgtgctgctacattttccacttccaagtgaggatgctgaggatgtcaagggaactttgtggtacctcatgagtaagcgtttccctcacagtggaaactatccctccagtgaaggtaatccaagggataagttagtgcaatggggtcatggggcgactggcatggccatcacgttgtccaaagcagcagaggtatttcctaatgacagagaactaagagatgctgcaatagaagcaggtgaagttgtatggaagagtggattggtgaagaaggtgggacttgcagatggggtatctgggaatgcctatgccttcctttccctctacagactcactaaagagagtatatacgaagagagagcaaaatcattcgcttccttcttgtatgataatgcaaaatctctggctgctgccaatggctattcacttttccaaggacttgctgggacagcatgcctctggtttgatctgcttgcacccgacaactctaggttcccaggttatgaattatagatggttaaagtagagatggtgcttattctacaagcagaaggaacgtggcatggatggaaaatgttaggtagaacaccaatcataagtgatatgatctgat

SEQ ID NO: 59577 - protein, 246 aa, Glycine max
  peptide (1)..(246): Ceres Seq. ID no. 15171110
MSYDLLYGRAGFLWGALFVNKHLGEDAVPKDILMLIIDAVLAGGRAGASDIKDCPLMYRWHGTRYLGAANGLAGILHVLLHFPLPSEDAEDVKGTLWYLMSKRFPHSGNYPSSEGNPRDKLVQWGHGATGMAITLSKAAEVFPNDRELRDAAIEAGEVVWKSGLVKKVGLADGVSGNAYAFLSLYRLTKESIYEERAKSFASFLYDNAKSLAAANGYSLFQGLAGTACLWFDLLAPDNSRFPGYEL

SEQ ID NO: 59578 - protein, 213 aa, Glycine max
  peptide (1)..(213): Ceres Seq. ID no. 15171111
MLIIDAVLAGGRAGASDIKDCPLMYRWHGTRYLGAANGLAGILHVLLHFPLPSEDAEDVKGTLWYLMSKRFPHSGNYPSSEGNPRDKLVQWGHGATGMAITLSKAAEVFPNDRELRDAAIEAGEVVWKSGLVKKVGLADGVSGNAYAFLSLYRLTKESIYEERAKSFASFLYDNAKSLAAANGYSLFQGLAGTACLWFDLLAPDNSRFPGYEL

SEQ ID NO: 59579 - protein, 190 aa, Glycine max
  peptide (1)..(190): Ceres Seq. ID no. 15171112
MYRWHGTRYLGAANGLAGILHVLLHFPLPSEDAEDVKGTLWYLMSKRFPHSGNYPSSEGNPRDKLVQWGHGATGMAITLSKAAEVFPNDRELRDAAIEAGEVVWKSGLVKKVGLADGVSGNAYAFLSLYRLTKESIYEERAKSFASFLYDNAKSLAAANGYSLFQGLAGTACLWFDLLAPDNSRFPGYEL

SEQ ID NO: 59580 - DNA, 862 bp, Glycine max
  misc_feature (1)..(862): Ceres Seq. ID no. 13593963
aatcccaattcccagggtctaagcagcacaacactagttcccaacgccgtcacccccgtttgtgcagtgaagaagaagaagatggccgtaaaatcgaagaaagagaaagaacacctgaatcttctcctaggttcccaccttactactatccatgaaaccctccaggttttggatcaaacaccgccatcttcttcttccgccaaagtcacctgggacgatgtcattaagatggctgaacaagtctcaaaacaagctaccacggtgggaatgctgtggactggagagaagccagatgccaaagcagttgaggaaaatatggcatcatatttcaacaccctgcaaggtttccttttactttcccatggcagtacagtaggtgcagggcctaccttgtcttctgctgttcatgcatccgtcaagcaagtcgttgattccagcttcagattgatgaaggaaactgtctctttatacgggtaccattctaaagacctgaaaatatcagtaccacaattggttggtgctgtctgggaagcctgttctgcccttaaaaagactccttccacaaatattacagcaattgggagaggaatgacacaggttgctgtttcagtgaaggacgttcttcgtgagatgaaagaattgaaacctgtttcatgtgatgatcaagttgacgaagctgctggtgagagttgtgcagaagcagcgtctgagccacatgatgataattcaagtgaaggtgatctagggaatgacctgtcacctgaagagatgaaagtggctgaaagagcaattgaggttgtctctaatacgctttcatttataagaatacttattcactccatcatacgcttgcttaagctgg

SEQ ID NO: 59581 - protein, 287 aa, Glycine max
  peptide (1)..(287): Ceres Seq. ID no. 13593964
NPNSQGLSSTTLVPNAVTPVCAVKKKKMAVKSKKEKEHLNLLLGSHLTTIHETLQVLDQTPPSSSSAKVTWDDVIKMAEQVSKQATTVGMLWTGEKPDAKAVEENMASYFNTLQGFLLLSHGSTVGAGPTLSSAVHASVKQVVDSSFRLMKETVSLYGYHSKDLKISVPQLVGAVWEACSALKKTPSTNITAIGRGMTQVAVSVKDVLREMKELKPVSCDDQVDEAAGESCAEAASEPHDDNSSEGDLGNDLSPEEMKVAERAIEVVSNTLSFIRILIHSIIRLLKL

SEQ ID NO: 59582 - protein, 260 aa, Glycine max
  peptide (1)..(260): Ceres Seq. ID no. 13593965
MAVKSKKEKEHLNLLLGSHLTTIHETLQVLDQTPPSSSSAKVTWDDVIKMAEQVSKQATTVGMLWTGEKPDAKAVEENMASYFNTLQGFLLLSHGSTVGAGPTLSSAVHASVKQVVDSSFRLMKETVSLYGYHSKDLKISVPQLVGAVWEACSALKKTPSTNITAIGRGMTQVAVSVKDVLREMKELKPVSCDDQVDEAAGESCAEAASEPHDDNSSEGDLGNDLSPEEMKVAERAIEVVSNTLSFIRILIHSIIRLLKL

SEQ ID NO: 59583 - protein, 211 aa, Glycine max
  peptide (1)..(211): Ceres Seq. ID no. 13593966
MAEQVSKQATTVGMLWTGEKPDAKAVEENMASYFNTLQGFLLLSHGSTVGAGPTLSSAVHASVKQVVDSSFRLMKETVSLYGYHSKDLKISVPQLVGAVWEACSALKKTPSTNITAIGRGMTQVAVSVKDVLREMKELKPVSCDDQVDEAAGESCAEAASEPHDDNSSEGDLGNDLSPEEMKVAERAIEVVSNTLSFIRILIHSIIRLLKL

SEQ ID NO: 59584 - DNA, 1232 bp, Glycine max
  misc_feature (1)..(1232): Ceres Seq. ID no. 14314172
gagccgaaaaccattcatataattcgtggttccgctgaagccccgtttcatagatacttttctcatttggtgtatctgctaagcctatataccttcaggagatttcactctgctccccaaccccctttcctcttctattgattactacttattttcaagggatcaatacaatataatggttcaaacatgctaacggtgtatgctcccagagcagttctaaagtgccatttacaccaggattcagcttcttctcaacaaccatattcatatccatgcaagatcaataataatgttcatttggtgaattgtaatcctaaaccttttggcactccttgtactaatatatcgtttcatagttcctccttctctgggaaatgtgataagctacaaaagagccttcatctattccatcatgttgccacacataaatggctgtgtggattacaggattccatttcatctgatgatgagtatcgttcttcacgcaacatagccatcagcttgttcaggcgatacaggaacttcattgatcgtggtggaggggacaatctaaaagagttcatcactgccggggtaaatgcatatgcgctaggatgcactgatgaaggattaaggaaagaacttgtggatatgaagaattctgggatcgaaattgatgtaatgcaaagttatggtggaagcacaagcttaaaatctaagatcatctcagaggaggttgatgaatgcattctctggctaagcattatattcatcaccatcttgtgtacaccccaaccaactattgttagatggtcatctacaactccagtctcagatgaagttagacttcagtggaaaggcttttgtgctcttatagcaaatgcatattttatgaagggaatggcttggcttcctgtaaagactcttcaattagaacagacggctgtgatgggtcaggctgagaaaccgtcagttgttgctagccgaatgcgtttagtctttagcacacttgaggtagtgagtccacagtggccaagagcatagaccatgggatcatgttaaaactggctctcaatcatttcacgttgagttgtattccatatttgctaacaaatgtagcaatatcatgccagagaggatattaaaaaggaaagaaaagaaaaaactggatttctattttgtatgttatcaaagtgagacattatatattgcaattttagtgctatactaagttagaggaaggctaattatcg

SEQ ID NO: 59585 - protein, 278 aa, Glycine max
  peptide (1)..(278): Ceres Seq. ID no. 14314173
MLTVYAPRAVLKCHLHQDSASSQQPYSYPCKINNNVHLVNCNPKPFGTPCTNISFHSSSFSGKCDKLQKSLHLFHHVATHKWLCGLQDSISSDDEYRSSRNIAISLFRRYRNFIDRGGGDNLKEFITAGVNAYALGCTDEGLRKELVDMKNSGIEIDVMQSYGGSTSLKSKIISEEVDECILWLSIIFITILCTPQPTIVRWSSTTPVSDEVRLQWKGFCALIANAYFMKGMAWLPVKTLQLEQTAVMGQAEKPSVVASRMRLVFSTLEVVSPQWPRA

SEQ ID NO: 59586 - DNA, 1836 bp, Glycine max
  misc_feature (1)..(1836): Ceres Seq. ID no. 15174547
agaatcagataagtgttggtttgtttttttgttgagaagagagaatggctgtggcgtcgtcatcatcccttatcacgttgaaggtgaaaccttgcattttcgggtctcctcggagatccgcggtggttcggaattgtgcgaagtcaacggcggggacaatatcgacgagttggagcctggacagctggagggcgaagaaggcgcttcagcttccggagtacccagatgcgaatgaattggacctagtcctccaaaccctctcttcttttcccccaatcgtcttcgccggcgaggcgaggaatctggaggagaagctcgctcaggctgccatggggaacgcttttctccttcagggcggtgattgcgccgagagcttcaaggaattcactgccaacaacatccgtgacaccttccgtgtcatccttcaaatgggtgtggtcctcatgttcggtggccaaatgcccgttatcaaggtggggagaatggcaggtcaatttgcaaagccgagatccgattcatttgaggagaagaatggagtgacgctcccgagttacaggggtgataatgtgaatggcgatgcatttgacgcggcatctagaatccccgatccacagaggatgataagagcctactgccaatctgtgtctactctgaaccttttgcgggcatttgccacgggaggttatgctgccatgcaaagggttaatcaatggaatcttgatttcatggagcatagtgaacagggagacaggtaccgtgaattagcccatagagtggatgaggctcttggcttcatgaatgttgctgggctcacagccgaccatcccatcatgagtacaacagacttttggacctcccatgagtgtttgcttctcccttatgagcaagcacttactagggaggattctactactgggcttcattatgattgctcagctcacatgctatgggttggggaacgtacccgccaacttgatggtgctcatgttgaattcttgagaggagttgctaatccacttggcatcaaggtgagtgataagatggttcccgatgaacttgttaagctgatagatattctgaaccctaaaaacaagcctggaagaattacagtcattgttagaatgggagctgagaatatgcgagtgaagcttccacatcttatcagggcagttcgcagagcaggtcaaattgtcacttgggttagtgaccccatgcatgggaacaccattaaagctccatctggacttaaaacccgctcttttgatgcaataagggctgagctgagggcattctttgatgtgcatgatcaagaaggaagctacccaggaggggttcatttagagatgacagggcagaacgtgacagaatgtgttggaggctcaaggactattacttatgatgacttgagctcacgctaccacacacattgtgatccaaggcttaatgcttctcaatctctcgagcttgcatttaatattgcggacaggttgcgcaagagaaggctcaattcaactcgatcacttggaatttagacaagagggggtctgtcttcctttgtacctggatcacaatactggtcaaacatgtgttgagttttcttgagcacagtgaacaaatactctactgggagccactctaccgagtttcataagaacttaaaatagtcggcacaattaatagttgtgctgtatgagtgttacaagacagttcaaaacactgcaggtgtatgtacttgcaagtttgcacttttaagtttggagatagtacgtgtgtagtatttatgctcgactcgagtaaatgagtaataaataaagtttcaaggtacaacttacatcg

SEQ ID NO: 59587 - protein, 495 aa, Glycine max
  peptide (1)..(495): Ceres Seq. ID no. 15174548
MAVASSSSLITLKVKPCIFGSPRRSAVVRNCAKSTAGTISTSWSLDSWRAKKALQLPEYPDANELDLVLQTLSSFPPIVFAGEARNLEEKLAQAAMGNAFLLQGGDCAESFKEFTANNIRDTFRVILQMGVVLMFGGQMPVIKVGRMAGQFAKPRSDSFEEKNGVTLPSYRGDNVNGDAFDAASRIPDPQRMIRAYCQSVSTLNLLRAFATGGYAAMQRVNQWNLDFMEHSEQGDRYRELAHRVDEALGFMNVAGLTADHPIMSTTDFWTSHECLLLPYEQALTREDSTTGLHYDCSAHMLWVGERTRQLDGAHVEFLRGVANPLGIKVSDKMVPDELVKLIDILNPKNKPGRITVIVRMGAENMRVKLPHLIRAVRRAGQIVTWVSDPMHGNTIKAPSGLKTRSFDAIRAELRAFFDVHDQEGSYPGGVHLEMTGQNVTECVGGSRTITYDDLSSRYHTHCDPRLNASQSLELAFNIADRLRKRRLNSTRSLGI

SEQ ID NO: 59588 - protein, 400 aa, Glycine max
  peptide (1)..(400): Ceres Seq. ID no. 15174549
MGNAFLLQGGDCAESFKEFTANNIRDTFRVILQMGVVLMFGGQMPVIKVGRMAGQFAKPRSDSFEEKNGVTLPSYRGDNVNGDAFDAASRIPDPQRMIRAYCQSVSTLNLLRAFATGGYAAMQRVNQWNLDFMEHSEQGDRYRELAHRVDEALGFMNVAGLTADHPIMSTTDFWTSHECLLLPYEQALTREDSTTGLHYDCSAHMLWVGERTRQLDGAHVEFLRGVANPLGIKVSDKMVPDELVKLIDILNPKNKPGRITVIVRMGAENMRVKLPHLIRAVRRAGQIVTWVSDPMHGNTIKAPSGLKTRSFDAIRAELRAFFDVHDQEGSYPGGVHLEMTGQNVTECVGGSRTITYDDLSSRYHTHCDPRLNASQSLELAFNIADRLRKRRLNSTRSLGI

SEQ ID NO: 59589 - protein, 367 aa, Glycine max
  peptide (1)..(367): Ceres Seq. ID no. 15174550
MGVVLMFGGQMPVIKVGRMAGQFAKPRSDSFEEKNGVTLPSYRGDNVNGDAFDAASRIPDPQRMIRAYCQSVSTLNLLRAFATGGYAAMQRVNQWNLDFMEHSEQGDRYRELAHRVDEALGFMNVAGLTADHPIMSTTDFWTSHECLLLPYEQALTREDSTTGLHYDCSAHMLWVGERTRQLDGAHVEFLRGVANPLGIKVSDKMVPDELVKLIDILNPKNKPGRITVIVRMGAENMRVKLPHLIRAVRRAGQIVTWVSDPMHGNTIKAPSGLKTRSFDAIRAELRAFFDVHDQEGSYPGGVHLEMTGQNVTECVGGSRTITYDDLSSRYHTHCDPRLNASQSLELAFNIADRLRKRRLNSTRSLGI

SEQ ID NO: 59590 - DNA, 894 bp, Glycine max
  misc_feature (1)..(894): Ceres Seq. ID no. 12612051
tttcaattcgcagaaaatggcaaaaaccatagggaagctggctgaaaaaacaccagaagttggtgaaactgtcagtggtttgcttgtaaaaaaaggcttcacatatcagattatggcagctgatgatctccatgtcttttcacaactatcaacagcaaacattactcagaggattaccatcccttattcaggtgcctttaatgtcatacagcatagactcaaacagatatatgaaagtgtagctcagtcagtggatgaagaatctggagttcccacattgcaagtccatgagtgtgttactgtgaaacatgaatctgaaaagcatgtctccttgcattgggcctctgatcccatgagtgacatggtatctgattcaattgttgctctggttttaaatatcaaccgcgatgtcccaaaaatagtgaatgaatctgatgccattaagattgaggaagagaatgagaaaaaggcagagaaggttatgcaagccctcctcgtttcactctttggagatgtgaaggtaggtgaaaacggaaaattgataattaacattgatgggaatgtagcagagctaaacaaagaaagtggggaagttgagagtgaaaatgaaggtctcaaggaaagagtaagaacagcattccggcgcattcaaagttctgtgaagccaattcctgtttctgcgccatagtttttcatttccttacattttctttggaaaaggtgaaatgccaccgataaggaacaccagctcacatgtccccgctaacatgagacaattatcacaacatgttaccttcccttccctttaacatgatgagctttgtcacagcattctctgtttccttttgtttattcttcaaatatttggtcatttaatctaaacttattttcttc

SEQ ID NO: 59591 - protein, 228 aa, Glycine max
  peptide (1)..(228): Ceres Seq. ID no. 12612052
FNSQKMAKTIGKLAEKTPEVGETVSGLLVKKGFTYQIMAADDLHVFSQLSTANITQRITIPYSGAFNVIQHRLKQIYESVAQSVDEESGVPTLQVHECVTVKHESEKHVSLHWASDPMSDMVSDSIVALVLNINRDVPKIVNESDAIKIEEENEKKAEKVMQALLVSLFGDVKVGENGKLIINIDGNVAELNKESGEVESENEGLKERVRTAFRRIQSSVKPIPVSAP

SEQ ID NO: 59592 - protein, 223 aa, Glycine max
  peptide (1)..(223): Ceres Seq. ID no. 12612053
MAKTIGKLAEKTPEVGETVSGLLVKKGFTYQIMAADDLHVFSQLSTANITQRITIPYSGAFNVIQHRLKQIYESVAQSVDEESGVPTLQVHECVTVKHESEKHVSLHWASDPMSDMVSDSIVALVLNINRDVPKIVNESDAIKIEEENEKKAEKVMQALLVSLFGDVKVGENGKLIINIDGNVAELNKESGEVESENEGLKERVRTAFRRIQSSVKPIPVSAP

SEQ ID NO: 59593 - protein, 191 aa, Glycine max
  peptide (1)..(191): Ceres Seq. ID no. 12612054
MAADDLHVFSQLSTANITQRITIPYSGAFNVIQHRLKQIYESVAQSVDEESGVPTLQVHECVTVKHESEKHVSLHWASDPMSDMVSDSIVALVLNINRDVPKIVNESDAIKIEEENEKKAEKVMQALLVSLFGDVKVGENGKLIINIDGNVAELNKESGEVESENEGLKERVRTAFRRIQSSVKPIPVSAP

SEQ ID NO: 59594 - DNA, 1375 bp, Glycine max
  misc_feature (1)..(1375): Ceres Seq. ID no. 14307670
attcagtttcacacacatttcacatatcttctcaagttcttttcaattcaaaatcaagatatggaagaacccgtcatggaacaacaaccctccgctgctgcctctgggaacactgccagacccaggcttcagaagtacgcactccgatctgccaataagttgaaggaagagaagtcagaaactcccaattgctccattcctacttctgaaaccatgagggggagaagtgtaggtgcttcaagtgtaagtaaaagtgtgagtgttcttgatttttctggcaaggacaagtctggtagtgccaagccacccagaaggctctcaattcctgccaaaacaccagccacttcaagacccaagctgggtggcaacagtaccccaatcactgagactagaactgggaggagtgcttttggtcaaggcagaagcaaaacaccaatttcagacatttccaagacatcttcacgaaccaagttaaatctcctaacttcggcttcgtattggttaaaccagatcaagctctctgaatccgcggccaagcactcaatttcacttggcttcttcaaactagctttggaggcaggatgtgagcctctcgggccaatgcaagaagggctaaaatcatatgtgggcagacatcagcttgatggtcttgaagaaactgtgaaagcattgtttgagagctataacatctcagaaacaatggagcagtggcaggtgtctgagactatttcacatgtgccagaagagggaactcggtcttccgatgatgatgtgcgtagctcttcttctaccatggggactagaaaactgaaaccaaagtgcttaaacactgattctactcaactcacaccttcgacagagtcagcaaagaaggagacaagtcaaaagagtaatcctggatccaggttgagagggaatctcagcacaaacaccacaactccaaggcctgctctagacaacaggaataataggttggttaaaaaatctgagaagccaagcaagcaagaaccaaataaggaaaagggcatgataaagaggcagggaaagaaatctgatgttaaagaagttagcactccaaagggaggcaaagaaaatatggaagctcggaccactgaagaaaacagcgtgacagaagtggtgtaaacaatctcatgtgcttgtatttctgaaattctgattccccaactttgaagtttgcctagggggtgttctctgtgtggagcgtgcttttgtatattgtataggctgcatttctctttgcttggtcacttggcatattgtgtttgtgtccttttattatacaattgctaatcaaaccatactgtattgaatgttattgtttgtctataaatgattccatactatttgtgaaggc

SEQ ID NO: 59595 - protein, 380 aa, Glycine max
  peptide (1)..(380): Ceres Seq. ID no. 14307671
IQFHTHFTYLLKFFSIQNQDMEEPVMEQQPSAAASGNTARPRLQKYALRSANKLKEEKSETPNCSIPTSETMRGRSVGASSVSKSVSVLDFSGKDKSGSAKPPRRLSIPAKTPATSRPKLGGNSTPITETRTGRSAFGQGRSKTPISDISKTSSRTKLNLLTSASYWLNQIKLSESAAKHSISLGFFKLALEAGCEPLGPMQEGLKSYVGRHQLDGLEETVKALFESYNISETMEQWQVSETISHVPEEGTRSSDDDVRSSSSTMGTRKLKPKCLNTDSTQLTPSTESAKKETSQKSNPGSRLRGNLSTNTTTPRPALDNRNNRLVKKSEKPSKQEPNKEKGMIKRQGKKSDVKEVSTPKGGKENMEARTTEENSVTEVV

SEQ ID NO: 59596 - protein, 360 aa, Glycine max
  peptide (1)..(360): Ceres Seq. ID no. 14307672
MEEPVMEQQPSAAASGNTARPRLQKYALRSANKLKEEKSETPNCSIPTSETMRGRSVGASSVSKSVSVLDFSGKDKSGSAKPPRRLSIPAKTPATSRPKLGGNSTPITETRTGRSAFGQGRSKTPISDISKTSSRTKLNLLTSASYWLNQIKLSESAAKHSISLGFFKLALEAGCEPLGPMQEGLKSYVGRHQLDGLEETVKALFESYNISETMEQWQVSETISHVPEEGTRSSDDDVRSSSSTMGTRKLKPKCLNTDSTQLTPSTESAKKETSQKSNPGSRLRGNLSTNTTTPRPALDNRNNRLVKKSEKPSKQEPNKEKGMIKRQGKKSDVKEVSTPKGGKENMEARTTEENSVTEVV

SEQ ID NO: 59597 - protein, 355 aa, Glycine max
  peptide (1)..(355): Ceres Seq. ID no. 14307673
MEQQPSAAASGNTARPRLQKYALRSANKLKEEKSETPNCSIPTSETMRGRSVGASSVSKSVSVLDFSGKDKSGSAKPPRRLSIPAKTPATSRPKLGGNSTPITETRTGRSAFGQGRSKTPISDISKTSSRTKLNLLTSASYWLNQIKLSESAAKHSISLGFFKLALEAGCEPLGPMQEGLKSYVGRHQLDGLEETVKALFESYNISETMEQWQVSETISHVPEEGTRSSDDDVRSSSSTMGTRKLKPKCLNTDSTQLTPSTESAKKETSQKSNPGSRLRGNLSTNTTTPRPALDNRNNRLVKKSEKPSKQEPNKEKGMIKRQGKKSDVKEVSTPKGGKENMEARTTEENSVTEVV

SEQ ID NO: 59598 - DNA, 1410 bp, Glycine max
  misc_feature (1)..(1410): Ceres Seq. ID no. 14313654
agagaaattccttgacataaccaaagatacattcgtggacatgatgctgctggacgccgtattcatcatggaacttatgttgagaaactgcgagttcaaatcacacaaagccaagcatgagcaaaaccacaagcgaaccgaatcctttagaattaaaaacaacaatgatctgatcatgacacactcatggcttagcaggaacatcgctggggacttgatccttatagagaaccaaatacccttttttgtgctgcagaaactctatgatgatgttgtccctcgtgaaagcaagaaggatgaacacactgcggggtttgttaagcttgctactgagtactttgctttctatgacacccaaatgtcttcttctggtgaaaccaagaaacactgttcctgttacatactccactgtctgaaggaaccttgtaagtcaaaaggaaaagataggagtgagatttcgaaacgtcctctaggaagcaattctgaagagaatccagaaggaccaaaacatttcactgatctgataaggtggcaattttaccttcccaccgagtgtgaagccggtcatgctcatcaggttctaagaactgcaacaaagttacaaggctcagggataagctttgagaaaggtgatgtgaacaagcggttactggaaatagccttcaagaagaccccaattctgagttcatttctttgctttggttgctttccattgtcgaagctcttcaaagcgcgtttgaggattccccaattgaaggtagaccacacaactgaacgtgtgttcaagaacctcgttgcttttgagcagtttcactatccagacaagccttacttttgcaactatgtttctttcattgactctctgatacacactcagcttgatgtggagttgctggttgagaaggaagtgattgtgcatgaacttgggagtgataaggaagtggcaactcttgttaatggtttatgcaaacatgttgtcacaaactcaacttgttaccatcacattataaataagctcaacgaccattacatgaacgattggaaccacactattgcggctttaaggttggtgtacttcagagatctttggagggcaagtggcactgtggtgggtattgctgtgctggtttttgctgtcttccaattcctccgtgtttgtcgttatctcttctagaatgaacaaaaatgtaactcagtttggattattattgcaaataacagctacaaccatggagtgcttattttcttcttgtttctaggggtttgatttgttgttgtttagatttcagattaggagttctgattctgtttttatataaatttaaaatatttaaaattatgttgttatacctacaaacaatggatgtatcagttatgttttgtgctctttatatatacagttgtttcaac

SEQ ID NO: 59599 - protein, 390 aa, Glycine max
  peptide (1)..(390): Ceres Seq. ID no. 14313655
EKFLDITKDTFVDMMLLDAVFIMELMLRNCEFKSHKAKHEQNHKRTESFRIKNNNDLIMTHSWLSRNIAGDLILIENQIPFFVLQKLYDDVVPRESKKDEHTAGFVKLATEYFAFYDTQMSSSGETKKHCSCYILHCLKEPCKSKGKDRSEISKRPLGSNSEENPEGPKHFTDLIRWQFYLPTECEAGHAHQVLRTATKLQGSGISFEKGDVNKRLLEIAFKKTPILSSFLCFGCFPLSKLFKARLRIPQLKVDHTTERVFKNLVAFEQFHYPDKPYFCNYVSFIDSLIHTQLDVELLVEKEVIVHELGSDKEVATLVNGLCKHVVTNSTCYHHIINKLNDHYMNDWNHTIAALRLVYFRDLWRASGTVVGIAVLVFAVFQFLRVCRYLF

SEQ ID NO: 59600 - protein, 377 aa, Glycine max
  peptide (1)..(377): Ceres Seq. ID no. 14313656
MMLLDAVFIMELMLRNCEFKSHKAKHEQNHKRTESFRIKNNNDLIMTHSWLSRNIAGDLILIENQIPFFVLQKLYDDVVPRESKKDEHTAGFVKLATEYFAFYDTQMSSSGETKKHCSCYILHCLKEPCKSKGKDRSEISKRPLGSNSEENPEGPKHFTDLIRWQFYLPTECEAGHAHQVLRTATKLQGSGISFEKGDVNKRLLEIAFKKTPILSSFLCFGCFPLSKLFKARLRIPQLKVDHTTERVFKNLVAFEQFHYPDKPYFCNYVSFIDSLIHTQLDVELLVEKEVIVHELGSDKEVATLVNGLCKHVVTNSTCYHHIINKLNDHYMNDWNHTIAALRLVYFRDLWRASGTVVGIAVLVFAVFQFLRVCRYLF

SEQ ID NO: 59601 - protein, 376 aa, Glycine max
  peptide (1)..(376): Ceres Seq. ID no. 14313657
MLLDAVFIMELMLRNCEFKSHKAKHEQNHKRTESFRIKNNNDLIMTHSWLSRNIAGDLILIENQIPFFVLQKLYDDVVPRESKKDEHTAGFVKLATEYFAFYDTQMSSSGETKKHCSCYILHCLKEPCKSKGKDRSEISKRPLGSNSEENPEGPKHFTDLIRWQFYLPTECEAGHAHQVLRTATKLQGSGISFEKGDVNKRLLEIAFKKTPILSSFLCFGCFPLSKLFKARLRIPQLKVDHTTERVFKNLVAFEQFHYPDKPYFCNYVSFIDSLIHTQLDVELLVEKEVIVHELGSDKEVATLVNGLCKHVVTNSTCYHHIINKLNDHYMNDWNHTIAALRLVYFRDLWRASGTVVGIAVLVFAVFQFLRVCRYLF

SEQ ID NO: 59602 - DNA, 1321 bp, Glycine max
  misc_feature (1)..(1321): Ceres Seq. ID no. 14313674
tctagattcacgtgttgtagaatcaacaacagattttcctcagaagttcttctactgcttttggtggggtttgcgcaatttaagttctcttggacaaaatctaaagactagtactgatgtctcagaaatagcttttgcaatcttcattgccatctttggattggtcttattctcattacttattggaaacatgcagaaatatctgcaatctacaactgtaagagtggaggagatgagagtgaagagacaggacgcagaacagtggatgtcccaccgtatgctacctgagaacttgagggaaagaattagaaagtacgaacagtaccaatggcaagaaaataggggtgttgaggaggaggcattaattcgtaaccttcctaaagatctcagaagggacattaagcgtcacctttgcttaactttagttaaaaaagtgccaatgtttgagaaaatggatgagcagttgttggatgcaatgtgtgatagactgaagccagtcctttatactgagaagagctacattgttcgtgaagaagatccagttgatgagatgcttttcattatgcgcggaaaagtttcgaccatgacaacgaatggtggaagaactggtttcttcaactccatgttcctcaaggctggtgacttttgtggagaggaacttctgacatgggctttggatcccaactcctcctcaaatctacccatttcaaccaggacagtagaaactatatcagaagttgaagcctttgctctcacggctgatgacttgaagtttgttgcttcccaatttcgacgccttcacagcaaacagctccaacacgctttcaggttctattcctcacagtggaagacatgggctgctactttcatacaagcagcttggcgtcgatactggaaaaagaagattgagaggtcattgcgcgaagcagaagatgagctacaagatgctttggcaaatgaggaagagtctagtctaagccttggtgcaaccatatatgcatcaaggtttgctgccaatgcactgcgaaatttgagagaaaatagcagacacaatagaatgcaacagagactactacctctgttacctccaaagccagctgaaccagatttcacttctcagaaacactaatttgcaaataggaataagtacatgttaatgttatccatactccatagctattttgtgtgtatattttgggagggttgcttaggaattgcttcaacaactacatgtggatatgtaggggtaatatttcatcaaaatttaattaaacaatcatttagattacaattttttaaataaccgtctagttaatactgc

SEQ ID NO: 59603 - protein, 375 aa, Glycine max
  peptide (1)..(375): Ceres Seq. ID no. 14313675
LDSRVVESTTDFPQKFFYCFWWGLRNLSSLGQNLKTSTDVSEIAFAIFIAIFGLVLFSLLIGNMQKYLQSTTVRVEEMRVKRQDAEQWMSHRMLPENLRERIRKYEQYQWQENRGVEEEALIRNLPKDLRRDIKRHLCLTLVKKVPMFEKMDEQLLDAMCDRLKPVLYTEKSYIVREEDPVDEMLFIMRGKVSTMTTNGGRTGFFNSMFLKAGDFCGEELLTWALDPNSSSNLPISTRTVETISEVEAFALTADDLKFVASQFRRLHSKQLQHAFRFYSSQWKTWAATFIQAAWRRYWKKKIERSLREAEDELQDALANEEESSLSLGATIYASRFAANALRNLRENSRHNRMQQRLLPLLPPKPAEPDFTSQKH

SEQ ID NO: 59604 - protein, 312 aa, Glycine max
  peptide (1)..(312): Ceres Seq. ID no. 14313676
MQKYLQSTTVRVEEMRVKRQDAEQWMSHRMLPENLRERIRKYEQYQWQENRGVEEEALIRNLPKDLRRDIKRHLCLTLVKKVPMFEKMDEQLLDAMCDRLKPVLYTEKSYIVREEDPVDEMLFIMRGKVSTMTTNGGRTGFFNSMFLKAGDFCGEELLTWALDPNSSSNLPISTRTVETISEVEAFALTADDLKFVASQFRRLHSKQLQHAFRFYSSQWKTWAATFIQAAWRRYWKKKIERSLREAEDELQDALANEEESSLSLGATIYASRFAANALRNLRENSRHNRMQQRLLPLLPPKPAEPDFTSQKH

SEQ ID NO: 59605 - protein, 298 aa, Glycine max
  peptide (1)..(298): Ceres Seq. ID no. 14313677
MRVKRQDAEQWMSHRMLPENLRERIRKYEQYQWQENRGVEEEALIRNLPKDLRRDIKRHLCLTLVKKVPMFEKMDEQLLDAMCDRLKPVLYTEKSYIVREEDPVDEMLFIMRGKVSTMTTNGGRTGFFNSMFLKAGDFCGEELLTWALDPNSSSNLPISTRTVETISEVEAFALTADDLKFVASQFRRLHSKQLQHAFRFYSSQWKTWAATFIQAAWRRYWKKKIERSLREAEDELQDALANEEESSLSLGATIYASRFAANALRNLRENSRHNRMQQRLLPLLPPKPAEPDFTSQKH

SEQ ID NO: 59606 - DNA, 1498 bp, Glycine max
  misc_feature (1)..(1498): Ceres Seq. ID no. 15225741
ccgggccccccctcgagtcagctacgtaggcccccccccccccaagcagtgtcagaaagcaaatattgcctattccgcaatatggcggaaaatgcttcgattgagctgaacaagtttgtgttcttttgtttgttggtgctaatacaagtggcagtttctgaaatcatttttgaagagcgttttgatgatggatggcgaggtaggtgggtgaagtcagactggaaaagcagtgaaggcaaagcaggttcattcaagcacacagctggaaaatgggccagtgatccagatgataaaggtattcaaacatccagtgatgccaaacactttgccatctctgcaaaaataccagaattcacaaacaagaacagaacattggtccttcagtattctgtaaaatttgagcaagagattgaatgtggtggaggttacatcaagcttctctctggatttgttaatcaaaagaagtttggtggggatacaccatatattttaatgtttggaccagatttatgtggcacggatacaaagaagctccatgtgatactctcctaccacggtcaaaattaccccataaagaaggacctgcaatgtgaaactgacaggttaactcacttctacacattcattctcaggccagatgccacatacagtgtcctggttgacaatagagagagagattccggaagcatgtatacagattgggatattcttcctccacgaaaaatcaaagatgtcaaggccaaaaagcctaaagactgggaagaaagagaatacattgaagaccctaatgatgtcaaacctgagggatatgattcgatcccaagagaaattcctgacccaaatgctaaagagcctgaaaactgggatgaagaggaagatgggaaatggaaaccaccaaagataccaaatccagcatacaaaggaccatggaaaagaaagaaaatcaagaaccctaactacaaagggaaatggaaaactccatggatagataatccagaatttgaagacgaccctgatctttatgtgcttaagcctatcaagtatgtgggcattgaagtttggcaggttaaaggcggttcagtttttgacaatgttttgatttgtgatgaccctgattatgcaaaacaagttgttgaggaagtgtttgccaacagggagattgaaaaggaaggttttgaagaagcagagaaagtaaggaaagccaaagaggaggaggaggctcaaagagcaagagaagaaggtgaaaagcgtagacgagagagaggtcatgatcgacgataccgggacaaatatagagacaaatatagaaggcatcgccaccatgattacgatgatcatgacgagctttgatgggataaaacgtccttctcagttctcacttatttggttgacaagaatttcgagattgttatgaattatagttacgttgatagtccatctcatgttaatttccaagggaaacattttaattttaaataaaaagtagtctatttgctgc

SEQ ID NO: 59607 - protein, 449 aa, Glycine max
  peptide (1)..(449): Ceres Seq. ID no. 15225742
PGPPSSQLRRPPPPQAVSESKYCLFRNMAENASIELNKFVFFCLLVLIQVAVSEIIFEERFDDGWRGRWVKSDWKSSEGKAGSFKHTAGKWASDPDDKGIQTSSDAKHFAISAKIPEFTNKNRTLVLQYSVKFEQEIECGGGYIKLLSGFVNQKKFGGDTPYILMFGPDLCGTDTKKLHVILSYHGQNYPIKKDLQCETDRLTHFYTFILRPDATYSVLVDNRERDSGSMYTDWDILPPRKIKDVKAKKPKDWEEREYIEDPNDVKPEGYDSIPREIPDPNAKEPENWDEEEDGKWKPPKIPNPAYKGPWKRKKIKNPNYKGKWKTPWIDNPEFEDDPDLYVLKPIKYVGIEVWQVKGGSVFDNVLICDDPDYAKQVVEEVFANREIEKEGFEEAEKVRKAKEEEEAQRAREEGEKRRRERGHDRRYRDKYRDKYRRHRHHDYDDHDEL

SEQ ID NO: 59608 - protein, 422 aa, Glycine max
  peptide (1)..(422): Ceres Seq. ID no. 15225743
MAENASIELNKFVFFCLLVLIQVAVSEIIFEERFDDGWRGRWVKSDWKSSEGKAGSFKHTAGKWASDPDDKGIQTSSDAKHFAISAKIPEFTNKNRTLVLQYSVKFEQEIECGGGYIKLLSGFVNQKKFGGDTPYILMFGPDLCGTDTKKLHVILSYHGQNYPIKKDLQCETDRLTHFYTFILRPDATYSVLVDNRERDSGSMYTDWDILPPRKIKDVKAKKPKDWEEREYIEDPNDVKPEGYDSIPREIPDPNAKEPENWDEEEDGKWKPPKIPNPAYKGPWKRKKIKNPNYKGKWKTPWIDNPEFEDDPDLYVLKPIKYVGIEVWQVKGGSVFDNVLICDDPDYAKQVVEEVFANREIEKEGFEEAEKVRKAKEEEEAQRAREEGEKRRRERGHDRRYRDKYRDKYRRHRHHDYDDHDEL

SEQ ID NO: 59609 - protein, 285 aa, Glycine max
  peptide (1)..(285): Ceres Seq. ID no. 15225744
MFGPDLCGTDTKKLHVILSYHGQNYPIKKDLQCETDRLTHFYTFILRPDATYSVLVDNRERDSGSMYTDWDILPPRKIKDVKAKKPKDWEEREYIEDPNDVKPEGYDSIPREIPDPNAKEPENWDEEEDGKWKPPKIPNPAYKGPWKRKKIKNPNYKGKWKTPWIDNPEFEDDPDLYVLKPIKYVGIEVWQVKGGSVFDNVLICDDPDYAKQVVEEVFANREIEKEGFEEAEKVRKAKEEEEAQRAREEGEKRRRERGHDRRYRDKYRDKYRRHRHHDYDDHDEL

SEQ ID NO: 59610 - DNA, 1346 bp, Glycine max
  misc_feature (1)..(1346): Ceres Seq. ID no. 14310446
ttacttcatatagagtctattttgtcttctatcagaatcgccctacaatttaatgcttgtttcttttacatttgattggctaaacatatcatgaaacaaacaagcaccaagtagaaatgtttttcaaccagtgaaagactgaaagtccattttcaaggcacatgaatcacaaaacatggatagagtaaatatcccagtgcaagctcagaaatagatcttattctgaatactctggtggtcaatagccacagcccacttctattttgtaaattagcttctagcttaagtacatctagatcatgaaaccaaactttgatcttgaagtggaggcatgtgcagcatatgaatctgaagttagcagccaggttgcttccaatgtatctattcaagaaacctctataggtccttgtagtgacagtctcactaacatttccaacatcacaaatccaatagggattcatcctaattcagatgctatttcacttgacttaagtctcaacttcaagaatagtgcgccagggggaagagattcaataggattctccttctcaagcactagcgagagcagcaatgaacctgcctcacaaactacagcagcaaccattccacgagtcttctcttgcaattactgccagcgcaagtttttcagttctcaggctcttggtggacaccagaatgcacacaagagagaaaggacattagcaaaaagggctatgagaatgggatttttctctgaaaggtacgccaatctagcatctctccctctgcatggttctttcaggtccttaggaataaaggcgcactcttcactgcaccatggtttctcaccaacaatgaggcgtcctgagataaagaacaatgcaagatttgatcaagggtatgttggccacccgatattcttggaggatgatgagtcagatttgttgtggcctggtagttttcgtcaagttgctgaggcaggtgatagtcatcagaatttcatactgactggaagttcaaatttgagttttactgaggtgaatccacctgtagacatagataactcaacaccagatttgactttgaaactttgaaggaggttatttggtatggttctgaccttgagttgtcttctttattgctatgttataacacagtaagacatgcatgcaaggggccatgattgccagattgattcctatactcagttgggtttccttttacttttactctcattttcagttttctgttaggaatcttgctttggtattttgctttttatgtttctcattgtataagagctccgggaggacaattttggagcttctgtgcttgttatataaatcatgttatcccttcactgtaag

SEQ ID NO: 59611 - protein, 257 aa, Glycine max
  peptide (1)..(257): Ceres Seq. ID no. 14310447
MKPNFDLEVEACAAYESEVSSQVASNVSIQETSIGPCSDSLTNISNITNPIGIHPNSDAISLDLSLNFKNSAPGGRDSIGFSFSSTSESSNEPASQTTAATIPRVFSCNYCQRKFFSSQALGGHQNAHKRERTLAKRAMRMGFFSERYANLASLPLHGSFRSLGIKAHSSLHHGFSPTMRRPEIKNNARFDQGYVGHPIFLEDDESDLLWPGSFRQVAEAGDSHQNFILTGSSNLSFTEVNPPVDIDNSTPDLTLKL

SEQ ID NO: 59612 - DNA, 1796 bp, Glycine max
  misc_feature (1)..(1796): Ceres Seq. ID no. 14310375
ttttttcctccatttttcgcctcaatcgcacttctctaccttcgatagtaacagtaatctcgaattttaattccgaatatggaatcgagaactaagagtaatccccaattaactagagctctatgctatggaaacgatggcaagcagcagggaaggtcaccatccgttattgtcattggcggtggcatggctgggattgctgctgctcgtgcactccataatgcttcgtttcaggttgttctcttagagtcaagggatagaattggtggccgaattcacactgattactcatttggttttcctgttgacctgggagcatcatggttgcatggagtttccaacgagaatccgctggcttcggtgattgggaggctaggtctacctctttaccgtactagtggggataactccgtactctatgaccatgatttggaaagctatgcactttttgatatggatgggaaacaagttcctccagagttggtaacaaaagttggtgaaatatttgagacaattttacaggagacagataaaataagacaagaatccagtgaagacatgtctgtacttcgtggtctttccattgtttttgacaggaagccggaattgaggttggaggggcttgcgcataaggtgcttcagtggtacttatgcagaatggagggctggtttgctgcagattctgatactatttcactgaaaggatgggaccaggaggtgctgctccctggtggtcatggtcttatggtccgtggttacttgcctgttataaataccctagccaagggacttgatattctcttggggcacagggtcacaaaagtagttaggcgatataatggagtaaaggtaacagtggaaagtgggaaaacgttttttgctgatgctgctgttattgctgtcccacttggggtgctcaaggcaaagaaaatattgtttaagccaaagcttccagactggaaggaagctgccattgcggatcttgggattggacttgagaataaaatcattttacactttgaaaatgtgttttggcctaatgtggagttcttgggagtagttgcagatacatcttatggatgtagctacttccttaatctccacaaggccgccggtcatgctgttctggtttacatgccttctgggcagcttgccaaagacgttgaaaagatgtctgatgaagcagccgtcaacttcgctttcatgcagctcaagaagattcttccagatgcttcttcaccgattcagtatcttgtgtctcggtggggatcagatataaattcactaggttcatatagctacgatgcagttgggaaaccccatgaactatatgagaggctacgggtcccagtagataacttgttctttgcaggggaagcaacgagtatgagctatccaggatctgtccatggggcattctccactggaatgatggccgctgaagattgccggatgcgtgtgctcgagcgatatggagaggttgatttattccagccagtgatgggagaagaggcttccttgtctatcccacttcagatatctcgtctgtaatcatctttgggtcacaactagtggacagaaacagaatctatgcttgttcttttgttatcaacctataggctatatatagcaaatgttttggcaatagtcttcaagactatgtgtccacttgtgaaatcacattttgtgttgcatttccgtagtcagtgttactggtaatgtgaatattgcgtacctaaggccttgtcacttctatcagtctatatataataaaattgtggcaacaatttatgttc

SEQ ID NO: 59613 - protein, 490 aa, Glycine max
  peptide (1)..(490): Ceres Seq. ID no. 14310376
MESRTKSNPQLTRALCYGNDGKQQGRSPSVIVIGGGMAGIAAARALHNASFQVVLLESRDRIGGRIHTDYSFGFPVDLGASWLHGVSNENPLASVIGRLGLPLYRTSGDNSVLYDHDLESYALFDMDGKQVPPELVTKVGEIFETILQETDKIRQESSEDMSVLRGLSIVFDRKPELRLEGLAHKVLQWYLCRMEGWFAADSDTISLKGWDQEVLLPGGHGLMVRGYLPVINTLAKGLDILLGHRVTKVVRRYNGVKVTVESGKTFFADAAVIAVPLGVLKAKKILFKPKLPDWKEAAIADLGIGLENKIILHFENVFWPNVEFLGVVADTSYGCSYFLNLHKAAGHAVLVYMPSGQLAKDVEKMSDEAAVNFAFMQLKKILPDASSPIQYLVSRWGSDINSLGSYSYDAVGKPHELYERLRVPVDNLFFAGEATSMSYPGSVHGAFSTGMMAAEDCRMRVLERYGEVDLFQPVMGEEASLSIPLQISRL

SEQ ID NO: 59614 - protein, 454 aa, Glycine max
  peptide (1)..(454): Ceres Seq. ID no. 14310377
MAGIAAARALHNASFQVVLLESRDRIGGRIHTDYSFGFPVDLGASWLHGVSNENPLASVIGRLGLPLYRTSGDNSVLYDHDLESYALFDMDGKQVPPELVTKVGEIFETILQETDKIRQESSEDMSVLRGLSIVFDRKPELRLEGLAHKVLQWYLCRMEGWFAADSDTISLKGWDQEVLLPGGHGLMVRGYLPVINTLAKGLDILLGHRVTKVVRRYNGVKVTVESGKTFFADAAVIAVPLGVLKAKKILFKPKLPDWKEAAIADLGIGLENKIILHFENVFWPNVEFLGVVADTSYGCSYFLNLHKAAGHAVLVYMPSGQLAKDVEKMSDEAAVNFAFMQLKKILPDASSPIQYLVSRWGSDINSLGSYSYDAVGKPHELYERLRVPVDNLFFAGEATSMSYPGSVHGAFSTGMMAAEDCRMRVLERYGEVDLFQPVMGEEASLSIPLQISRL

SEQ ID NO: 59615 - protein, 365 aa, Glycine max
  peptide (1)..(365): Ceres Seq. ID no. 14310378
MDGKQVPPELVTKVGEIFETILQETDKIRQESSEDMSVLRGLSIVFDRKPELRLEGLAHKVLQWYLCRMEGWFAADSDTISLKGWDQEVLLPGGHGLMVRGYLPVINTLAKGLDILLGHRVTKVVRRYNGVKVTVESGKTFFADAAVIAVPLGVLKAKKILFKPKLPDWKEAAIADLGIGLENKIILHFENVFWPNVEFLGVVADTSYGCSYFLNLHKAAGHAVLVYMPSGQLAKDVEKMSDEAAVNFAFMQLKKILPDASSPIQYLVSRWGSDINSLGSYSYDAVGKPHELYERLRVPVDNLFFAGEATSMSYPGSVHGAFSTGMMAAEDCRMRVLERYGEVDLFQPVMGEEASLSIPLQISRL

SEQ ID NO: 59616 - DNA, 1242 bp, Glycine max
  misc_feature (1)..(1242): Ceres Seq. ID no. 15169292
ggtatccgtgtcttccccaaccattccttaacccaccgcaaattcaaattcaattcgagctgaacctagggttagtcctattgccttcaccgatctcgaatttcggaaacggtaaaagaaaatgcacgtcaaatcggcgcagtcatcgttccgggatcggacacaggaattccacagcatcacagagaggttgaagaagtccggatcagggcccaatgggcccagtagtagcagcacttcttccagatcggaggaacagcgatccgcgatcgcgaatcaatcggagttcaatagaagggcctccaaaatcggctacgggattcaccaaacgtctcagaagctcgccaaactcgccaaattagcgaaaaggacttcggtttttgatgaccctactatggaaatccaagagcttacgggggttattaagcaggatatcactgctctgaactctgctgttgtggatcttcagttggtgtgtagctctaggaatgagactggaaatgtttctgccgatacctctagccattcgagcacggtggtcgatgacttgaagacacggttgatgagcaccaccaaagagtttaaggatgttttgaccatgagaactgagaatatgaaagtgcatgagaatagaagacagttgttttcgtcttctgcttctaaggattctgcgaatccttttattcggcaacggccgttggctgcaagggcggctgctagtacttctagtgcccctgctcttccctgggctaatgggtcaccatcttcatctcaggcgtttcccaagaagcaagtggatggggagagtcaaccattgttgcaacagcaacagcagcagcaggaggtagttccattgcaagatagttacatgcaaagcagagctgaagcacttcagaatgttgagtccactattcatgagcttagcaacattttcaatcagctagcaacacttgtttcccaacaaggagagattgccatcaggattgatgaaaacatggatgatacattggcaaacgtagagggagcacagggggctttgttgaagtatctgaacagcatatcttctaatcggtggttgatgatcaaaattttctttgtattaatatttttccttatggttttcttattttttgtggcatagtcatttgggtgacagaaatgaaaacaatgacatgagtgtcggcgttctgtatttctttaatatttatttctccaaatatatatattcattcttgcagagtt

SEQ ID NO: 59617 - protein, 339 aa, Glycine max
  peptide (1)..(339): Ceres Seq. ID no. 15169293
MHVKSAQSSFRDRTQEFHSITERLKKSGSGPNGPSSSSTSSRSEEQRSAIANQSEFNRRASKIGYGIHQTSQKLAKLAKLAKRTSVFDDPTMEIQELTGVIKQDITALNSAVVDLQLVCSSRNETGNVSADTSSHSSTVVDDLKTRLMSTTKEFKDVLTMRTENMKVHENRRQLFSSSASKDSANPFIRQRPLAARAAASTSSAPALPWANGSPSSSQAFPKKQVDGESQPLLQQQQQQQEVVPLQDSYMQSRAEALQNVESTIHELSNIFNQLATLVSQQGEIAIRIDENMDDTLANVEGAQGALLKYLNSISSNRWLMIKIFFVLIFFLMVFLFFVA

SEQ ID NO: 59618 - protein, 248 aa, Glycine max
  peptide (1)..(248): Ceres Seq. ID no. 15169294
MEIQELTGVIKQDITALNSAVVDLQLVCSSRNETGNVSADTSSHSSTVVDDLKTRLMSTTKEFKDVLTMRTENMKVHENRRQLFSSSASKDSANPFIRQRPLAARAAASTSSAPALPWANGSPSSSQAFPKKQVDGESQPLLQQQQQQQEVVPLQDSYMQSRAEALQNVESTIHELSNIFNQLATLVSQQGEIAIRIDENMDDTLANVEGAQGALLKYLNSISSNRWLMIKIFFVLIFFLMVFLFFVA

SEQ ID NO: 59619 - protein, 192 aa, Glycine max
  peptide (1)..(192): Ceres Seq. ID no. 15169295
MSTTKEFKDVLTMRTENMKVHENRRQLFSSSASKDSANPFIRQRPLAARAAASTSSAPALPWANGSPSSSQAFPKKQVDGESQPLLQQQQQQQEVVPLQDSYMQSRAEALQNVESTIHELSNIFNQLATLVSQQGEIAIRIDENMDDTLANVEGAQGALLKYLNSISSNRWLMIKIFFVLIFFLMVFLFFVA

SEQ ID NO: 59620 - DNA, 1221 bp, Glycine max
  misc_feature (1)..(1221): Ceres Seq. ID no. 15176407
gttcttcctaaaacaaatcgtgtaaaggcaaagtacagacaaagttagttagaaattgaaagggaaagggaaacgaaaatgagtagtagggtttggtgtgtggtgatggtatcagcgttggcgttgatgttacaatggcacgaagcattcagctcctacgctggctccgcaagtgcgatcatcgacccttccaaggtcaaacaagtttcgtggaaaccgagagctttcgtttacgagggttttctgacggaattggaatgcgatcacttgatttccatcgccaaatcggagctcaagagatccgcggtggccgataatttgtccggcgagagcaagttgagcgaagtcagaacgagctccggcatgttcattcccaagaacaaggatctgattgttgctggtattgaagacaagatttcatcatggacctttcttccaaaagaaaatggagaagacatacaagtattaagatatgagcacgggcagaaatatgatcctcattatgattactttgctgataaagttaatatagctcggggtggacaccgagttgcgacagttctcatgtatctcactgatgtaaccaaaggtggtgagacagtgttccctgatgcagaggaatctccacgtcacaaaggttctgaaacaaatgaaaatctctctgagtgtgcccaaaaaggaatagcagtgaaaccacgaagaggggatgcacttcttttctttagtctctacccaaatgctatcccagacacactgagtctacatgcaggatgccctgtaattgaaggtgagaaatggtcagcaacaaaatggattcatgtggactcatttgacaaggtggtgggagatggaggggattgcaatgataagcacgaaaactgtgagagatgggctacccttggagaatgtactagtaatcccgaatatatggttggatctccaggccttcctggctactgcatgaaaagttgcaaggaatgttagaagtgttactgaatgctttccagattccacatggtatttttgacgttgactcaaatttcaattggttctcagatttttattatgtattttctttttttgtgaattgtattgtattctgtctcattataattagctctcagatagtgttctagtgcatggtcacacttcaagaggtacatttcgtcggatactttgtatgtaaaactacaaaaaaggaagtatacgttgttttatccc

SEQ ID NO: 59621 - protein, 301 aa, Glycine max
  peptide (1)..(301): Ceres Seq. ID no. 15176408
MSSRVWCVVMVSALALMLQWHEAFSSYAGSASAIIDPSKVKQVSWKPRAFVYEGFLTELECDHLISIAKSELKRSAVADNLSGESKLSEVRTSSGMFIPKNKDLIVAGIEDKISSWTFLPKENGEDIQVLRYEHGQKYDPHYDYFADKVNIARGGHRVATVLMYLTDVTKGGETVFPDAEESPRHKGSETNENLSECAQKGIAVKPRRGDALLFFSLYPNAIPDTLSLHAGCPVIEGEKWSATKWIHVDSFDKVVGDGGDCNDKHENCERWATLGECTSNPEYMVGSPGLPGYCMKSCKEC

SEQ ID NO: 59622 - protein, 292 aa, Glycine max
  peptide (1)..(292): Ceres Seq. ID no. 15176409
MVSALALMLQWHEAFSSYAGSASAIIDPSKVKQVSWKPRAFVYEGFLTELECDHLISIAKSELKRSAVADNLSGESKLSEVRTSSGMFIPKNKDLIVAGIEDKISSWTFLPKENGEDIQVLRYEHGQKYDPHYDYFADKVNIARGGHRVATVLMYLTDVTKGGETVFPDAEESPRHKGSETNENLSECAQKGIAVKPRRGDALLFFSLYPNAIPDTLSLHAGCPVIEGEKWSATKWIHVDSFDKVVGDGGDCNDKHENCERWATLGECTSNPEYMVGSPGLPGYCMKSCKEC

SEQ ID NO: 59623 - protein, 285 aa, Glycine max
  peptide (1)..(285): Ceres Seq. ID no. 15176410
MLQWHEAFSSYAGSASAIIDPSKVKQVSWKPRAFVYEGFLTELECDHLISIAKSELKRSAVADNLSGESKLSEVRTSSGMFIPKNKDLIVAGIEDKISSWTFLPKENGEDIQVLRYEHGQKYDPHYDYFADKVNIARGGHRVATVLMYLTDVTKGGETVFPDAEESPRHKGSETNENLSECAQKGIAVKPRRGDALLFFSLYPNAIPDTLSLHAGCPVIEGEKWSATKWIHVDSFDKVVGDGGDCNDKHENCERWATLGECTSNPEYMVGSPGLPGYCMKSCKEC

SEQ ID NO: 59624 - DNA, 1328 bp, Glycine max
  misc_feature (1)..(1328): Ceres Seq. ID no. 14313847
acttcttccaatttcaaattcttcactcacccagtcgcgcttttctctgaatttcacgatgcgcacgtccagaaaagcagaaccctccaacaacgacgtcgtttcttcggaacacagaaactggagcaacatcttcaaatcgctggttcagatggtgtgcagccagcagaaccagcttcactccttcgcgagccgccacaagtttctcgaagaccgccttcgaatgcagcacgaagggtgggtctccgatgttcgatgtcacaaggatcaaatttctcagatgaatgggatgttgacgtttgaggagaagaaacagtcgctcgaggcggcaaaggcggattttgcgcttagtttgaagcacagagaggctgctatgttgaaatggattttagagcatgcagaggatgagttggcggattttaaagcctggtttgaaatcctttcttgtaaatcctctaatggagaagatcaaggaacagcatttaaggatactgacttgaagaagaaaggaagcacggatagagggaacatgtccactaggaatactgcagaaaaagagaagtattccagtgaaaacaaagatgaatttagtaggttaaaaggtgaatatgataagcttgctttagaaaaatattcggaggtgacgacactcttggcagaaaagaaatttatgtggaatcaatataatgtaatggagaatgattatgctgataaattaaggactaaagaagctgaagtagaaaaagcaaatgaaaagataaagatacttgtttctagcatggagcagctacagtctgaaaattatgaaaaggatagtaaaatatcagagttacaaagtaaaatggctgagatggaagctgagacaaaaagattgaacaatgaaatatctgaactctcagtggagttggaatctttaagaaagttcaggaacagccaagttacaccatctgttttaaatcgctgcacagaaggaactaaagcacctgagtcaggagttgttaagagcaacaagagtagaagaaatatgactctgaaaaaagaaatatgtactcctgatgctccagttcctgccaaatcctctgaaaaggggacaaaaacaaaaagcatgaagaggaaagaggctccagttattcccacttctgagactccgaaactgttctcttccggcttcaaggttccaaaactgaagtcctctgtaagggtcacatgacagatgacaccttccgataacttttagtgtgttacttaggatatgttagtcttgtacacgcgacttttgtattatatgctccttgtgtaaactatgtattatgaatgagctttctgtc

SEQ ID NO: 59625 - protein, 402 aa, Glycine max
  peptide (1)..(402): Ceres Seq. ID no. 14313848
LLPISNSSLTQSRFSLNFTMRTSRKAEPSNNDVVSSEHRNWSNIFKSLVQMVCSQQNQLHSFASRHKFLEDRLRMQHEGWVSDVRCHKDQISQMNGMLTFEEKKQSLEAAKADFALSLKHREAAMLKWILEHAEDELADFKAWFEILSCKSSNGEDQGTAFKDTDLKKKGSTDRGNMSTRNTAEKEKYSSENKDEFSRLKGEYDKLALEKYSEVTTLLAEKKFMWNQYNVMENDYADKLRTKEAEVEKANEKIKILVSSMEQLQSENYEKDSKISELQSKMAEMEAETKRLNNEISELSVELESLRKFRNSQVTPSVLNRCTEGTKAPESGVVKSNKSRRNMTLKKEICTPDAPVPAKSSEKGTKTKSMKRKEAPVIPTSETPKLFSSGFKVPKLKSSVRVT

SEQ ID NO: 59626 - protein, 383 aa, Glycine max
  peptide (1)..(383): Ceres Seq. ID no. 14313849
MRTSRKAEPSNNDVVSSEHRNWSNIFKSLVQMVCSQQNQLHSFASRHKFLEDRLRMQHEGWVSDVRCHKDQISQMNGMLTFEEKKQSLEAAKADFALSLKHREAAMLKWILEHAEDELADFKAWFEILSCKSSNGEDQGTAFKDTDLKKKGSTDRGNMSTRNTAEKEKYSSENKDEFSRLKGEYDKLALEKYSEVTTLLAEKKFMWNQYNVMENDYADKLRTKEAEVEKANEKIKILVSSMEQLQSENYEKDSKISELQSKMAEMEAETKRLNNEISELSVELESLRKFRNSQVTPSVLNRCTEGTKAPESGVVKSNKSRRNMTLKKEICTPDAPVPAKSSEKGTKTKSMKRKEAPVIPTSETPKLFSSGFKVPKLKSSVRVT

SEQ ID NO: 59627 - protein, 352 aa, Glycine max
  peptide (1)..(352): Ceres Seq. ID no. 14313850
MVCSQQNQLHSFASRHKFLEDRLRMQHEGWVSDVRCHKDQISQMNGMLTFEEKKQSLEAAKADFALSLKHREAAMLKWILEHAEDELADFKAWFEILSCKSSNGEDQGTAFKDTDLKKKGSTDRGNMSTRNTAEKEKYSSENKDEFSRLKGEYDKLALEKYSEVTTLLAEKKFMWNQYNVMENDYADKLRTKEAEVEKANEKIKILVSSMEQLQSENYEKDSKISELQSKMAEMEAETKRLNNEISELSVELESLRKFRNSQVTPSVLNRCTEGTKAPESGVVKSNKSRRNMTLKKEICTPDAPVPAKSSEKGTKTKSMKRKEAPVIPTSETPKLFSSGFKVPKLKSSVRVT

SEQ ID NO: 59628 - DNA, 1164 bp, Glycine max
  misc_feature (1)..(1164): Ceres Seq. ID no. 15169703
ataaattaagaaccctcttttgggaggtgtccttctttttcatgcccatctttcccctaatgctggtggtgggttcagttttttggtgaggaaggataataaagaaggaagctttttttgtgtgagagaaggaagaggagaaaagaaggcatggggagagggaagattgagattaagaagattgagaatttgaacagcagacaagttaccttctccaagaggagaaatgggttgttgaagaaggccaaagagttgtctgttctctgtgatgcagaggttgctgtcatcatattctccagcactggcaagctttatgagttctcaaacacaagcatggagcataccctttcgaggtacagtaaaggcgcagaatcagattctgcagagcaacctattgatgtgcccccaacagatgttatggctgtggagcctgatactaaccttttgatggaggaaataacaaagcttcgatcagcatacttaaggatgatgggtaaggagcttgatggattgagccttaaagaactgcaacaactagaaaatcaactaagtgaagggatgcaatctgtcaaagacaagaaggaacaagtacttgtggaacagcttaggaagtccaggatacaggagcaaaaggccatgctggaaaatgaagttctgcgcaaacagcttgaggaaatacaaaataaaacaaagtcacagttccttgaattcagctctttggataggacattttccaagaatggttcaaaatcccttttcaattgtgcttcagaggaaaatgacctttcagatacttccttgcagttagggttgtcaacagattatggtcgccagaggaaagcattgaagatggaaccttgcaacgactcagggagtcaagtggcttcacattgacattttagtactgaaagcttacctttagaacatgggaaacatggcctagttctttatctggtcacattaagtttagcttatagaaatagtttaggctaaatttaataaatttatatttagttcacaaatttttggctttcaccagcgtttgattgctaaattaggtgtaagtttacatgctaaatgactcaccctattgaaatactttagtcatttagttcaaccaaacggttttcaggttattaagatggttgattagataaaaaggtc

SEQ ID NO: 59629 - protein, 247 aa, Glycine max
  peptide (1)..(247): Ceres Seq. ID no. 15169704
MGRGKIEIKKIENLNSRQVTFSKRRNGLLKKAKELSVLCDAEVAVIIFSSTGKLYEFSNTSMEHTLSRYSKGAESDSAEQPIDVPPTDVMAVEPDTNLLMEEITKLRSAYLRMMGKELDGLSLKELQQLENQLSEGMQSVKDKKEQVLVEQLRKSRIQEQKAMLENEVLRKQLEEIQNKTKSQFLEFSSLDRTFSKNGSKSLFNCASEENDLSDTSLQLGLSTDYGRQRKALKMEPCNDSGSQVASH

SEQ ID NO: 59630 - protein, 186 aa, Glycine max
  peptide (1)..(186): Ceres Seq. ID no. 15169705
MEHTLSRYSKGAESDSAEQPIDVPPTDVMAVEPDTNLLMEEITKLRSAYLRMMGKELDGLSLKELQQLENQLSEGMQSVKDKKEQVLVEQLRKSRIQEQKAMLENEVLRKQLEEIQNKTKSQFLEFSSLDRTFSKNGSKSLFNCASEENDLSDTSLQLGLSTDYGRQRKALKMEPCNDSGSQVASH

SEQ ID NO: 59631 - protein, 158 aa, Glycine max
  peptide (1)..(158): Ceres Seq. ID no. 15169706
MAVEPDTNLLMEEITKLRSAYLRMMGKELDGLSLKELQQLENQLSEGMQSVKDKKEQVLVEQLRKSRIQEQKAMLENEVLRKQLEEIQNKTKSQFLEFSSLDRTFSKNGSKSLFNCASEENDLSDTSLQLGLSTDYGRQRKALKMEPCNDSGSQVASH

SEQ ID NO: 59632 - DNA, 1617 bp, Glycine max
  misc_feature (1)..(1617): Ceres Seq. ID no. 15172112
aagaggggcttccccacgccatcctctctcccaacaagagagcgaacgagcccattcctgtttctccaccaccgaacacacacacgccctttgcttccttcctcacctcgcgctaacctgcaccccccttcttatcctgcgcaccccttctttatccaattctttcctcagattcggagcaccgcgcgcgccaccattgggaaaagaggttccggtgctgggggcctagggttagggtttctgagagatgtgggatgctccatgcattgatgagccttatcgcgcgctgttggaagccgttcgggcacggtgacgatgccggtaatgccgccgccggaagagaatgcaaggacggcctcctctggttccgcgacatcggaaagtttgcagccggcgatttctccatggccgtcgtccaggccaaccaggtcatcgaggaccagagccagatcgagtccggcgccttcggcaccttcgtcggcgtctacgacggccacggcggccccgattgctcccgctacgtttgcgataacttgttccgcaatctccaagcgatattggccgagtcacagagtgttgtgacatctgaggccattcatcaggcgttccggcggacagaggaggggtttacggcgcttgtttcggagctgtggagctctcggccgcagattgcgactactgggacgtgttgtttggttggggttatttgtcggcagacactctttgtggcaagtcttggagattcccgtgctgtgttgggtaggagagttggcaacaccggtgggatggccgcgattcagttgtctacggagcacaatgcgaattttgaggctgtcaggcaggagcttaaggaattgcacccgaatgacccccagattgttgtcctcaaacatggagtgtggagagtaaagggcattattcaggtttctagatctataggtgacgtatatatgaaacatgcgcagtttaaccgagaacccattaatgcaaaattcagactccccgaaccaatgaacatgcctttcttgtctgctaatccaactattctttctcatcctctccaaccaaatgattccttccttatatttgcatcagatggtttatgggagcacctgagtaatgatcaagcagtggatattgttcacagcagtccatgcgcgggtagtgcgaagaaacttgtcaaggctgccctacaagaagcagcaagaaaacgtgaaatgcgatattcagacctttacaagattgacaagaaggttcgtcgccattttcacgacgatataactgttattgttttattcttaaaccacaaccttatatccaggggtgcagttctaaatacaccacttacaattcgtagtgctctcgatcactgacgcttcatgatttgtaaacatgcttctcttatacgggtgttctggcaactgtgccaataccagaaaatacaccattggtacgttgctagaatataccattcatagtgctgccacgtatggttactgataccgagacaacttattgatgacgcacgaacttgtaacacttgttagaagtttatccatgaaaatgaaaaagagaaaaagaaaaaaaaaaatatcagaaaagtaacttttgattagt

SEQ ID NO: 59633 - protein, 372 aa, Glycine max
  peptide (1)..(372): Ceres Seq. ID no. 15172113
MLHALMSLIARCWKPFGHGDDAGNAAAGRECKDGLLWFRDIGKFAAGDFSMAVVQANQVIEDQSQIESGAFGTFVGVYDGHGGPDCSRYVCDNLFRNLQAILAESQSVVTSEAIHQAFRRTEEGFTALVSELWSSRPQIATTGTCCLVGVICRQTLFVASLGDSRAVLGRRVGNTGGMAAIQLSTEHNANFEAVRQELKELHPNDPQIVVLKHGVWRVKGIIQVSRSIGDVYMKHAQFNREPINAKFRLPEPMNMPFLSANPTILSHPLQPNDSFLIFASDGLWEHLSNDQAVDIVHSSPCAGSAKKLVKAALQEAARKREMRYSDLYKIDKKVRRHFHDDITVIVLFLNHNLISRGAVLNTPLTIRSALDH

SEQ ID NO: 59634 - protein, 367 aa, Glycine max
  peptide (1)..(367): Ceres Seq. ID no. 15172114
MSLIARCWKPFGHGDDAGNAAAGRECKDGLLWFRDIGKFAAGDFSMAVVQANQVIEDQSQIESGAFGTFVGVYDGHGGPDCSRYVCDNLFRNLQAILAESQSVVTSEAIHQAFRRTEEGFTALVSELWSSRPQIATTGTCCLVGVICRQTLFVASLGDSRAVLGRRVGNTGGMAAIQLSTEHNANFEAVRQELKELHPNDPQIVVLKHGVWRVKGIIQVSRSIGDVYMKHAQFNREPINAKFRLPEPMNMPFLSANPTILSHPLQPNDSFLIFASDGLWEHLSNDQAVDIVHSSPCAGSAKKLVKAALQEAARKREMRYSDLYKIDKKVRRHFHDDITVIVLFLNHNLISRGAVLNTPLTIRSALDH

SEQ ID NO: 59635 - protein, 322 aa, Glycine max
  peptide (1)..(322): Ceres Seq. ID no. 15172115
MAVVQANQVIEDQSQIESGAFGTFVGVYDGHGGPDCSRYVCDNLFRNLQAILAESQSVVTSEAIHQAFRRTEEGFTALVSELWSSRPQIATTGTCCLVGVICRQTLFVASLGDSRAVLGRRVGNTGGMAAIQLSTEHNANFEAVRQELKELHPNDPQIVVLKHGVWRVKGIIQVSRSIGDVYMKHAQFNREPINAKFRLPEPMNMPFLSANPTILSHPLQPNDSFLIFASDGLWEHLSNDQAVDIVHSSPCAGSAKKLVKAALQEAARKREMRYSDLYKIDKKVRRHFHDDITVIVLFLNHNLISRGAVLNTPLTIRSALDH

SEQ ID NO: 59636 - DNA, 1326 bp, Glycine max
  misc_feature (1)..(1326): Ceres Seq. ID no. 14307464
aattactatttttcactttctcctttcaatatgaggaaccccactcacaagtcccctgaggttgaaaatgatggtgattttaaagttcatctgttctcttcatcatccgagttgcttgaaaagcttcatgaaaaatggagttcagtggagaaaccaccatacccagctatttattctagtatttatggaggtatcatacttgatccagcaatgatggtaatccccattgatgatcacatggttcacagagggcatggtgtgtttgatacagctattgttctagatggatacctctatgagttggatgttcaccttgacagattcctaagttcagcctccaaagcaaagatatcctctcccttttctcgatcagtgcttcacagcattctaatacaactaactgcagcatcaaaatgcaagaagggaactctaagatactggctcagtgcaggtcctggagatttcttgctatcatcagcaggatgtccaacatctgcattctatgcagtagtcattgaccaagatatttcccaatgcaaagagggagttaaagtgattacttccaacataccaatgaagccttctctatttgccacagccaaaaatgtgaactatcttccaaatgtcctttcagtaatggaagctgaagagaaaggagcatcttcttctatatgggttgatgaggaaggttatattgctgaaggtccaaatgtgaatgttgctttcataactcaagacaaggaacttgtcatgcctccttttgataacatcttacatggttgcactgcaaaaaggctccttgaactggcacccaagttggttgatcaagggcttctgaaaggtgtagcaactaaaaaactaactgtggaggaagctaaagctgctgctgaaatgatgtatgtaggaagcacgcttcctctgttgcctatcatcgtttgggatgatcaacccattggcaatggaagggtgggagaattaacaatgttactttcggatatgctttgggatgatatggtagctggccctggcacacagaggatacctgttccttatgttgagtaaacctacaaagtcatcaaattacaggctgggaacaactttcttacttttctatgtcatgttcctaggagttctccttgcaaagatttatcaagaggtttctctttgtatttgctttttgtatttcaagtgtgaacactgaacaagtccttaagtgaagcaccaggtgtttcctgcaacacaaaatttacgtagcagataaatagtccttgaactgtttcacgttgttgtattgatataataataataatgaagactcttcatgct

SEQ ID NO: 59637 - protein, 353 aa, Glycine max
  peptide (1)..(353): Ceres Seq. ID no. 14307465
NYYFSLSPFNMRNPTHKSPEVENDGDFKVHLFSSSSELLEKLHEKWSSVEKPPYPAIYSSIYGGIILDPAMMVIPIDDHMVHRGHGVFDTAIVLDGYLYELDVHLDRFLSSASKAKISSPFSRSVLHSILIQLTAASKCKKGTLRYWLSAGPGDFLLSSAGCPTSAFYAVVIDQDISQCKEGVKVITSNIPMKPSLFATAKNVNYLPNVLSVMEAEEKGASSSIWVDEEGYIAEGPNVNVAFITQDKELVMPPFDNILHGCTAKRLLELAPKLVDQGLLKGVATKKLTVEEAKAAAEMMYVGSTLPLLPIIVWDDQPIGNGRVGELTMLLSDMLWDDMVAGPGTQRIPVPYVE

SEQ ID NO: 59638 - protein, 343 aa, Glycine max
  peptide (1)..(343): Ceres Seq. ID no. 14307466
MRNPTHKSPEVENDGDFKVHLFSSSSELLEKLHEKWSSVEKPPYPAIYSSIYGGIILDPAMMVIPIDDHMVHRGHGVFDTAIVLDGYLYELDVHLDRFLSSASKAKISSPFSRSVLHSILIQLTAASKCKKGTLRYWLSAGPGDFLLSSAGCPTSAFYAVVIDQDISQCKEGVKVITSNIPMKPSLFATAKNVNYLPNVLSVMEAEEKGASSSIWVDEEGYIAEGPNVNVAFITQDKELVMPPFDNILHGCTAKRLLELAPKLVDQGLLKGVATKKLTVEEAKAAAEMMYVGSTLPLLPIIVWDDQPIGNGRVGELTMLLSDMLWDDMVAGPGTQRIPVPYVE

SEQ ID NO: 59639 - protein, 283 aa, Glycine max
  peptide (1)..(283): Ceres Seq. ID no. 14307467
MMVIPIDDHMVHRGHGVFDTAIVLDGYLYELDVHLDRFLSSASKAKISSPFSRSVLHSILIQLTAASKCKKGTLRYWLSAGPGDFLLSSAGCPTSAFYAVVIDQDISQCKEGVKVITSNIPMKPSLFATAKNVNYLPNVLSVMEAEEKGASSSIWVDEEGYIAEGPNVNVAFITQDKELVMPPFDNILHGCTAKRLLELAPKLVDQGLLKGVATKKLTVEEAKAAAEMMYVGSTLPLLPIIVWDDQPIGNGRVGELTMLLSDMLWDDMVAGPGTQRIPVPYVE

SEQ ID NO: 59640 - DNA, 1618 bp, Glycine max
  misc_feature (1)..(1618): Ceres Seq. ID no. 15171549
gagaacaaaagcgagtgtgagtctcatgggcatgcagacgctgaccctctttcgctccccccaccctatttctcaaaacgctgtcgttccccgccacgccatgtcccgctcctccgaaacctcctttcccaccctcactactatctccatctctttctctcaactccaagtctctctctctctttcactgttctgcgttttcgttttcaatatttttagtgatcgaaaacaacgctcaagctgctttctactttaaaaaattactatcgttcgtgttacatgtgtttgttcctctgttttgtgataagaacgccgacttgtcgttcaagattgaagaaggctttggacccaatggattggggattctatccgtcactgatgtcccaggatactcttcattgcgtagaaatctattgcatcttgcaccaagattggcaaatcttcccaaagaagtgaaggaggatcttgaagatcctcatagtaggtacaattttggttggagtcatgggaaagagaaacttgaatctgggaagccagatattttaaaaggatctttctatgccaatcccatacttgatacacctacaacagaggcttctttgatacaacggtatccatcatattgcggctcaaatatatggcctagaaacgctttaccagaacttgaagtggctttcaaagcacttgggaagctgatatttgacattggattgatgttggcatatcactgcgatcaatatgtatccaaagggatgaaaattcacaaggatgaaggtctggaatcaatacttcgttgctcccgctgtcataaaggacgtttgctatattattttccttcacaacagggagtcccagatggcaactctttgtcttcttggtgtggatggcatactgaccacggttcactggcaggtctgacttgtggtatgtttacgagagatggtgtagaaattgcttgccctgatagtgctgctggcctctatattcgaacaagaaataatcaaattatcaaagttgtctatggaaaagatgatatagcataccaaattggtgaaaccactgaaatactttctggaggttatctttgtgcaacacctcattgtgttcaggctcctacgggggaggagtcctctggtattgagcgctcaacatttgcattattcatgcagcctgactgggatgaaaagctcaatttacccgagaaagttcacattcataaagagcttattccatcaaatgctgcccttacttttggagagtattcagagatgctgctcgacaaatattaccaccaaaaacagaactaacttgttacttctctgccaacaagcataactggttgaagagacttagcctgtgaattcatgagactaaaataaaattgtgtgaatgtgtagtcgctattggataatctcaaaagaaaagaataactgggtaaggttacaagggtaactggttgaagaaacttagccggttaattcacgggtaaatgtgtagtcgctattggggtaatagcaaaagaaaaagaaaattcttatagattacgtggaatagcaacatttaatttatttaacaggatattaacttatgggatggaatgaaagttactgtacaatcc

SEQ ID NO: 59641 - protein, 197 aa, Glycine max
  peptide (1)..(197): Ceres Seq. ID no. 15171550
MLAYHCDQYVSKGMKIHKDEGLESILRCSRCHKGRLLYYFPSQQGVPDGNSLSSWCGWHTDHGSLAGLTCGMFTRDGVEIACPDSAAGLYIRTRNNQIIKVVYGKDDIAYQIGETTEILSGGYLCATPHCVQAPTGEESSGIERSTFALFMQPDWDEKLNLPEKVHIHKELIPSNAALTFGEYSEMLLDKYYHQKQN

SEQ ID NO: 59642 - protein, 184 aa, Glycine max
  peptide (1)..(184): Ceres Seq. ID no. 15171551
MKIHKDEGLESILRCSRCHKGRLLYYFPSQQGVPDGNSLSSWCGWHTDHGSLAGLTCGMFTRDGVEIACPDSAAGLYIRTRNNQIIKVVYGKDDIAYQIGETTEILSGGYLCATPHCVQAPTGEESSGIERSTFALFMQPDWDEKLNLPEKVHIHKELIPSNAALTFGEYSEMLLDKYYHQKQN

SEQ ID NO: 59643 - protein, 126 aa, Glycine max
  peptide (1)..(126): Ceres Seq. ID no. 15171552
MFTRDGVEIACPDSAAGLYIRTRNNQIIKVVYGKDDIAYQIGETTEILSGGYLCATPHCVQAPTGEESSGIERSTFALFMQPDWDEKLNLPEKVHIHKELIPSNAALTFGEYSEMLLDKYYHQKQN

SEQ ID NO: 59644 - DNA, 1555 bp, Glycine max
  misc_feature (1)..(1555): Ceres Seq. ID no. 14316204
tgatcaaatggagcgtcaatttattcccacaatggttgtgatattcataaggaattcttgattggcaggtctttgatgggcataacggtatatcagctgctatttttgcgaaggaaaacttgctaagtaatgttttgagtgcaatacctcaagatattagcagggatgcttggcttcaggctcttcctcgtgctctggttgttggttttgtgaagactgacatagagtttcagcaaaagggggaaacttctggaacaacagctacatttgttttggttgatggatggactatcactgttgcatctgtgggagattcccgctgcatattagatactcagggaggtgttgtttctctcttgacagttgatcacaggctggaagagaatgcagaagagagggagcgcgttactgccagcggtggtgaagtaggaagactcaatgtatttggaggcaatgaggttgggcctcttcgctgctggccaggtggattgtgcctatctagatctataggtgacacagacgtgggagaatttattgtgccaataccacatgttaagcaagtgaagctttcaaatgctggtggaaggcttattatagcttctgatggtatttgggatgctttatcatctgatatggctgctaagtcttgtcggggtctacctgcagagcttgctgcaaaactagtggttaaggaagctctaaggtcaagaggcctcaaggatgatacaacttgccttgttgtagatattattccttcggacctccctgtattaccaccaattccaagaaagaaacataatatgctaacttcgcttctattttttggaaagaaatctgagaactctatgaacaaagctaccaataagctttctgcagttggtgttgtggaggagttatttgaagagggttctgcaatgcttacagaaaggctaggtaaggatttcccgcttaacaagaattctggtattttccgttgtgcggtttgccaaatggaccaaccccctggtgatggtttatcaatgaactctgggccttttttctctcctgcatctaatccatgggaaggcccattcctctgcacaaactgttggaagaagaaggatgccatggaaggaaaaagcctagcagacccaccgttacagcataatgattatctagtattacagtagtagcatagtaaatattagtataatttttccctggcagtgtgagcatgcttgactttacattttcggtggttattgccatagatgtgtaagaaatgaggttgagaattgagatagggctagtaggtgttttggaggttgctgcaagtttgattctggcttgtgctcagctgttggaagttggactgactgacagaacaaacaagaaagttgtgtctggtagaaaaaaattctagtgaaatctgctaacggcttgtatttgtaagtaaactgaagcttttgtggctgcctctgttttgagagtgcttcaatgctacacagcccaaatgcatctgtatcttttaaacttatgttatacaaatacaactacatgtctcgaatgtctctgt

SEQ ID NO: 59645 - protein, 178 aa, Glycine max
  peptide (1)..(178): Ceres Seq. ID no. 14316205
MAAKSCRGLPAELAAKLVVKEALRSRGLKDDTTCLVVDIIPSDLPVLPPIPRKKHNMLTSLLFFGKKSENSMNKATNKLSAVGVVEELFEEGSAMLTERLGKDFPLNKNSGIFRCAVCQMDQPPGDGLSMNSGPFFSPASNPWEGPFLCTNCWKKKDAMEGKSLADPPLQHNDYLVLQ

SEQ ID NO: 59646 - protein, 122 aa, Glycine max
  peptide (1)..(122): Ceres Seq. ID no. 14316206
MLTSLLFFGKKSENSMNKATNKLSAVGVVEELFEEGSAMLTERLGKDFPLNKNSGIFRCAVCQMDQPPGDGLSMNSGPFFSPASNPWEGPFLCTNCWKKKDAMEGKSLADPPLQHNDYLVLQ

SEQ ID NO: 59647 - protein, 107 aa, Glycine max
  peptide (1)..(107): Ceres Seq. ID no. 14316207
MNKATNKLSAVGVVEELFEEGSAMLTERLGKDFPLNKNSGIFRCAVCQMDQPPGDGLSMNSGPFFSPASNPWEGPFLCTNCWKKKDAMEGKSLADPPLQHNDYLVLQ

SEQ ID NO: 59648 - DNA, 1505 bp, Glycine max
  misc_feature (1)..(1505): Ceres Seq. ID no. 14307694
ttgcttgaacacagtgccgaggttgaaaccgttgatgatgctggctacactctgttgcattgtgatgctgaggtagaccatttgcaagttgccctctacttgatcgctcatgattcctagaaagattggagtttccattccaatgaaggctaccttatttatgacatacataatggttgatggatgggctggaattgctggtgagattctcagattaaagccattggttatataccatctcagaaacatgttcttatcaaatggttacctggatgaaggggttaaagaaattggtgcatttgtggcttcaagggggtcgctttagcttctgggatcttttggatttggacaaaattccagggaaaggatgggattgtggcaaatttctatagcctacattcatggatgagtttggcttttgtatccctcttcggatcccagaaactaaagcatacaattcacaccaccaaagctggtatgaagttcctgcaaatgaaatttcatgaggagttctccaatctagagtagttagtagtgagtagtaagagggaggaagcagaagtgaagcgatgaatgccctagatcgttacgagcgtttcgtcgtccctgaagggtttcttatgagagggacacgaagatcatcaatgcggcgtccttcaccattgagagagaggagcacaccatcgacaacatcctacgcatgcagcttcacagagaccccaatgtcttgtttgtcggatacaagcttcctcatcctcttcaatacaaaattattgtcaggtgatattcttggtcgcacagttcataaatttcaccaatatggaacatagaaaatagccaagggccatagagcaccaaaggaagcatgttgatgttgatggtttcttggtaagagtgataacttgcaaccatacgggcaagacaggttccatgataagatctttgactgcacatggttctagaattgttgttttatgttcagatcatttaggagacaatgcgagtccaaatttcaacttgagaccaacatgtgcttatttcatcactgaggtagcaaaatgagcatccggaagggctcacatagtacaggcttccatagctgatggtgttttgtcaggtaatactgaccccaagaaaaatattgagttgctacaagatgctattgcttctattactctcttaggaagcataatcacgtccatccctttatcgaggcaagcatgttcatagcttagctcatgcaacttctggatatcacaaagttcttgaagaaaatagcaaactatacaatcaagttcatgatcttaagggtaaatttctgattggttggttgctataagcttagtatgagttatatctttcacacctttctaaagattttgttccttttattgtgcctccctgaaatggttaggcctcgtggagatatgatataggtataggttggataaaatttaattcgactcgacacatttttatacttaataaaaaaattcatttacttt

SEQ ID NO: 59649 - protein, 86 aa, Glycine max
  peptide (1)..(86): Ceres Seq. ID no. 14307695
MNALDRYERFVVPEGFLMRGTRRSSMRRPSPLRERSTPSTTSYACSFTETPMSCLSDTSFLILFNTKLLSGDILGRTVHKFHQYGT

SEQ ID NO: 59650 - protein, 71 aa, Glycine max
  peptide (1)..(71): Ceres Seq. ID no. 14307696
MIPRKIGVSIPMKATLFMTYIMVDGWAGIAGEILRLKPLVIYHLRNMFLSNGYLDEGVKEIGAFVASRGSL

SEQ ID NO: 59651 - protein, 69 aa, Glycine max
  peptide (1)..(69): Ceres Seq. ID no. 14307697
MRGTRRSSMRRPSPLRERSTPSTTSYACSFTETPMSCLSDTSFLILFNTKLLSGDILGRTVHKFHQYGT

SEQ ID NO: 59652 - DNA, 1409 bp, Glycine max
  misc_feature (1)..(1409): Ceres Seq. ID no. 14307716
tgctcttgatgaaaaaatcaggtctcaaatggatgttattgacaatggtgtccctgctccattatcaatgttcagtgagagtgattcagacatgaaatctgttaatatagatgacttgctgcccaaagaaaagctgcagaggaagttgccaaagccatcagcgggaaggcgaaaaaatggttacctacaaaatggtggttctgtgcatccttatgctgatccagagcaatgtgcagatacaaagcaatcctttggagcctcttccagtggggttacttctcttgatagcatccagaaacataagttgaacatagattctgattctttaggctgtatacagacacaaattcctatgacacgccctgactatagtcatgctccaaatcacacttccctctttccgactttgtctggatcaagatctgagcatgatggacatctgtctccttctcttaaagaatcatcttatgcatcaaacatggagagttcccatggtcattctttggaggctgcggccttgaaaacaaaagagaatagagaaaagttgtataattgctgtgatggacccctaaatagtagtttcaaaaatgaaaatacaccaaatcaaatgccattttgcagtccgggttcagctcagcaagtaggtcatcattttgaaaatgaaaatgaaggtcatagtgaattccgaggagttggcctaggcttttcaccagaaatagattcatcaacagtgcaggaaagctcatccatgggctctgctctggaccaagcttcacttgaagcaactagcttttgccacctgcaacagatcatggatcagttggatattaaaaccaaaatgtgcataagggacagtctataccgcttggctaagagtgctgagcatagacacaataattcaaatgcaaatggttgcattggagacgatgaaacatgcaaagcaatgatggcgcaggatgcaaacaggtgtgccggattaatggatatggaaactgacacaaaccccattgatcggtctgtagcacacttactgtttcacaggccctcagatccatcagtgttgcttcctaacgaaactttacctttcaaatccagtgccacgatgcatcatggatcagtgatcaatccaccagtgaagactgagaaacaggtctgtcaggaagattctactggagtggaaaaaaaggttttacggggtaacacctaatgaaagtgaaaccagcgttggcgcatttcgttgtacaatttatacttttccggtcattgtcgtatatgatgatgtataattatttcgggctaactcggatccctttgttaatttctgaagcatttttgcataggatgccataatactaatgtaactttgtgctaatcaaatcatcaaaaggtagcatacgatgatttagtgt

SEQ ID NO: 59653 - protein, 401 aa, Glycine max
  peptide (1)..(401): Ceres Seq. ID no. 14307717
ALDEKIRSQMDVIDNGVPAPLSMFSESDSDMKSVNIDDLLPKEKLQRKLPKPSAGRRKNGYLQNGGSVHPYADPEQCADTKQSFGASSSGVTSLDSIQKHKLNIDSDSLGCIQTQIPMTRPDYSHAPNHTSLFPTLSGSRSEHDGHLSPSLKESSYASNMESSHGHSLEAAALKTKENREKLYNCCDGPLNSSFKNENTPNQMPFCSPGSAQQVGHHFENENEGHSEFRGVGLGFSPEIDSSTVQESSSMGSALDQASLEATSFCHLQQIMDQLDIKTKMCIRDSLYRLAKSAEHRHNNSNANGCIGDDETCKAMMAQDANRCAGLMDMETDTNPIDRSVAHLLFHRPSDPSVLLPNETLPFKSSATMHHGSVINPPVKTEKQVCQEDSTGVEKKVLRGNT

SEQ ID NO: 59654 - protein, 392 aa, Glycine max
  peptide (1)..(392): Ceres Seq. ID no. 14307718
MDVIDNGVPAPLSMFSESDSDMKSVNIDDLLPKEKLQRKLPKPSAGRRKNGYLQNGGSVHPYADPEQCADTKQSFGASSSGVTSLDSIQKHKLNIDSDSLGCIQTQIPMTRPDYSHAPNHTSLFPTLSGSRSEHDGHLSPSLKESSYASNMESSHGHSLEAAALKTKENREKLYNCCDGPLNSSFKNENTPNQMPFCSPGSAQQVGHHFENENEGHSEFRGVGLGFSPEIDSSTVQESSSMGSALDQASLEATSFCHLQQIMDQLDIKTKMCIRDSLYRLAKSAEHRHNNSNANGCIGDDETCKAMMAQDANRCAGLMDMETDTNPIDRSVAHLLFHRPSDPSVLLPNETLPFKSSATMHHGSVINPPVKTEKQVCQEDSTGVEKKVLRGNT

SEQ ID NO: 59655 - protein, 379 aa, Glycine max
  peptide (1)..(379): Ceres Seq. ID no. 14307719
MFSESDSDMKSVNIDDLLPKEKLQRKLPKPSAGRRKNGYLQNGGSVHPYADPEQCADTKQSFGASSSGVTSLDSIQKHKLNIDSDSLGCIQTQIPMTRPDYSHAPNHTSLFPTLSGSRSEHDGHLSPSLKESSYASNMESSHGHSLEAAALKTKENREKLYNCCDGPLNSSFKNENTPNQMPFCSPGSAQQVGHHFENENEGHSEFRGVGLGFSPEIDSSTVQESSSMGSALDQASLEATSFCHLQQIMDQLDIKTKMCIRDSLYRLAKSAEHRHNNSNANGCIGDDETCKAMMAQDANRCAGLMDMETDTNPIDRSVAHLLFHRPSDPSVLLPNETLPFKSSATMHHGSVINPPVKTEKQVCQEDSTGVEKKVLRGNT

SEQ ID NO: 59656 - DNA, 1541 bp, Glycine max
  misc_feature (1)..(1541): Ceres Seq. ID no. 15174669
gaaaaatgggtaaaagcaaccccaaaattcttgcgtgtccgaaacctctgaaagaaattgcaatctaatcaaagccagagtgaatgctgttgaacgctgtctgaattttttgagctaaataaaagaagaaaaacagggtgagagagaaacagagtgagagagaaacagaggatcttcatatgaagagtgaagtgagttggagaataaagattcaacaacctgggaaagccgggagagtttttcttggagggaattttggactgcatccatgaaatcacaacagctcttgcttttgctgataggatgagcgattctgcatacagagtccaaaccacaccgcgccttgctcaatggagaatcgaaaacttggcttcttgcacttaccgcaaatcagatcctttcaagatcggaaactggaattgggttttgtttgttaaattgttcccagaaatatccaatcttacgagagacaaccccccaattgcatctttcatcgttcgggtcgttagttctgttggaggtcgccaggccatcacacatccagaaataaaggacaaagtgttaaagaacaacgaggattttgtttgggcaattgaggttccactaactgggaaattcattattgacgtagagtttcttgatttgaagactgcatccccaaacggtggagaaccttgttccatttgggcagaaggatttactcagcaaagatcaaatgcaaaagccatagagtctcttggtagaatgctaacagaaggcattcacacagacatcaccatcaatgcttctgatggaagtataggagctcatagagctgttcttgctgccagatcacctgtcttccgcagcatgttctcacataatcttcaggagaaagagttatcaaccataaacatctcagacatgtcacttgaatcatgccaggcttttctctattatctttatgggataatcaaacatgaagagtttctgactcataggctggcccttctgcaggcggctgacaagtatgacatatctgacttgagagatgtatgccacgaaagtcttctagaagatattgacacaaagaatgtacttgagaggctccaaaatgcatctctatatcagttgatgaaactgaagatgagttgcatccgatatcttgtgaagtttggtaaaatatatgaaattcgcgatgatttcaataccttcctgcgaaatgcagatagggatctgatttctgaagtcttccatgaagttcttgatgcttggaaaggattctgaagattttgcagcttcaatgaaagataggaaagcttgttgttattcaacatacccaagaaataggttgtttcaatttgttgtgcaggatttgttttgatgaacctaattctttctctcagatgattttttattattattatgattttatgtacatacttatgttgtgctcttcaaatgtaaaccataaggtattattgtttacaaaaaatgtatatcatatgaaaagaaaagtaacatattcatgaatgcaaaaggtcctcctgaattctgatgat

SEQ ID NO: 59657 - protein, 320 aa, Glycine max
  peptide (1)..(320): Ceres Seq. ID no. 15174670
MSDSAYRVQTTPRLAQWRIENLASCTYRKSDPFKIGNWNWVLFVKLFPEISNLTRDNPPIASFIVRVVSSVGGRQAITHPEIKDKVLKNNEDFVWAIEVPLTGKFIIDVEFLDLKTASPNGGEPCSIWAEGFTQQRSNAKAIESLGRMLTEGIHTDITINASDGSIGAHRAVLAARSPVFRSMFSHNLQEKELSTINISDMSLESCQAFLYYLYGIIKHEEFLTHRLALLQAADKYDISDLRDVCHESLLEDIDTKNVLERLQNASLYQLMKLKMSCIRYLVKFGKIYEIRDDFNTFLRNADRDLISEVFHEVLDAWKGF

SEQ ID NO: 59658 - protein, 173 aa, Glycine max
  peptide (1)..(173): Ceres Seq. ID no. 15174671
MLTEGIHTDITINASDGSIGAHRAVLAARSPVFRSMFSHNLQEKELSTINISDMSLESCQAFLYYLYGIIKHEEFLTHRLALLQAADKYDISDLRDVCHESLLEDIDTKNVLERLQNASLYQLMKLKMSCIRYLVKFGKIYEIRDDFNTFLRNADRDLISEVFHEVLDAWKGF

SEQ ID NO: 59659 - DNA, 1569 bp, Glycine max
  misc_feature (1)..(1569): Ceres Seq. ID no. 15227110
acatttttgaatttgacagttagttttacagaacctaacaaattgctgtatcgtatatatgctatgcacacaggttctattttctcctttatttattttctaaatccttctcttattttcttatttaattattgaatttattagaatttagactctttcagttcaataaactttaaaactcttgagcctagggatacaaatatattgtatgcttccatgtgaattttcttctcttaatgcttatgagttatgactaatcttgctctcttaagggattattatattgttcccagtaggggaaaaaggatttatcatctaaggaattagggttaaattaattaaattaaagaaattggttaggaattgcataaaacatggatttaatgttacttataattagttcctttccattgctggtttaatataatatgacgtgctggaaatgatcataaatcaagtaaaacctctgcagataacatgctgtatgataatcggtaaaattaaatatacattatcaaacatacaaaggagaaaacaaaacaaatgtattccagtcttctattgaaactgggaaaattcttcgttgacaacttacaagattacacaaaattctcaatacaacataagatacgaacgagtaaagaaaaagaaattccttcaaaattgcatacatatttcaccacagactgacttaatcaatacaaaaagatgcgagacacaaaacgaaaagaagaaaataattgaaagtgctacaagaagttcatgatttactctttaacccaaccaatccagaagctagtaggaatttcagcaaagcacaacaacatcaggaccctactggtcttgcatgcagccaagaaaggtacttacaggtgatcattattgtgccacatgaaccaaacagatctcgtagttatttatcagtaacatcatcatcaatgttctttacataaaagtttgatgatgatgttacatgaaacttgattgggtgagtttttggatgcactagacatcaattatgcagtaagtagttagctgcagagatctttatttatttccaattttgaatatctaaagacaacatttctcttggggaaaatttttaagccaaacttctattttctgtgtagcatgcattttaatatttaattcgtagtttttctgtctctattgattactgcagattgaatttgagccagaatatttggtggagtttgataatccagatattgatgagaaggaacaaattccactacgggatgcacttgagaaggcgaaaccattcttgatgtcatatgaggggattcaaagtcaggaagagtgggagaaaataatggaagagacaatggcgcgagttccattgttgaaaaagattgttgatcactacagtggacctgatagggtaactaccaagaagcaacaagaagaattagacagagttgctaaaactcttcctgaaagtgcaccatcttcagtagaacaatttactaatcgttctgttatttctcttcaggtttggaactgtaaatattgatattgtgttgggcataaaatgtcttttacttgggc

SEQ ID NO: 59660 - protein, 81 aa, Glycine max
  peptide (1)..(81): Ceres Seq. ID no. 15227111
MSYEGIQSQEEWEKIMEETMARVPLLKKIVDHYSGPDRVTTKKQQEELDRVAKTLPESAPSSVEQFTNRSVISLQVWNCKY

SEQ ID NO: 59661 - protein, 66 aa, Glycine max
  peptide (1)..(66): Ceres Seq. ID no. 15227112
MEETMARVPLLKKIVDHYSGPDRVTTKKQQEELDRVAKTLPESAPSSVEQFTNRSVISLQVWNCKY

SEQ ID NO: 59662 - protein, 62 aa, Glycine max
  peptide (1)..(62): Ceres Seq. ID no. 15227113
MARVPLLKKIVDHYSGPDRVTTKKQQEELDRVAKTLPESAPSSVEQFTNRSVISLQVWNCKY

SEQ ID NO: 59663 - DNA, 1344 bp, Glycine max
  misc_feature (1)..(1344): Ceres Seq. ID no. 15172070
acgctcaacctccgtcaaagcaaagaaacagtgtttcatcatttgggtttcgcagaagagagagaaacccatttctagagagagaaactcgcagtcgcagacatgtcttccttcgatgccttcgccgacgacttgaacgtcaactcttcttccactcgccagcacgacgatgacgaggacaacttctctggctacggcggctactcctccttcaccggaggattctccgccgacggagatgtcgccgtcgatcactccgccgccgcgtcgccggagatctacggcttcactgattcgaatcccgcttactctcagtctcccttcgaatcggccaccgtagagaacgaaaacggaaacggatacggcgacggcgacggtgtttttgtctccgacggtccggtgcttcctccgccgacggagatggagccggaggaaggttacgctcttcgcgagtggcgccgtcaaaatgccattcagctagaggagaaggagaaaagggaaaaagaaatgagattgaagattattgaagaagctgaggagtataaggtggctttctatgagaagaggaagcttaatgttgagactaacaaggttcagaatagagaaagggagaagttattcgtggccaatcaagagaagtttcacaaagaggcagacaaagcttattggaaaaccattgcagagctcattcctcgtgaggttcccaacattgaaaagaaaagaggcaaaaaggatcaggacaagaagccatcaattacggtcatccaaggcccaaagcctggcaaacccacggatctgtctaggttgcggcaaatactgttaaagctgaagcatacaccaccacctcacatgattcctccaccaccggctcctgctaaagacgccaaagataataaggatggaaaagagaaagcagcatcaaaagcaactggatctgcagcagaaggtgcacctgattcacagccaaaggatgccacctctaatggcctcacagaagaaccccagaaagaagctcctgccactgaggagcagcctgctgcatgattttgtctatgatactttggttccccctcaatctttcttctgccacccctttctccaccctgcagtctttaatgaatctttttgccctgctattagtttctaatgcttatcggttgcattttattattattaactttaaggttttgtatgaattaaatccattattaacaattatgacgtggagattcaatgatcatgggtttaaatagtacatccttttagacagagtatatgttggaataattgctgtctggtggtgtcaaatagacaaatacaatgtttaatatttttcagttgttc

SEQ ID NO: 59664 - protein, 313 aa, Glycine max
  peptide (1)..(313): Ceres Seq. ID no. 15172071
MSSFDAFADDLNVNSSSTRQHDDDEDNFSGYGGYSSFTGGFSADGDVAVDHSAAASPEIYGFTDSNPAYSQSPFESATVENENGNGYGDGDGVFVSDGPVLPPPTEMEPEEGYALREWRRQNAIQLEEKEKREKEMRLKIIEEAEEYKVAFYEKRKLNVETNKVQNREREKLFVANQEKFHKEADKAYWKTIAELIPREVPNIEKKRGKKDQDKKPSITVIQGPKPGKPTDLSRLRQILLKLKHTPPPHMIPPPPAPAKDAKDNKDGKEKAASKATGSAAEGAPDSQPKDATSNGLTEEPQKEAPATEEQPAA

SEQ ID NO: 59665 - protein, 207 aa, Glycine max
  peptide (1)..(207): Ceres Seq. ID no. 15172072
MEPEEGYALREWRRQNAIQLEEKEKREKEMRLKIIEEAEEYKVAFYEKRKLNVETNKVQNREREKLFVANQEKFHKEADKAYWKTIAELIPREVPNIEKKRGKKDQDKKPSITVIQGPKPGKPTDLSRLRQILLKLKHTPPPHMIPPPPAPAKDAKDNKDGKEKAASKATGSAAEGAPDSQPKDATSNGLTEEPQKEAPATEEQPAA

SEQ ID NO: 59666 - protein, 178 aa, Glycine max
  peptide (1)..(178): Ceres Seq. ID no. 15172073
MRLKIIEEAEEYKVAFYEKRKLNVETNKVQNREREKLFVANQEKFHKEADKAYWKTIAELIPREVPNIEKKRGKKDQDKKPSITVIQGPKPGKPTDLSRLRQILLKLKHTPPPHMIPPPPAPAKDAKDNKDGKEKAASKATGSAAEGAPDSQPKDATSNGLTEEPQKEAPATEEQPAA

SEQ ID NO: 59667 - DNA, 1238 bp, Glycine max
  misc_feature (1)..(1238): Ceres Seq. ID no. 15177807
aggaatttgctttgaacggaacaagaatccaatagaagaaagaagaagatgtggctttcggatcatcgattgtttcttctctgcattgtttgtggcctttacttttctctgcagttcacaacgggtcatgcagattcaaatgctggaagaactttgaatcaggagggtggtgatcatcaaatacattgctctagagaaagaagtagaacagcttggaaaatcattcaagagtatttgatgccctttgtggagaaagaaaaataccacatctcaaaaaggtgtaggcttcaccctgacaatgacatatacagagatcaggagcaacataagtttcatacagatataaacgaatggcagtgtgggttctgtaagaaaagtttctatgaagagaaacatcttgaccagcattttgacaacagacactccaatttgcttaatttgagtgaaagccagtgcatagcagatgtttgtggtgcactgcactgtgaccatgaaatgaattctggatcaaaaaaatcaaagtgcaatcctgctgctgctgcaaaaaataaacatctatgtgagagcttagccgatagttgttttcctgtcactgagggccctgcggcaagccgacttcatgaattcttcttgcaccaattctgtgatgcacacagctgcactggaaataggaaacctttctccagagggcgcaggaagaagacaaatgtgttctacatctttgtgtctattttgcttgtgatactgctgctactatactacctctacatttacttatatcagagaggaatgaaaagggaaactcaagtgctgaagcgcgtctcacaagccagcagaaagaaaaagccatcttaattgattgttctttccacaaaaagaagttctcaacctacattttcagaaagtaaaggtgtcactaatggatagagtgtgaactgcacgtaaatctacctacattacattttcagaaagttaaggtgtaactaatggatacagtcagaactgcacttggaatccagtttacgctattctgctatttgcaagagtacgtttgaaggcagaaagagattgtcagcttcaaaaatgacttctatgtgatttgctagtttgtaaaccaaattcttgtaaactttttgaacaaaaagggggctgcatgactgaatccaccttagttggccatttgcatttgattgtgcatgacagcactaacaagaaaaaataacatgaacatttgcaac

SEQ ID NO: 59668 - protein, 268 aa, Glycine max
  peptide (1)..(268): Ceres Seq. ID no. 15177808
MWLSDHRLFLLCIVCGLYFSLQFTTGHADSNAGRTLNQEGGDHQIHCSRERSRTAWKIIQEYLMPFVEKEKYHISKRCRLHPDNDIYRDQEQHKFHTDINEWQCGFCKKSFYEEKHLDQHFDNRHSNLLNLSESQCIADVCGALHCDHEMNSGSKKSKCNPAAAAKNKHLCESLADSCFPVTEGPAASRLHEFFLHQFCDAHSCTGNRKPFSRGRRKKTNVFYIFVSILLVILLLLYYLYIYLYQRGMKRETQVLKRVSQASRKKKPS

SEQ ID NO: 59669 - protein, 205 aa, Glycine max
  peptide (1)..(205): Ceres Seq. ID no. 15177809
MPFVEKEKYHISKRCRLHPDNDIYRDQEQHKFHTDINEWQCGFCKKSFYEEKHLDQHFDNRHSNLLNLSESQCIADVCGALHCDHEMNSGSKKSKCNPAAAAKNKHLCESLADSCFPVTEGPAASRLHEFFLHQFCDAHSCTGNRKPFSRGRRKKTNVFYIFVSILLVILLLLYYLYIYLYQRGMKRETQVLKRVSQASRKKKPS

SEQ ID NO: 59670 - DNA, 1155 bp, Glycine max
  misc_feature (1)..(1155): Ceres Seq. ID no. 14307540
agtttattttttctctctttgatcaaattcccttcccatggtctctctctcttcaattaattccatttagctttccccaaatcccaaaccctttttcgcttagatcccaatccaattgggttatggacatggcttccagtccccgcactgtagaagagatcttcaaggattacagcgccagaagaacctctgttattcgcgctctcactcacgacgttgatgaattttacggcctctgtgatccagataaggataacctgtgcctctatggacatccaaatgaggcctgggaagtaactctgccagcggaggaagttccgccagagctcccggagccggctcttggaatcaattttgctagggatggcatgaaccgcagggactggctttctctggttgctgtccacagtgattcatggttggtttctgtggccttttaccttggggctcgtcttaaccgcaatgaaaggaaacgattatttagcttgatcaatgatcttccatctgtttttgaagttgtgactgacaggaaaccagttaaggacaagccaactgcggatagtggaagcaagtctaggggaagtgccaagagatctagcgatgggcaagttaaaagcaacccaaagtttgtagatgagggttatgaggaggatgaagatgagcataatgaaacactttgtggaagctgcggcggaaattacaacgctgatgagttttggatttgctgtgacatatgtgagaggtggttccatgggaagtgtgttaagattacccctgcaaaggctgagagcataaagcaatataaatgtccatcatgcagcctgaggcggggcaggccttagactgaaagaggcgatggaatgggtacatgtgaggtgagtgttgtttcatggctgacaagatactgtaattttgttacatcacttacagaagttaatgtaatgggcatagtatcgatgctcaagggcaaatttatcagggattaagtttgtttttccagatgaaccattggtgcatgccacagggtatagaatagaacatgacaaattttaattttatgattagtttatatttagtagaatatttgcttgaactttaaatattgtaatttttttatttttaacattgtttaagaaaacaaaccttttcaacaag

SEQ ID NO: 59671 - protein, 279 aa, Glycine max
  peptide (1)..(279): Ceres Seq. ID no. 14307541
FIFSLFDQIPFPWSLSLQLIPFSFPQIPNPFSLRSQSNWVMDMASSPRTVEEIFKDYSARRTSVIRALTHDVDEFYGLCDPDKDNLCLYGHPNEAWEVTLPAEEVPPELPEPALGINFARDGMNRRDWLSLVAVHSDSWLVSVAFYLGARLNRNERKRLFSLINDLPSVFEVVTDRKPVKDKPTADSGSKSRGSAKRSSDGQVKSNPKFVDEGYEEDEDEHNETLCGSCGGNYNADEFWICCDICERWFHGKCVKITPAKAESIKQYKCPSCSLRRGRP

SEQ ID NO: 59672 - protein, 239 aa, Glycine max
  peptide (1)..(239): Ceres Seq. ID no. 14307542
MDMASSPRTVEEIFKDYSARRTSVIRALTHDVDEFYGLCDPDKDNLCLYGHPNEAWEVTLPAEEVPPELPEPALGINFARDGMNRRDWLSLVAVHSDSWLVSVAFYLGARLNRNERKRLFSLINDLPSVFEVVTDRKPVKDKPTADSGSKSRGSAKRSSDGQVKSNPKFVDEGYEEDEDEHNETLCGSCGGNYNADEFWICCDICERWFHGKCVKITPAKAESIKQYKCPSCSLRRGRP

SEQ ID NO: 59673 - protein, 237 aa, Glycine max
  peptide (1)..(237): Ceres Seq. ID no. 14307543
MASSPRTVEEIFKDYSARRTSVIRALTHDVDEFYGLCDPDKDNLCLYGHPNEAWEVTLPAEEVPPELPEPALGINFARDGMNRRDWLSLVAVHSDSWLVSVAFYLGARLNRNERKRLFSLINDLPSVFEVVTDRKPVKDKPTADSGSKSRGSAKRSSDGQVKSNPKFVDEGYEEDEDEHNETLCGSCGGNYNADEFWICCDICERWFHGKCVKITPAKAESIKQYKCPSCSLRRGRP

SEQ ID NO: 59674 - DNA, 1109 bp, Glycine max
  misc_feature (1)..(1109): Ceres Seq. ID no. 14307018
gaaactgagcatctcattaagggataatttagtgaatatgtattttatcctcttaataaaaatgtctttttgtctgaatttttatatcaacaggtatggttacaaagatgttcggaaagaaaatcaccagacttttgagcagctgctgattgagagcctagagaagtttatacgtcgtgaggctcaggagaggtcactggagagtgatggggatggtgatactggttcagaggatgagtaccctaattctagggttctcatagctcccaatgggagcgtttactcacttggtgttcctcttcttgctggttttaaggatacaagcaaccccgttttagaagaaagcacattagacgtgataagcccggtatccactgatcccctggtgtttgatgctgagcagagccttgagagtgagttatcttttattcataaggctaaagaatctggtgttgtgtatcttcttggtcatggggatataagagcaaggaaggagtcgtggtttatcaagaagttagttataaactatttttatgcctttttgagaaagaactgcagaagggggatcacaactttaagtgtaccacactcacatttgatgcaagttagcatgacatacatggtttgaaaatcaatcaattttgcagcccaaataaaacgagtggcaattctcttgaaagctacagtttgatagcaatgaagggtccctggaaaggtcttattttggattgctcaatctgaaatgttcgatcctttctagccattttggatctccaaattgtttattgtccttccagcgcgagaatccggaagtagtcctgatgtttgttgtcgttgtggattcaccatctgcatatatgggattagaaaaaggctgataacaaagagaaaatgttaaaaactaacatccctccctatgcatacaatgcacatttgcgaatgtgtcaaattcaacttaaacgcaagaaccatggacatcgagtattgtacagtggcatgccattgcccttagttttcttattctatcacctttatttgttgtttaccttcccaactctgactaggcattttcttgattgaaacacaaatgagatcatatcttttttttc

SEQ ID NO: 59675 - protein, 208 aa, Glycine max
  peptide (1)..(208): Ceres Seq. ID no. 14307019
KLSISLRDNLVNMYFILLIKMSFCLNFYINRYGYKDVRKENHQTFEQLLIESLEKFIRREAQERSLESDGDGDTGSEDEYPNSRVLIAPNGSVYSLGVPLLAGFKDTSNPVLEESTLDVISPVSTDPLVFDAEQSLESELSFIHKAKESGVVYLLGHGDIRARKESWFIKKLVINYFYAFLRKNCRRGITTLSVPHSHLMQVSMTYMV

SEQ ID NO: 59676 - protein, 196 aa, Glycine max
  peptide (1)..(196): Ceres Seq. ID no. 14307020
MYFILLIKMSFCLNFYINRYGYKDVRKENHQTFEQLLIESLEKFIRREAQERSLESDGDGDTGSEDEYPNSRVLIAPNGSVYSLGVPLLAGFKDTSNPVLEESTLDVISPVSTDPLVFDAEQSLESELSFIHKAKESGVVYLLGHGDIRARKESWFIKKLVINYFYAFLRKNCRRGITTLSVPHSHLMQVSMTYMV

SEQ ID NO: 59677 - protein, 188 aa, Glycine max
  peptide (1)..(188): Ceres Seq. ID no. 14307021
MSFCLNFYINRYGYKDVRKENHQTFEQLLIESLEKFIRREAQERSLESDGDGDTGSEDEYPNSRVLIAPNGSVYSLGVPLLAGFKDTSNPVLEESTLDVISPVSTDPLVFDAEQSLESELSFIHKAKESGVVYLLGHGDIRARKESWFIKKLVINYFYAFLRKNCRRGITTLSVPHSHLMQVSMTYMV

SEQ ID NO: 59678 - DNA, 1294 bp, Glycine max
  misc_feature (1)..(1294): Ceres Seq. ID no. 15176759
gaacagaggctctgtccattaaaaccactctccaaaatttctctctccattccttgcgcttccatccatcatggccatcgcaacagagactcagcctcaacaacacaaggattcttcggaggtttcgggttcagctgcggagcaaagaaggtggacgcttaacgatttcgatatcggaaagcctcttggaaggggaaaattcggtcacgtctatttggccagagagaagactagtaatcatattgttgctttgaaagtactcttcaagagtcaattgcaacaatcccaagttgtgcatcaacttcgacgtgaagttgaaatacagagtcatctccgacatccccacattttgcgcctctatggatacttttatgatcagaaacgagtttatttgattttagagtatgcacccaaaggtgaactttacaaggaattgcaaaaatgcaaatatttcagtgaaaggcgtgcagctacttatgttgcatcattggcccgagcccttatatattgccatggaaagcatgtaatacatagggatattaaaccagagaaccttcttattggttcacagggtgagttgaaaatagcagactttgggtggtcagtgcacacattcaatcgcaggcggaccatgtgtggcacactggattaccttcctcctgagatggtggagagtgtagaacatgatgcgagtgtggatatatggagccttggtgtcttgtgctatgagtttctttatggagtccctccttttgaggctaaagaacattctgatacttacaggaggataatacaagtggatctgaagttccctcctaaaccaattgtgtcttcagctgcaaaggatctcattagtcagatgctggtcaaggattcctctcaacgtctaccattgcacaaactcctcgaacacccttggattgttcagaatgccgagccctctggtgtatataggagctagtgcaccttatcattcttatattgtattttcttaatcgtggaaatcatcaaaatagcagctgcttctaagtatttgacaacattttggttttgagatgatgcaactatttgaagtaggttgctaggttaagagaaatcacttgttatatgattgtaaaccctactccttcaagggctatataaagaataactgatgtcacttgttatttgattgtaaaccctactccttcaagggctatataaagaataactgatgtcacttgttgattgtaatccggtatactccaaaaggaaccgcccgtgttatcaatactgattttttattcgcggtatt

SEQ ID NO: 59679 - protein, 296 aa, Glycine max
  peptide (1)..(296): Ceres Seq. ID no. 15176760
MAIATETQPQQHKDSSEVSGSAAEQRRWTLNDFDIGKPLGRGKFGHVYLAREKTSNHIVALKVLFKSQLQQSQVVHQLRREVEIQSHLRHPHILRLYGYFYDQKRVYLILEYAPKGELYKELQKCKYFSERRAATYVASLARALIYCHGKHVIHRDIKPENLLIGSQGELKIADFGWSVHTFNRRRTMCGTLDYLPPEMVESVEHDASVDIWSLGVLCYEFLYGVPPFEAKEHSDTYRRIIQVDLKFPPKPIVSSAAKDLISQMLVKDSSQRLPLHKLLEHPWIVQNAEPSGVYRS

SEQ ID NO: 59680 - DNA, 897 bp, Glycine max
  misc_feature (1)..(897): Ceres Seq. ID no. 13642436
aaggaccacatgaagatggttacaactggagaaaatatggtcagaaagacatccttggagccaaatatcccagaagttactataggtgcaccttccgcagcactcagggctgttgggcaacaaagcaagtgcagagatcagatgaagatcccacaatgtttgacataacttacagaggaaatcatacctgttctcagggaaacaatgccgttctgccacccaagtcaccagaaaaacatgagaaaccagcacacagtcataacattgacattcaccatgcacaggcatcacaagaaagccttgcaaagttcagaagtatcttgtctgtcaacacagataatctggacaatggagatatggcatatgctttcactttcccttccacttcatttggatgcatgaaacaagaaaaccacagcttgattcctatggccctggagaatgactccttcttaagcgacctataccaaacacacctgttatccccaacaacaccagaatcaaattatttcccatctccaactttccagatgaatgagtttgatgggatctacaacaggtcacattcgaaatccgatatcaatgagatcatttccaccaacacatcagcaaccaattctccaattcctgatttcaatttctcacttgatccggtggaaattgatccaaatttccctttcaataccccaggatttttgtgctgattgcactataaatggaatactataagaatgtagtcttcataaaacgggacaatttcagacagcagtagaattgtagaataaagaatgagcaactgcagcacttatgaacgtccttgtagtcaatatcagaattgcaattttggctccgtgttagcaattagcagtatgcactttcaaataaaatagtttctgc

SEQ ID NO: 59681 - protein, 233 aa, Glycine max
  peptide (1)..(233): Ceres Seq. ID no. 13642437
GPHEDGYNWRKYGQKDILGAKYPRSYYRCTFRSTQGCWATKQVQRSDEDPTMFDITYRGNHTCSQGNNAVLPPKSPEKHEKPAHSHNIDIHHAQASQESLAKFRSILSVNTDNLDNGDMAYAFTFPSTSFGCMKQENHSLIPMALENDSFLSDLYQTHLLSPTTPESNYFPSPTFQMNEFDGIYNRSHSKSDINEIISTNTSATNSPIPDFNFSLDPVEIDPNFPFNTPGFLC

SEQ ID NO: 59682 - protein, 182 aa, Glycine max
  peptide (1)..(182): Ceres Seq. ID no. 13642438
MFDITYRGNHTCSQGNNAVLPPKSPEKHEKPAHSHNIDIHHAQASQESLAKFRSILSVNTDNLDNGDMAYAFTFPSTSFGCMKQENHSLIPMALENDSFLSDLYQTHLLSPTTPESNYFPSPTFQMNEFDGIYNRSHSKSDINEIISTNTSATNSPIPDFNFSLDPVEIDPNFPFNTPGFLC

SEQ ID NO: 59683 - DNA, 979 bp, Glycine max
  misc_feature (1)..(979): Ceres Seq. ID no. 15176881
aattgttctgctccttttttttagtggtaagaatagaacaagctaaggaacattggaatcttttgccatgacccaaagtgggacctgtgaccggtgcacaggctaagctaactaaaataccacttagcctggtaaacctaaccaacatgaaacattttcaataagatcaaaactttcaaactagttatgcttaaaatctattgaaatttcaacagagtattatttcttgtgatttcaactaccaaaatgatcaaaacctattaagatctataaacaagacacaaaatatacaccagtttaatttgaaagtgtttaatacagccccaaaataacaatactgatttcctagtaacctgcaacttaactgattgatgatttggaaaaaggaataagaggtgagttacatatactctatgaggagataataatcataatgaataggaagggggaaattaaaataactcctgagtagtttgcaactatataaactagattgtaacatcttaaatcaatggaagcattttttatctaatcacaattttaatgagttcatttataatgccccttgatctaaatgagtgtgacacatctcaacttggactgggttgattttttttctttttcctcctttgctttattaatcctaatttacgatacttattatagctttgctttatatcgggtaacaggccacaggaatggttacaatgatgaaggaactacaaataccaatggtgggaagtcatcatcttggcattgatgacactaggaacatagcaagagtactgcagcacatgctactagatggtgcactcgtccagattactgcaaggaggaatcctagatctcttagagatgtcaagtttcttttcaagaaccgtattggatagtgtacttctcaatggactatgtaactttttctaatacttttaatcgtggaattagttaactcaatgaacagattatagattataatttc

SEQ ID NO: 59684 - protein, 63 aa, Glycine max
  peptide (1)..(63): Ceres Seq. ID no. 15176882
MVTMMKELQIPMVGSHHLGIDDTRNIARVLQHMLLDGALVQITARRNPRSLRDVKFLFKNRIG

SEQ ID NO: 59685 - protein, 61 aa, Glycine max
  peptide (1)..(61): Ceres Seq. ID no. 15176883
MSVTHLNLDWVDFFSFSSFALLILIYDTYYSFALYRVTGHRNGYNDEGTTNTNGGKSSSWH

SEQ ID NO: 59686 - protein, 60 aa, Glycine max
  peptide (1)..(60): Ceres Seq. ID no. 15176884
MMKELQIPMVGSHHLGIDDTRNIARVLQHMLLDGALVQITARRNPRSLRDVKFLFKNRIG

SEQ ID NO: 59687 - DNA, 1343 bp, Glycine max
  misc_feature (1)..(1343): Ceres Seq. ID no. 15171556
atcacccttttggcagttaccaattcaactaccgcatcacatttacaaataaaactcaaaatccaaacaccaccgccacacaccaccttgtctattgattatcatatttattgtgagccttaactctagtattactactacttccacctttcatcatcactctttcagtccaatggggtggtctttctcaatttccgttttgctgtttcttacctttctcattcagatacatggaagaggctttgcagagaattatggttgtaatttgttccaaggaagttgggtttatgatgaatcataccctctttatgcaacctcacagtgtccctttatagagaaagaatttgattgtcaaaacaatggcagaccggataagttctatctcaaatatagatggcagccagcaggctgcaacttaacaagattcaacggtgaagatttcttaagaagacatagagggaggagtctcatgtttgtgggggattctttgagtttgaatcaatggcaatcactcacttgcatgcttcacatagctgtgccactagccccttacaacttagtgaggaatggagatctctccattttcacgtttccgacctatggtgttaaggtgatgttctcacgcaatgcatttcttgtggacatagttagtgagagtattggtcgagtactgaaactagattcaattcaagctggccaaacgtggaaaggaatagatatattgatatttgactcttggcattggtggcttcacacaggaagaaaacaaccatgggatttgattcaagtaggaaatcgtactgttagagacatgaatcgcttggttgcatacgagatagcgctgaatacatgggccaaatggattgattataatattgaccctaccagaacaagggttttattccaaggagtgtctccagatcatcaaaatccagcgcaatggggtgagccaagagcaaacttttgtgcagggcaaactaagccaatatcgggattaaggtatcctggaggaccaaacccagcagaggtggtattagagaaagtgctaaaggccatgcaaaagcctgtgtatttgctggacattacaaccctatcccagctaaggatagatggccacccttctgtttatggacatggtgggcatttggacatggattgcagccactggtgccttgctggtgttcctgatacttggaatgagcttctatatgttagtctctttcaaaattaagatcctattcttattgttattgctgattataaataaaatgtgtcccaagaaaatatatatctcaaattaattcagacaataaaatacagcaagatatgtataggtctatcat

SEQ ID NO: 59688 - protein, 352 aa, Glycine max
  peptide (1)..(352): Ceres Seq. ID no. 15171557
MGWSFSISVLLFLTFLIQIHGRGFAENYGCNLFQGSWVYDESYPLYATSQCPFIEKEFDCQNNGRPDKFYLKYRWQPAGCNLTRFNGEDFLRRHRGRSLMFVGDSLSLNQWQSLTCMLHIAVPLAPYNLVRNGDLSIFTFPTYGVKVMFSRNAFLVDIVSESIGRVLKLDSIQAGQTWKGIDILIFDSWHWWLHTGRKQPWDLIQVGNRTVRDMNRLVAYEIALNTWAKWIDYNIDPTRTRVLFQGVSPDHQNPAQWGEPRANFCAGQTKPISGLRYPGGPNPAEVVLEKVLKAMQKPVYLLDITTLSQLRIDGHPSVYGHGGHLDMDCSHWCLAGVPDTWNELLYVSLFQN

SEQ ID NO: 59689 - protein, 253 aa, Glycine max
  peptide (1)..(253): Ceres Seq. ID no. 15171558
MFVGDSLSLNQWQSLTCMLHIAVPLAPYNLVRNGDLSIFTFPTYGVKVMFSRNAFLVDIVSESIGRVLKLDSIQAGQTWKGIDILIFDSWHWWLHTGRKQPWDLIQVGNRTVRDMNRLVAYEIALNTWAKWIDYNIDPTRTRVLFQGVSPDHQNPAQWGEPRANFCAGQTKPISGLRYPGGPNPAEVVLEKVLKAMQKPVYLLDITTLSQLRIDGHPSVYGHGGHLDMDCSHWCLAGVPDTWNELLYVSLFQN

SEQ ID NO: 59690 - protein, 236 aa, Glycine max
  peptide (1)..(236): Ceres Seq. ID no. 15171559
MLHIAVPLAPYNLVRNGDLSIFTFPTYGVKVMFSRNAFLVDIVSESIGRVLKLDSIQAGQTWKGIDILIFDSWHWWLHTGRKQPWDLIQVGNRTVRDMNRLVAYEIALNTWAKWIDYNIDPTRTRVLFQGVSPDHQNPAQWGEPRANFCAGQTKPISGLRYPGGPNPAEVVLEKVLKAMQKPVYLLDITTLSQLRIDGHPSVYGHGGHLDMDCSHWCLAGVPDTWNELLYVSLFQN

SEQ ID NO: 59691 - DNA, 1029 bp, Glycine max
  misc_feature (1)..(1029): Ceres Seq. ID no. 14307057
agcttatgccagaaaaatatcgatgttttattttatttcatttcttggttgtagttgaatcctctcactttgccaaaaaatcaaacaacataaccttaaattttcttgagggattgagttgttctgcattaagttctcagcacattctagccactgcataccatagcccgttctagattgtaacaaacccaactccctataataatctatgtgtggtccaccaagtgtggtccgtacttactctttcatgactgactttggtgcagacagtatgctcacaacaactaacatattagggagttgggcatctttatatttagttcatgactcttatgctttgatcaggttgtacattcatgcttaattatatgataattgggatatggtttgttcactaccatagtaataaggtgtagttatgtatattaattgatagttgttcaaatttatgttataccaagctaatgcattgagtaacactgcactgagtctagtgttgaaactcaggtagacaaatccactatgcctgcaaatacaaaggatgcattatatcaaagcttgcctcctaatataaaattagctctacgttccaaattaccatccctccgtgctgtagaagagataagtgtagcctatatcacatatgagatgcataaaaaattacattggttggttcccatggccattaacacatccaaagcacataagagatttggttggctaggggagtgggcatactcagggtatgaagtaaaaaagaagactggtgtaatgtggattgagacattctaccatgcagatagagagaaagtggaacattgtattcttgaacttctcttatggcttcatcgcttggccatcagaagtaaggctcacagtgatgctattgctggctaagtaaggtctgccacttgcgaagaaaatggaatgataaaactgaatttggtctcttttgattcaaccttaataaaggaaataattgcttaattagctctctaaataaatctcttgatttaagggattgcccgt

SEQ ID NO: 59692 - protein, 124 aa, Glycine max
  peptide (1)..(124): Ceres Seq. ID no. 14307058
MPANTKDALYQSLPPNIKLALRSKLPSLRAVEEISVAYITYEMHKKLHWLVPMAINTSKAHKRFGWLGEWAYSGYEVKKKTGVMWIETFYHADREKVEHCILELLLWLHRLAIRSKAHSDAIAG

SEQ ID NO: 59693 - protein, 82 aa, Glycine max
  peptide (1)..(82): Ceres Seq. ID no. 14307059
MHKKLHWLVPMAINTSKAHKRFGWLGEWAYSGYEVKKKTGVMWIETFYHADREKVEHCILELLLWLHRLAIRSKAHSDAIAG

SEQ ID NO: 59694 - protein, 72 aa, Glycine max
  peptide (1)..(72): Ceres Seq. ID no. 14307060
MAINTSKAHKRFGWLGEWAYSGYEVKKKTGVMWIETFYHADREKVEHCILELLLWLHRLAIRSKAHSDAIAG

SEQ ID NO: 59695 - DNA, 1654 bp, Glycine max
  misc_feature (1)..(1654): Ceres Seq. ID no. 14313897
gtgcttcgttgtgctacgccacgaaagaatttcttgttttctgctttcgaataaacgaataagaagccttcacaccgcttcgttgtgctgtgcttgcttctcttttattctttctattagtattcgtttcgttttctccgccgtttccgtagctcggcttcagcagcaccagaaccaggtgtctactatctgactacacatgtgctgttattgtcttccaattgggtgaagtctgattgaagagcaatgcagaaggatactagtaccaccgccccatcaaccacaagtggtcgggttaggcaccgaaaacgctcaaatgaggttattccggaagttagtaaagcaaatgggaccaagttactggttaatgacaaaagcaaatacaagtctatgctaattcgagcatattcatctgtatggatgattggcggctttgttttgatcatttatatgggtcacctctacatcactgcaatggtggttgttatccaaatcttcatggcaagggagctgttcaatctactcaggagagctcatgaagataggcagctgccaggatttaggctattaaattggcattttttcttcactgcaatgttatttgtttatggacgaattctgagtcaatgcctggttaacacagtaacttcagacatggttttatattggctagtgagcaatcttataaagtatcacatggttatctgctactccctgtacattgcaggatttatgtggttcattctcacgttgaagaagaagatgtacaagtaccaatttggccagtatgcttggacacacatgattctaattgttgtatttggccagtcctccttcaccgtggcaagcatttttgaagggattttctggtttcttctcccagcaacacttattgtcattaatgatattgctgcttatatctttggtttcttctttggaagaacccctttgatcaagttatctccaaagaaaacttgggagggttttataggggcatctgttaccaccatcatctctgcatttatgcttgctaacatcatgggtcgctctcagtggctaacgtgtccaaggaaggatttgtcaactggttggcttcactgtgatcctggtccactgtttaagccagaatcttatcccttacctggatgtatttctcactggttttcttggaaagagatatcaatcctaccaattcaatggcattctttatgtctaggcttgtttgcttcaattattgcaccttttggaggcttctttgcaagtggctttaaaagggcttttaaaataaaggactttggtgatagtattccgggacatggtggaattaccgacagaatggattgccagatggttatggccgtgtttgcatacatatatcatcagtcatttgttgtgccgcaaactctctcggttgaaatgattttggaccagatatcgatgaacctaacattcgatgagcaacaagctctatattggaggcttggggaaattttacaacaggggtttgctaggatgtcttagattcatggcgaggtgtatttgttctgtcaccttctattgtattccttcacatacaggggaaaaggaaaagatactatgtacatgtgtttgttttctatcttttgagtgaaacaaattaaaggttcagaagctg

SEQ ID NO: 59696 - protein, 424 aa, Glycine max
  peptide (1)..(424): Ceres Seq. ID no. 14313898
MQKDTSTTAPSTTSGRVRHRKRSNEVIPEVSKANGTKLLVNDKSKYKSMLIRAYSSVWMIGGFVLIIYMGHLYITAMVVVIQIFMARELFNLLRRAHEDRQLPGFRLLNWHFFFTAMLFVYGRILSQCLVNTVTSDMVLYWLVSNLIKYHMVICYSLYIAGFMWFILTLKKKMYKYQFGQYAWTHMILIVVFGQSSFTVASIFEGIFWFLLPATLIVINDIAAYIFGFFFGRTPLIKLSPKKTWEGFIGASVTTIISAFMLANIMGRSQWLTCPRKDLSTGWLHCDPGPLFKPESYPLPGCISHWFSWKEISILPIQWHSLCLGLFASIIAPFGGFFASGFKRAFKIKDFGDSIPGHGGITDRMDCQMVMAVFAYIYHQSFVVPQTLSVEMILDQISMNLTFDEQQALYWRLGEILQQGFARMS

SEQ ID NO: 59697 - protein, 376 aa, Glycine max
  peptide (1)..(376): Ceres Seq. ID no. 14313899
MLIRAYSSVWMIGGFVLIIYMGHLYITAMVVVIQIFMARELFNLLRRAHEDRQLPGFRLLNWHFFFTAMLFVYGRILSQCLVNTVTSDMVLYWLVSNLIKYHMVICYSLYIAGFMWFILTLKKKMYKYQFGQYAWTHMILIVVFGQSSFTVASIFEGIFWFLLPATLIVINDIAAYIFGFFFGRTPLIKLSPKKTWEGFIGASVTTIISAFMLANIMGRSQWLTCPRKDLSTGWLHCDPGPLFKPESYPLPGCISHWFSWKEISILPIQWHSLCLGLFASIIAPFGGFFASGFKRAFKIKDFGDSIPGHGGITDRMDCQMVMAVFAYIYHQSFVVPQTLSVEMILDQISMNLTFDEQQALYWRLGEILQQGFARMS

SEQ ID NO: 59698 - protein, 366 aa, Glycine max
  peptide (1)..(366): Ceres Seq. ID no. 14313900
MIGGFVLIIYMGHLYITAMVVVIQIFMARELFNLLRRAHEDRQLPGFRLLNWHFFFTAMLFVYGRILSQCLVNTVTSDMVLYWLVSNLIKYHMVICYSLYIAGFMWFILTLKKKMYKYQFGQYAWTHMILIVVFGQSSFTVASIFEGIFWFLLPATLIVINDIAAYIFGFFFGRTPLIKLSPKKTWEGFIGASVTTIISAFMLANIMGRSQWLTCPRKDLSTGWLHCDPGPLFKPESYPLPGCISHWFSWKEISILPIQWHSLCLGLFASIIAPFGGFFASGFKRAFKIKDFGDSIPGHGGITDRMDCQMVMAVFAYIYHQSFVVPQTLSVEMILDQISMNLTFDEQQALYWRLGEILQQGFARMS

SEQ ID NO: 59699 - DNA, 1339 bp, Glycine max
  misc_feature (1)..(1339): Ceres Seq. ID no. 15176095
atctaccactctagtctgccacatattaataataataattaataccatgccttaagctatgcctactttggggtttgcactatactatatggacataccattctatatttgcaatcagaatatatggattgctattaaacttataatttgtgatagttggtattttttttagcaatacaaagatcccaatatgataatcatgaatctcagtttttcaacttgaacttgactactttaaatttatgtattgttaggttcccagtggcatatattacacatccaaagactcaattggatactaagccagccccatttatggcagcattttcatcaaaaggaccaaatactatggtgccagagatcctaaagcctgatatcactgcaccaggcgtgtcagttatagcagcctatactgaggcccaaggaccaaccaatcaagtgttcgacaagcgcaggattccgtttaactcagtctcaggcacatcaatgtcatgccctcatgtttcaggcattgtgggactgttgagagccttatatcctacgtggagtaccgctgcaattaaatcagcaatcatgaccacagctacaacactagacaatgaggtggagccactactgaatgctactgatggcaaggcgacaccattcagttacggggcagggcatgttcaaccaaacagagcaatggatcccgggctagtttatgacataacaattgatgattacctcaacttcttatgtgctttaggatacaacgagacacagatctcagtgttcacagaaggtccatataaatgccgcaagaaatttagtctcctcaacctgaactatccctcaatcacagtcccaaaactctctgggtcagtgacagttacaaggacattgaaaaatgttggttctccagggacttacattgctcatgttcaaaacccgtatggaatcaccgtttctgtgaagccaagcatcttgaagttcaaaaatgttggtgaagagaagagctttaaattaaccttcaaggccatgcaaggaaaggccacaaataactacgcgtttggaaaactgatatggtcagatggcaagcattacgtcacgagtccaatagttgtgaaggccctcttaactagaaattgaagtaattggtgcaatttagctcatttgcatttctaattgattgttagcctattctaaattgtatgatatatcttctaaaatagggcttctttgagagttatctctgacattgattgataacaaagaaaccaacaagtggctttctttgggtgtacttttactatgattccaaggagaaataaaacctaacacgtccattctcctagtc

SEQ ID NO: 59700 - protein, 271 aa, Glycine max
  peptide (1)..(271): Ceres Seq. ID no. 15176096
MAAFSSKGPNTMVPEILKPDITAPGVSVIAAYTEAQGPTNQVFDKRRIPFNSVSGTSMSCPHVSGIVGLLRALYPTWSTAAIKSAIMTTATTLDNEVEPLLNATDGKATPFSYGAGHVQPNRAMDPGLVYDITIDDYLNFLCALGYNETQISVFTEGPYKCRKKFSLLNLNYPSITVPKLSGSVTVTRTLKNVGSPGTYIAHVQNPYGITVSVKPSILKFKNVGEEKSFKLTFKAMQGKATNNYAFGKLIWSDGKHYVTSPIVVKALLTRN

SEQ ID NO: 59701 - protein, 260 aa, Glycine max
  peptide (1)..(260): Ceres Seq. ID no. 15176097
MVPEILKPDITAPGVSVIAAYTEAQGPTNQVFDKRRIPFNSVSGTSMSCPHVSGIVGLLRALYPTWSTAAIKSAIMTTATTLDNEVEPLLNATDGKATPFSYGAGHVQPNRAMDPGLVYDITIDDYLNFLCALGYNETQISVFTEGPYKCRKKFSLLNLNYPSITVPKLSGSVTVTRTLKNVGSPGTYIAHVQNPYGITVSVKPSILKFKNVGEEKSFKLTFKAMQGKATNNYAFGKLIWSDGKHYVTSPIVVKALLTRN

SEQ ID NO: 59702 - protein, 214 aa, Glycine max
  peptide (1)..(214): Ceres Seq. ID no. 15176098
MSCPHVSGIVGLLRALYPTWSTAAIKSAIMTTATTLDNEVEPLLNATDGKATPFSYGAGHVQPNRAMDPGLVYDITIDDYLNFLCALGYNETQISVFTEGPYKCRKKFSLLNLNYPSITVPKLSGSVTVTRTLKNVGSPGTYIAHVQNPYGITVSVKPSILKFKNVGEEKSFKLTFKAMQGKATNNYAFGKLIWSDGKHYVTSPIVVKALLTRN

SEQ ID NO: 59703 - DNA, 1687 bp, Glycine max
  misc_feature (1)..(1687): Ceres Seq. ID no. 15172274
aaagctcaaagatatacacaaaaataaatcaccaatattttagaagaataaataaaagggttgtctcatggctgaggagtttcaagctaggatttgtggtgaaaactggtggagtagtaccactattgattcaacaagaagtactgtgttgttccctctaagttcatcatcatcatcatcatctatatcttcttctccttgttccgtggcagctaataattatgatgcaggaaactatagcactaggggaactagtgacatggatttgaaggcaacaaagtgttgtgctgaagagactaataacagtttggtttctgacactacttacctgggttttgttgatgcacacaagccacataagagtgaatcagcagctagtggaagtggtggcatgttgaccgattccaccttgcagatgatgggttttggcctcacatcatcatcagagaattggaatcagcctctattatttcgatgtaatggaagggcagagagcaatttccactccttgattcaggaagaaacgggaatagattcttctaattcacaaatccatagggattggatcccaaagagcttctcctctgacggtggcaaacaacaaattgatgataataatttcaagccattattattgaaccaacaagaattttcattagatgaccatagtctaagttctttaaccaccgctgggttatcatcaaaccgtggattccccaatggatcagcctcatcatatggtaacccttcaacgttgcaaagtttatatgaccctaattataatcctcatccacaacactcacttttcaccaaccgtccgatgtcctattcatcaaaagcatgttatgggacaccatgcactgaactgccaacattgtctaaagcttccactttttttaagcccacaaccacaacaattgcaaagcagcaacaccctaatattggacttcacttttcaaacaacactcctttctggaatgcttccgccgaggcacttcacgacataagagtaggtacctttgcttcaacacaatcacaatatcaaaggccaacctttgatgatgaagagaaacccaatttcccaattactctattaaacaggctcaatagtgaagaaattctagagttggcatcaatggctaagaaaaatgtttgtgaaccagcattaaagaggccaagaattgaaactccatctccattaccaactttcaaggttcggaaagagaagctaggggaccgggtcactgctcttcagcaattggtttcacctttcggaaagaccgacacagcatccgttcttcacgaagccatcgagtacattaagttccttcatgatcaagtcaatgttttgagtacttcatatatgaaaaatggagctcccactcaacagcagcagggctgtgatgatctgaaagactcagaaggaccacaacaagatttaaaaagcaaagggctgtgtctggtaccgatttcaagcacatttccagtggcaacaggagccactagtgctgatcaattgtggacgcctacattcagaggcgcactcttaaggtagagaagggctaataaagccaaagagactcaaccagtggagaaaaattgatgacgtattattaactattgcatgtgtaaaaggatggtgaagcaaatgtgaagccacagtttgatgatgagaaaaaagctgaat

SEQ ID NO: 59704 - protein, 495 aa, Glycine max
  peptide (1)..(495): Ceres Seq. ID no. 15172275
MAEEFQARICGENWWSSTTIDSTRSTVLFPLSSSSSSSSISSSPCSVAANNYDAGNYSTRGTSDMDLKATKCCAEETNNSLVSDTTYLGFVDAHKPHKSESAASGSGGMLTDSTLQMMGFGLTSSSENWNQPLLFRCNGRAESNFHSLIQEETGIDSSNSQIHRDWIPKSFSSDGGKQQIDDNNFKPLLLNQQEFSLDDHSLSSLTTAGLSSNRGFPNGSASSYGNPSTLQSLYDPNYNPHPQHSLFTNRPMSYSSKACYGTPCTELPTLSKASTFFKPTTTTIAKQQHPNIGLHFSNNTPFWNASAEALHDIRVGTFASTQSQYQRPTFDDEEKPNFPITLLNRLNSEEILELASMAKKNVCEPALKRPRIETPSPLPTFKVRKEKLGDRVTALQQLVSPFGKTDTASVLHEAIEYIKFLHDQVNVLSTSYMKNGAPTQQQQGCDDLKDSEGPQQDLKSKGLCLVPISSTFPVATGATSADQLWTPTFRGALLR

SEQ ID NO: 59705 - protein, 431 aa, Glycine max
  peptide (1)..(431): Ceres Seq. ID no. 15172276
MDLKATKCCAEETNNSLVSDTTYLGFVDAHKPHKSESAASGSGGMLTDSTLQMMGFGLTSSSENWNQPLLFRCNGRAESNFHSLIQEETGIDSSNSQIHRDWIPKSFSSDGGKQQIDDNNFKPLLLNQQEFSLDDHSLSSLTTAGLSSNRGFPNGSASSYGNPSTLQSLYDPNYNPHPQHSLFTNRPMSYSSKACYGTPCTELPTLSKASTFFKPTTTTIAKQQHPNIGLHFSNNTPFWNASAEALHDIRVGTFASTQSQYQRPTFDDEEKPNFPITLLNRLNSEEILELASMAKKNVCEPALKRPRIETPSPLPTFKVRKEKLGDRVTALQQLVSPFGKTDTASVLHEAIEYIKFLHDQVNVLSTSYMKNGAPTQQQQGCDDLKDSEGPQQDLKSKGLCLVPISSTFPVATGATSADQLWTPTFRGALLR

SEQ ID NO: 59706 - protein, 387 aa, Glycine max
  peptide (1)..(387): Ceres Seq. ID no. 15172277
MLTDSTLQMMGFGLTSSSENWNQPLLFRCNGRAESNFHSLIQEETGIDSSNSQIHRDWIPKSFSSDGGKQQIDDNNFKPLLLNQQEFSLDDHSLSSLTTAGLSSNRGFPNGSASSYGNPSTLQSLYDPNYNPHPQHSLFTNRPMSYSSKACYGTPCTELPTLSKASTFFKPTTTTIAKQQHPNIGLHFSNNTPFWNASAEALHDIRVGTFASTQSQYQRPTFDDEEKPNFPITLLNRLNSEEILELASMAKKNVCEPALKRPRIETPSPLPTFKVRKEKLGDRVTALQQLVSPFGKTDTASVLHEAIEYIKFLHDQVNVLSTSYMKNGAPTQQQQGCDDLKDSEGPQQDLKSKGLCLVPISSTFPVATGATSADQLWTPTFRGALLR

SEQ ID NO: 59707 - DNA, 1392 bp, Glycine max
  misc_feature (1)..(1392): Ceres Seq. ID no. 14307131
aaacaatttggaactccatgttaatcttcactcaattagattcagaataactttctgtctctcctacatactagcacatctctcatatttgtatgttaactacattcagaaaccatgaaatgtagtttcctggaaggaaaaacaatggaaattttcttagattttgagttgcagacagaactggctgggattctaaaagattatgttggccgggagagtcctctttattttgctgaaaggttgacggagcattacaagaggcctaatggtgaaggacctcacatttatctgaagagggaagatctcaatcacactggggctcacaaaattaataatgctgttgctcaagctttgcttgctaagagattgggcaaaaaacgcattattgctgaaactggagcgggtcagcatggagttgccactgctactgtatgtgctcgatttggtttagaatgcattatttatatgggtgcgcaggatatggaaaggcaggctctcaatgttttcagaatgcgtcttctcggtgctgaggtgagaccagtccattctgggactgctacacttaaggatgcgacatcagaggctataagggactgggtgactaatgtggagacaactcattatattttggggtctgttgctgggccgcatccatatccaatgatggtaagagagtttcatgctgtgattggcaaggagaccagaaagcaagctttggagaagtggggagggaaaccagatgtcttgattgcatgtgttggtggaggttcaaatgccataggacttttcaatgaatttgttgatgacaaagatgtaaggctaattggtgtggaggctgctggatttggcctggacagcggcaagcatgctgcaaccttaacaaaaggagaagttggggttttgcatggagctatgagctatctgctgcaggatgatgatggacaaatagttgagcctcactctattagtgcaggcttggactaccctggtgtgggtccggaacatagctttttgaaagatttagggcgtgctgaatatcatagtatcacagatgaagaagcattggaagcttttaagagagtttcgcgacttgaaggcataattcctgcactggaaacatctcatgcattggcatatctagagaaagtgtgtccaacccttgctaatggagccaaggttgtggttaacttcagtggccggggtgataaggatgttcaaactgctatcaagtacttgaagctttgaaaggatcaaaacttgctgagtgagcttcattttcatacttagagacataattaatacaatttattattagaccaagttaaatagtcatgtatatttgcatcagagaactgttgctattcaatcctcaataaacttagtttatgttac

SEQ ID NO: 59708 - protein, 376 aa, Glycine max
  peptide (1)..(376): Ceres Seq. ID no. 14307132
MKCSFLEGKTMEIFLDFELQTELAGILKDYVGRESPLYFAERLTEHYKRPNGEGPHIYLKREDLNHTGAHKINNAVAQALLAKRLGKKRIIAETGAGQHGVATATVCARFGLECIIYMGAQDMERQALNVFRMRLLGAEVRPVHSGTATLKDATSEAIRDWVTNVETTHYILGSVAGPHPYPMMVREFHAVIGKETRKQALEKWGGKPDVLIACVGGGSNAIGLFNEFVDDKDVRLIGVEAAGFGLDSGKHAATLTKGEVGVLHGAMSYLLQDDDGQIVEPHSISAGLDYPGVGPEHSFLKDLGRAEYHSITDEEALEAFKRVSRLEGIIPALETSHALAYLEKVCPTLANGAKVVVNFSGRGDKDVQTAIKYLKL

SEQ ID NO: 59709 - protein, 366 aa, Glycine max
  peptide (1)..(366): Ceres Seq. ID no. 14307133
MEIFLDFELQTELAGILKDYVGRESPLYFAERLTEHYKRPNGEGPHIYLKREDLNHTGAHKINNAVAQALLAKRLGKKRIIAETGAGQHGVATATVCARFGLECIIYMGAQDMERQALNVFRMRLLGAEVRPVHSGTATLKDATSEAIRDWVTNVETTHYILGSVAGPHPYPMMVREFHAVIGKETRKQALEKWGGKPDVLIACVGGGSNAIGLFNEFVDDKDVRLIGVEAAGFGLDSGKHAATLTKGEVGVLHGAMSYLLQDDDGQIVEPHSISAGLDYPGVGPEHSFLKDLGRAEYHSITDEEALEAFKRVSRLEGIIPALETSHALAYLEKVCPTLANGAKVVVNFSGRGDKDVQTAIKYLKL

SEQ ID NO: 59710 - protein, 259 aa, Glycine max
  peptide (1)..(259): Ceres Seq. ID no. 14307134
MGAQDMERQALNVFRMRLLGAEVRPVHSGTATLKDATSEAIRDWVTNVETTHYILGSVAGPHPYPMMVREFHAVIGKETRKQALEKWGGKPDVLIACVGGGSNAIGLFNEFVDDKDVRLIGVEAAGFGLDSGKHAATLTKGEVGVLHGAMSYLLQDDDGQIVEPHSISAGLDYPGVGPEHSFLKDLGRAEYHSITDEEALEAFKRVSRLEGIIPALETSHALAYLEKVCPTLANGAKVVVNFSGRGDKDVQTAIKYLKL

SEQ ID NO: 59711 - DNA, 965 bp, Glycine max
  misc_feature (1)..(965): Ceres Seq. ID no. 15169786
agtacagcaaatgccaaaagccaagttaattccctttctccactcttcacaaacacaaacacacgtattctcttgcaaaactaagaatgaaggaggagttggtggttgaagaagggtaccttttcaaagaagagactcacttcacagtgctcaaaacctctctcttcttcaacggtgatggcttcgctgtctacgattgcaaaggccaactcgttttccgcttcgactcctacggtccccgcgcgcgtgacaaggacgagctcgttctcatggatccccatggccgttctcttctcactctccgccgaaagaaaccgagtcttcatcaacgctgggaaggcttcaaaggggagagaacggagggtcataaacccattttcagcgtcaagagatcgtcgatcatcggacggtcgaggaccagcgtggcggtggaggtgtacgatagccccggtgtggagtacctcatcgaaggttgcttcccgcagcgctgctgcaaggttttcaatgccgctaaggaacttgtggctgagattcgtcgcaaagtggaccccaccaccagcgttatgctcgggaaggaagtcttttggctctgcgtgaagcctggtttcgatgcggcctttgccatgggattggtattggtacttgatcagatcaacggtgagaattactttgatgatagaatcttggagccctcggtgcaccctgctgcagaagatctgggatttgtttcaccggttccagtttgagattatcagatttgtcttgttttctgattctgacgttttactcactgatcgttggagtgttccctctcaaagggttttctttctctctgcccttttttttttatggctcatctcgttttttttttgtaaaaaaaaaaataatgatgatgttctggatcataatcactatgcgatcttgtacattctatatgcattgaaagttaaagataaacttatctt

SEQ ID NO: 59712 - protein, 219 aa, Glycine max
  peptide (1)..(219): Ceres Seq. ID no. 15169787
MKEELVVEEGYLFKEETHFTVLKTSLFFNGDGFAVYDCKGQLVFRFDSYGPRARDKDELVLMDPHGRSLLTLRRKKPSLHQRWEGFKGERTEGHKPIFSVKRSSIIGRSRTSVAVEVYDSPGVEYLIEGCFPQRCCKVFNAAKELVAEIRRKVDPTTSVMLGKEVFWLCVKPGFDAAFAMGLVLVLDQINGENYFDDRILEPSVHPAAEDLGFVSPVPV

SEQ ID NO: 59713 - protein, 158 aa, Glycine max
  peptide (1)..(158): Ceres Seq. ID no. 15169788
MDPHGRSLLTLRRKKPSLHQRWEGFKGERTEGHKPIFSVKRSSIIGRSRTSVAVEVYDSPGVEYLIEGCFPQRCCKVFNAAKELVAEIRRKVDPTTSVMLGKEVFWLCVKPGFDAAFAMGLVLVLDQINGENYFDDRILEPSVHPAAEDLGFVSPVPV

SEQ ID NO: 59714 - protein, 139 aa, Glycine max
  peptide (1)..(139): Ceres Seq. ID no. 15169789
MASLSTIAKANSFSASTPTVPARVTRTSSFSWIPMAVLFSLSAERNRVFINAGKASKGRERRVINPFSASRDRRSSDGRGPAWRWRCTIAPVWSTSSKVASRSAAARFSMPLRNLWLRFVAKWTPPPALCSGRKSFGSA

SEQ ID NO: 59715 - DNA, 1346 bp, Glycine max
  misc_feature (1)..(1346): Ceres Seq. ID no. 14310390
gaaatgagtttcttcgatttcatcgtgttgatgatagggtcgctctttctgttcaaagctttcgattttactttctgtgtctttcttctgcttcttttgattcccccaaatcttcagttttaaaaaccctaatctgctgccatgaggaagaagctcgatacccgtttccctgctgctcggataaagaagataatgcaggcagatgaggatgttggaaagatagcactggctgtgcctgttttagtttctaaagctctagaactatttttgcaagatctttgtgaccgcacttatgaaataactcttcaaagaggagcgaagaccatgaattcattgcatttaaaacattgtgtacaaagctataatgtctttgactttctgagggacgttgttagcagggttcctgactacggccatggccatggccatgctgaggctggtcctgatgatcgggtcattacaaaaagaaggaaagctattggtgatgatggtaatgacagcgatgaagaggctaagaggagcaagatgcttgagttgggccacactggcagtactggtaggggaagaggccgaggtagaggaagaggccgtggccgagggcgaccacctttaaatagagagacatatcatcaagatgctgaatctgagccttgcacttctgttcagccgagcaacccacaaaatacaaacacaagtatagcaatggataatggttctgagtcaaaggagataccaaaggaggagaatattgcagctcccgttgttcctgttgtaagcacggattccctccggaacattgatctgaatgccatcacgaatgaaaacgatgacaaaaaggctagtgcagaagctgatgcctccgcctcggtgcctgaacctgatgcctcattgcctgaacccccaacagagagcaagcatgaagaaattccggggtggtcactttctgatgtggacaagatggccattgattcactgcagcttgcacaacttggtaggccactagaagaggaggaggaagactatgatgaagaggaggggtaaatattattagtctttggtgattagattagtgaaaagttcatcatgataactgtagaataagtacatactagtgttatgattatgagtatccactagctgtcaatgcatgtaccatgttgttggctgaagaaagatctgaatgccccttttcattaatctggtttgtatgtggagctgatttatcttccccttgaccagtaatgttagcttcgtgtacttttaggcctacaatgtatatcacaattctagattgagttaaatttttgcatgcaaactttgtttaatattgctgcaaataactatac

SEQ ID NO: 59716 - protein, 299 aa, Glycine max
  peptide (1)..(299): Ceres Seq. ID no. 14310391
MRKKLDTRFPAARIKKIMQADEDVGKIALAVPVLVSKALELFLQDLCDRTYEITLQRGAKTMNSLHLKHCVQSYNVFDFLRDVVSRVPDYGHGHGHAEAGPDDRVITKRRKAIGDDGNDSDEEAKRSKMLELGHTGSTGRGRGRGRGRGRGRGRPPLNRETYHQDAESEPCTSVQPSNPQNTNTSIAMDNGSESKEIPKEENIAAPVVPVVSTDSLRNIDLNAITNENDDKKASAEADASASVPEPDASLPEPPTESKHEEIPGWSLSDVDKMAIDSLQLAQLGRPLEEEEEDYDEEEG

SEQ ID NO: 59717 - protein, 282 aa, Glycine max
  peptide (1)..(282): Ceres Seq. ID no. 14310392
MQADEDVGKIALAVPVLVSKALELFLQDLCDRTYEITLQRGAKTMNSLHLKHCVQSYNVFDFLRDVVSRVPDYGHGHGHAEAGPDDRVITKRRKAIGDDGNDSDEEAKRSKMLELGHTGSTGRGRGRGRGRGRGRGRPPLNRETYHQDAESEPCTSVQPSNPQNTNTSIAMDNGSESKEIPKEENIAAPVVPVVSTDSLRNIDLNAITNENDDKKASAEADASASVPEPDASLPEPPTESKHEEIPGWSLSDVDKMAIDSLQLAQLGRPLEEEEEDYDEEEG

SEQ ID NO: 59718 - protein, 238 aa, Glycine max
  peptide (1)..(238): Ceres Seq. ID no. 14310393
MNSLHLKHCVQSYNVFDFLRDVVSRVPDYGHGHGHAEAGPDDRVITKRRKAIGDDGNDSDEEAKRSKMLELGHTGSTGRGRGRGRGRGRGRGRPPLNRETYHQDAESEPCTSVQPSNPQNTNTSIAMDNGSESKEIPKEENIAAPVVPVVSTDSLRNIDLNAITNENDDKKASAEADASASVPEPDASLPEPPTESKHEEIPGWSLSDVDKMAIDSLQLAQLGRPLEEEEEDYDEEEG

SEQ ID NO: 59719 - DNA, 1407 bp, Glycine max
  misc_feature (1)..(1407): Ceres Seq. ID no. 15176751
aagacttgtatatgtctcccaggtaagtaagctcctcatcacatatctaaaacaaacccttccaaaaccaagacaatacttcaaaggttcattccaatggcatcctcgtcaagttttgttcatttggtaaatctaggtttagttttagtactacttggctttattgtccctagaagtgaagccaggccaagagcattctttgtgtttggagattcgcttgttgacaatggaaacaacaactatttgcaaaccattgctcgtgctaatgcccctccttatggaattgactacccaactcatagagcaactggacgcttctctaacggcttcaacattcctgattttatcagtcaggaacttggtgctgagtctacaatgccttacttgagcccggacttaacgagagagaatctcttagttggtgccaattttgcttccgctggcgttggaatccttaacgatacaggagatcagtttatgaacataattaaaatgcatcaacaactagaatattttaaagagtaccaacaacgactgagtgctctaattggtgtcccacgaactaaaagactcgtgaatcaagcgttgattctcatcaccgttggtggcaatgactttgtaaacaactacttcctagtggattctactgcaaggtctcgtcaatattcactcccggactatgtcaagtttctcatcactcgctatagcaagcacttgcagaggctatatgatctgggagctcggcgagttcttgtgacagggacagggccattgggttgtgcccctgcagaattggctatgcgaggcaaaaatggagaatgttctgctgatctacaacgtgctgcagcattgtacaaccctcaattagagcaaatgctacttgaactcaacaagaaacttggcagcgacgttttcattgctgcaaatacagcactcatgcacaatgactacatcaccaatcccaatgcttatggatttaatacatcaaaagtagcttgttgtggacaaggaccctacaatggtatggggctatgcttgccagtctccaacctatgccccaaccgagaattgcatgcattttgggatccattccatccaactgaaaaggcaaacaaacttgttgtagaacaaattatgtcaggttctacaaagtatatgaagcctatgaacctcagcacaattctggccttggatgctcgagcacattcgtgaagattaattacaaattaacctaataatgaatagtttgttatcactaacttggtcctcaatgccaatgcatgatagctcttactgtaattggatttgttgtttgtatggaatcaattaacttgtgtaattttcgtaatgtatccatgattggagcttgaaatctcatcaagctattacttaattgttttgactttc

SEQ ID NO: 59720 - protein, 371 aa, Glycine max
  peptide (1)..(371): Ceres Seq. ID no. 15176752
MASSSSFVHLVNLGLVLVLLGFIVPRSEARPRAFFVFGDSLVDNGNNNYLQTIARANAPPYGIDYPTHRATGRFSNGFNIPDFISQELGAESTMPYLSPDLTRENLLVGANFASAGVGILNDTGDQFMNIIKMHQQLEYFKEYQQRLSALIGVPRTKRLVNQALILITVGGNDFVNNYFLVDSTARSRQYSLPDYVKFLITRYSKHLQRLYDLGARRVLVTGTGPLGCAPAELAMRGKNGECSADLQRAAALYNPQLEQMLLELNKKLGSDVFIAANTALMHNDYITNPNAYGFNTSKVACCGQGPYNGMGLCLPVSNLCPNRELHAFWDPFHPTEKANKLVVEQIMSGSTKYMKPMNLSTILALDARAHS

SEQ ID NO: 59721 - protein, 278 aa, Glycine max
  peptide (1)..(278): Ceres Seq. ID no. 15176753
MPYLSPDLTRENLLVGANFASAGVGILNDTGDQFMNIIKMHQQLEYFKEYQQRLSALIGVPRTKRLVNQALILITVGGNDFVNNYFLVDSTARSRQYSLPDYVKFLITRYSKHLQRLYDLGARRVLVTGTGPLGCAPAELAMRGKNGECSADLQRAAALYNPQLEQMLLELNKKLGSDVFIAANTALMHNDYITNPNAYGFNTSKVACCGQGPYNGMGLCLPVSNLCPNRELHAFWDPFHPTEKANKLVVEQIMSGSTKYMKPMNLSTILALDARAHS

SEQ ID NO: 59722 - protein, 244 aa, Glycine max
  peptide (1)..(244): Ceres Seq. ID no. 15176754
MNIIKMHQQLEYFKEYQQRLSALIGVPRTKRLVNQALILITVGGNDFVNNYFLVDSTARSRQYSLPDYVKFLITRYSKHLQRLYDLGARRVLVTGTGPLGCAPAELAMRGKNGECSADLQRAAALYNPQLEQMLLELNKKLGSDVFIAANTALMHNDYITNPNAYGFNTSKVACCGQGPYNGMGLCLPVSNLCPNRELHAFWDPFHPTEKANKLVVEQIMSGSTKYMKPMNLSTILALDARAHS

SEQ ID NO: 59723 - DNA, 688 bp, Glycine max
  misc_feature (1)..(688): Ceres Seq. ID no. 15226533
ctcggggcccccctcgagtcacagctacgtaggccccccccccccgtccatgtttaacaactaatacaagtcactatgattttggtctgtacgtaatacaattgtgatatattacaaactccccatttgttgaggttatcctcgacaatcaagtctctctgctctctcttgctctatctatcttaggttyttgatctgdtattcactgtatcctaagtttttggacggtttttatttctctctatatgcattatcagatttttgaactgaggaagctaattccaacatctttggcatatgacttcaatatccacataatggattttcaacctggagaatttcttaatgtgaaggaggtccattataaccagcatggtttgctgctactggaagggcaaggcatttatcgtttgggtgatagttggtacccagttcaggctggtgatgtcatttggatggcaccattcgtcccacaatggtatgctgccctgggaaaaacaagaacacgttatcttatatacaaagacgcgaacagaagcccactgtaaccaacgttgatggacttcagatgaatgatatggatgatagtgacccccttctaatgatgtaatgatttaaataaagtgctaaatacatttagatggttgtattggactaagattttaaaagattatttttgtttattaac

SEQ ID NO: 59724 - protein, 100 aa, Glycine max
  peptide (1)..(100): Ceres Seq. ID no. 15226534
MHYQIFELRKLIPTSLAYDFNIHIMDFQPGEFLNVKEVHYNQHGLLLLEGQGIYRLGDSWYPVQAGDVIWMAPFVPQWYAALGKTRTRYLIYKDANRSPL

SEQ ID NO: 59725 - protein, 76 aa, Glycine max
  peptide (1)..(76): Ceres Seq. ID no. 15226535
MDFQPGEFLNVKEVHYNQHGLLLLEGQGIYRLGDSWYPVQAGDVIWMAPFVPQWYAALGKTRTRYLIYKDANRSPL

SEQ ID NO: 59726 - protein, 61 aa, Glycine max
  peptide (1)..(61): Ceres Seq. ID no. 15226536
MVCCYWKGKAFIVWVIVGTQFRLVMSFGWHHSSHNGMLPWEKQEHVILYTKTRTEAHCNQR

SEQ ID NO: 59727 - DNA, 1337 bp, Glycine max
  misc_feature (1)..(1337): Ceres Seq. ID no. 14312357
ggcgaccacgtttgcaatttataaccttcctatccactctcttcaatttgttctgccatttggtaacactgttttcaccctttttctaatgctagtggttttctctctccctctctgcctctagtagttacaatttgcaaatagagtcatcatcatcatgtcacacccaaagggataaaaaaaaaaaaaaccaaaacttgtaacacatgggagttgttgaacaagaaatggaagaggaagagaaagaaaaacatacaaacaaccaagaccaaaacaaccataaccacccttcttctctccacccaattaaggaagagtgtgttagtgtgagaaaaccctttagtggtgatagagtgaagagagatgaatggagtgaaggggcagtgtcaaccctccttgaggcttatgaggccaaatgggtgctaagaaacagagccaaactcaagggccatgattgggaggatgtggcacggcacgtgtcggcacgtgccaactgcaccaaatcaccaaagacttcaacgcagtgtaagaacaaggttgagtccatgaagaagagatacagatcagaatcagcagcaacagcagatcatgcatcatcatcatggcctctttattcacggcttgatcttcttcttaggggaactggacccgtgttgtcgtcgccgccgccgccgccaccggcgatgatgccggcggcgatgccggttctgtctccggtggagccgtcgcaaccgccgcagctgtcgccgcctccggcggctccttcagggccacttgctaatgcacaaaactcgcatggatccaacggaattgatgagaagcttgctaaggaagatgggttaggaactaagtcatctgatcaagtatctagcaagaatccattggactcagatagcagcacgccagcactttatagcaagaaggacgggttaagatgcaacaagaggaagaagaaaacaattgacaacacagggcgaagaaggaaagagtgtgtggagatagcagaaagcttaagatggcttacagaagctatgataaggtctgaacaagcaagaatggacacaatgaaggagatagagaggatgagagttgaagctgaggccaaaagaggggaaatggaccttaagagaactgaaataattgccaatacacagttagagattgctaggatctttgcaagtgtcaacaataaaggtgttgattcatctctaagaattggaagaagttaagggtaggttatggaagataattaataaaaatgttattattgtatatgcacataaagttatcaaataatgctattaatataataaaatttgagtaaataacttatttcc

SEQ ID NO: 59728 - protein, 340 aa, Glycine max
  peptide (1)..(340): Ceres Seq. ID no. 14312358
MGVVEQEMEEEEKEKHTNNQDQNNHNHPSSLHPIKEECVSVRKPFSGDRVKRDEWSEGAVSTLLEAYEAKWVLRNRAKLKGHDWEDVARHVSARANCTKSPKTSTQCKNKVESMKKRYRSESAATADHASSSWPLYSRLDLLLRGTGPVLSSPPPPPPAMMPAAMPVLSPVEPSQPPQLSPPPAAPSGPLANAQNSHGSNGIDEKLAKEDGLGTKSSDQVSSKNPLDSDSSTPALYSKKDGLRCNKRKKKTIDNTGRRRKECVEIAESLRWLTEAMIRSEQARMDTMKEIERMRVEAEAKRGEMDLKRTEIIANTQLEIARIFASVNNKGVDSSLRIGRS

SEQ ID NO: 59729 - protein, 333 aa, Glycine max
  peptide (1)..(333): Ceres Seq. ID no. 14312359
MEEEEKEKHTNNQDQNNHNHPSSLHPIKEECVSVRKPFSGDRVKRDEWSEGAVSTLLEAYEAKWVLRNRAKLKGHDWEDVARHVSARANCTKSPKTSTQCKNKVESMKKRYRSESAATADHASSSWPLYSRLDLLLRGTGPVLSSPPPPPPAMMPAAMPVLSPVEPSQPPQLSPPPAAPSGPLANAQNSHGSNGIDEKLAKEDGLGTKSSDQVSSKNPLDSDSSTPALYSKKDGLRCNKRKKKTIDNTGRRRKECVEIAESLRWLTEAMIRSEQARMDTMKEIERMRVEAEAKRGEMDLKRTEIIANTQLEIARIFASVNNKGVDSSLRIGRS

SEQ ID NO: 59730 - protein, 227 aa, Glycine max
  peptide (1)..(227): Ceres Seq. ID no. 14312360
MKKRYRSESAATADHASSSWPLYSRLDLLLRGTGPVLSSPPPPPPAMMPAAMPVLSPVEPSQPPQLSPPPAAPSGPLANAQNSHGSNGIDEKLAKEDGLGTKSSDQVSSKNPLDSDSSTPALYSKKDGLRCNKRKKKTIDNTGRRRKECVEIAESLRWLTEAMIRSEQARMDTMKEIERMRVEAEAKRGEMDLKRTEIIANTQLEIARIFASVNNKGVDSSLRIGRS

SEQ ID NO: 59731 - DNA, 1261 bp, Glycine max
  misc_feature (1)..(1261): Ceres Seq. ID no. 15177596
gaagtgtcagctcttccatcctacttcaccctctcacaataaaatcattgcaatagagaagtcccttaaataaatctgaatttccctgctttgcttcaccaccccccttgcttgcgtgggtagaaatgcaagaagcagggctgggaatgggaatgggaatgatgagcggagaagtatccgccgccggggaccaccaccgtcaagtgaaggcggagatagccaaccacccactctatgaacagcttctatctgcacacgtgtcatgcctccgcgtcgccacacctatcgatcagttgccgctcatcgacggacagttatcgcagtcccaccatctcctccgctcttatgcctcacaccattcccattccctctcgccccatgaccgacaagaactcgacaacttcatggcacaatatttgattgtgttatgtacgttcaaagagcagcttcagcaacatgtgagggtgcatgccgtggaggctgtgatggcctgccgtgatattgaaagtaccttgcaagctctgacaggagtcagtttgggagaaggaacaggtgcaacaatgtcagatgatgaagatgatttgcagatggatggctctttagatcagtctagcgctgacgggcatgacatgatgggatttggtccattgcttcctacagaatctgaaaggtccctgatggaaagagttcgtcaggagcttaagattgagctcaagcagggttttaagtcaagaattgaagatgttagggaggaaatattaaggaagcggagagctgggaaattaccaggtgacacaacatcggttttaaaggcctggtggcagcaacatgctaagtggccctacccaactgaagatgacaaggcaaaacttgtggaggagacagggttgcagctgaagcaaatcaataattggttcatcaatcaaaggaaacgcaactggcacagcaactctcaatcggttaactctctgaagtccaagcgcaagagagagtatgcccactaaggattccagtctggtgcagaagataacaggtgatgcactacaacataagatggcttacaatagtgatggttgtaaattcttggaatacataacggatacaaactattcttgttgtgcacggtcgcctccatttctttcaagtgtttttttatttgtaaatttgtttgctatgatttgactggctgaagaagtatttttagcagctgaaagcctgaaagtgtttcctatacttgatatgtttgcatgtactattatgt

SEQ ID NO: 59732 - protein, 292 aa, Glycine max
  peptide (1)..(292): Ceres Seq. ID no. 15177597
MQEAGLGMGMGMMSGEVSAAGDHHRQVKAEIANHPLYEQLLSAHVSCLRVATPIDQLPLIDGQLSQSHHLLRSYASHHSHSLSPHDRQELDNFMAQYLIVLCTFKEQLQQHVRVHAVEAVMACRDIESTLQALTGVSLGEGTGATMSDDEDDLQMDGSLDQSSADGHDMMGFGPLLPTESERSLMERVRQELKIELKQGFKSRIEDVREEILRKRRAGKLPGDTTSVLKAWWQQHAKWPYPTEDDKAKLVEETGLQLKQINNWFINQRKRNWHSNSQSVNSLKSKRKREYAH

SEQ ID NO: 59733 - protein, 285 aa, Glycine max
  peptide (1)..(285): Ceres Seq. ID no. 15177598
MGMGMMSGEVSAAGDHHRQVKAEIANHPLYEQLLSAHVSCLRVATPIDQLPLIDGQLSQSHHLLRSYASHHSHSLSPHDRQELDNFMAQYLIVLCTFKEQLQQHVRVHAVEAVMACRDIESTLQALTGVSLGEGTGATMSDDEDDLQMDGSLDQSSADGHDMMGFGPLLPTESERSLMERVRQELKIELKQGFKSRIEDVREEILRKRRAGKLPGDTTSVLKAWWQQHAKWPYPTEDDKAKLVEETGLQLKQINNWFINQRKRNWHSNSQSVNSLKSKRKREYAH

SEQ ID NO: 59734 - protein, 283 aa, Glycine max
  peptide (1)..(283): Ceres Seq. ID no. 15177599
MGMMSGEVSAAGDHHRQVKAEIANHPLYEQLLSAHVSCLRVATPIDQLPLIDGQLSQSHHLLRSYASHHSHSLSPHDRQELDNFMAQYLIVLCTFKEQLQQHVRVHAVEAVMACRDIESTLQALTGVSLGEGTGATMSDDEDDLQMDGSLDQSSADGHDMMGFGPLLPTESERSLMERVRQELKIELKQGFKSRIEDVREEILRKRRAGKLPGDTTSVLKAWWQQHAKWPYPTEDDKAKLVEETGLQLKQINNWFINQRKRNWHSNSQSVNSLKSKRKREYAH

SEQ ID NO: 59735 - DNA, 1433 bp, Glycine max
  misc_feature (1)..(1433): Ceres Seq. ID no. 15176379
aaaaaataaggatgtaaatattttgttttgggtactgtgatatattgtctaatggataatttggttttatttacaaaaatattggcttatgccattaaaaattgtgcttatctattaggtgtactaaatgtctaaatcatattgaaattgatttttggatctttacttggatcaagaacattgaattatgaagtaatgacttaacttaatcaatagttgatgaccctaaggaataattttatgagtccttctgaagggtgtttaaagtgacttttcctcttagaattaagcggagtttattaaatgaatttctgtaaggaatcaaaagatgcatgtgcaatatcttttatgctagtatgtccctatagaattctaaggaaatgcaaagtagtgaatttaaatgttctatgttatagaaacaaagaaagagtgagaaaaactgcatttttatgctctttcatctcttgctccctatccttgccatctatgatcccaaaattctatacaatcttcgggaacgaatttcagtaagatagttcaactctactacatcttttgcacaatcgagcaacatatgcataattgcataactgaacaagcaaaatgagattgtcgtgcttgacactgttggcatttggcaccctgtaaatacaagaaagatgacaacaagatgggtgatattaatccaatggtgctattggcatttgagaatctttatcatgtgctgtaaatacctgcatgtgctttgaccagaataatatgatttgtgttgggaaagcaaaattggctaactagccaatgatcctgaaaaagacatacaatgtagtggaggaaaattgtgtgggtttttatcaatatattattggatgcagttaaatggtctaaatatctacagcactgtaggttgattatgtttgtccctgggtcatttatgttaactatttggtcttcttttcatccagattacttaagaaagatcatcgtgcagggaagatcatccaagtctactaaggttggagatattatgactgaagagaacaaacttatcacagtcacccctgataccaaagttctgcaggctatgcaactgatgactgacaatagaatcaggcacatccccgtgattgatgaaaaagggatgattggcatggtgtccattggagatgtggttcgtgctgtggtgcgtgagcaccgacaagaggtcgagcgcttgaatgctttcatacaaggtggttattagataatgatgatgaaaaattctcaagggcactcaagctaatttgaattatgtaataagcttgagtgcttgtaaatatgttatggccacagagccttcttgtttgctttcctgtaatttcagttttatgggcattaacccgatggagtagcagcatgttaataataacaactggatgcagtttgaatttgttttg

SEQ ID NO: 59736 - protein, 109 aa, Glycine max
  peptide (1)..(109): Ceres Seq. ID no. 15176380
MFVPGSFMLTIWSSFHPDYLRKIIVQGRSSKSTKVGDIMTEENKLITVTPDTKVLQAMQLMTDNRIRHIPVIDEKGMIGMVSIGDVVRAVVREHRQEVERLNAFIQGGY

SEQ ID NO: 59737 - protein, 102 aa, Glycine max
  peptide (1)..(102): Ceres Seq. ID no. 15176381
MLTIWSSFHPDYLRKIIVQGRSSKSTKVGDIMTEENKLITVTPDTKVLQAMQLMTDNRIRHIPVIDEKGMIGMVSIGDVVRAVVREHRQEVERLNAFIQGGY

SEQ ID NO: 59738 - protein, 75 aa, Glycine max
  peptide (1)..(75): Ceres Seq. ID no. 15176382
MNFCKESKDACAISFMLVCPYRILRKCKVVNLNVLCYRNKERVRKTAFLCSFISCSLSLPSMIPKFYTIFGNEFQ

SEQ ID NO: 59739 - DNA, 1761 bp, Glycine max
  misc_feature (1)..(1761): Ceres Seq. ID no. 15172020
gacagttctattgggaaagttttcaagttcacacatgttctggctgcctccttcgccggtttagttgccgccgccgccgcctcaagctaccggcgggcaccgtccacggtggtgggagagcagaagaaggttattcccgagctacgtaggacggaatctgggcgtctcggggagatcgaaaagttctcccactatgttgcaaggcaaatggggtttgaagatgctgatgaggttccagagctatgcatattggcccaagagtatttgaaaaaatccaaagggtgcgatgaaagcatctttgaatatatttccagtggcaatgtggagaacactgattctctatatgcgaaattagttgaggagttagagagatgcatcctcagttatttagcatttcactggaaccaagctacatctgtcattagtcaggttttgggtgtggagtctcagcagaaaaaaaagctgaagggaattctattggcagctacaagggaacagaggtttgatagagtaaccaagaatctgaaagtgacaagagtgatctctactttggtggaagagatgaaagcaataaatggtgactcgcaatgtacagaagtgatggtgcccatggcccacagtgagaggagtccagtcctgctgttcatggggggtggcatgggagctggaaagagcactgttcttaaagacattcttaaagaatcattttggtcaggagcagcttcaaatgctgtggtggttgaggcagatgctttcaaggagagtgacgtcatatatagagcccttagctccagaggtcaccatgatgacatgctccaaactgctgaattggtgcatcaatcttccactgatgctgcatcatctctgctggtgacagctctaaatgagggtcgagatgtgatcatggatggtaccttatcatgggaaccatttgtggagcaaactattgctatggcaagaaatgttcacaaacacaggtaccgaatgggggtagggtataaagtagctgaagatgggacaattactgaaaattactgggagcaagtaaatgatgcagaagagcatcaatcagaggaaatttctaatggagaagcacacacccaaaagccttacagaattgagctagttggtgtggtttgtgatggctatcttgctgttgttagaggcattaggagagctattatgacagggagggcagtgagagtgaattcacaactgaaatctcacaaaagatttgctaatgcatttccaagatattgcaaacttgttgataatgccagactctattgcacaaatgctgttggtggtccaccaaagcttatagggcggaaggatggtgatcacaatctactagtggatcgtgaagagatcaagtgcttggaaacgttaggcagtttgaatgctggagctgattccatctacgaacttcacaaagaacccagccccataatggaacctggttctgtttggaatgatatagttatgtcaccttcaaggccaagtgatcaaaaagaattgaaggaatctattcagaaaatagagaaatccatccgaaaaatgtaaccaatattgttgcctgatacgttggagcagtatttggctatctctggaatatatcgtgttttgttctatatctttaatcgtatgattttacttgacaaggaagattattgtgtcgttttcttggtatctatatgtaaagtgaaatgcttggaacatatattatgtaatatactcttgagttttgagcatatttttttt

SEQ ID NO: 59740 - protein, 520 aa, Glycine max
  peptide (1)..(520): Ceres Seq. ID no. 15172021
DSSIGKVFKFTHVLAASFAGLVAAAAASSYRRAPSTVVGEQKKVIPELRRTESGRLGEIEKFSHYVARQMGFEDADEVPELCILAQEYLKKSKGCDESIFEYISSGNVENTDSLYAKLVEELERCILSYLAFHWNQATSVISQVLGVESQQKKKLKGILLAATREQRFDRVTKNLKVTRVISTLVEEMKAINGDSQCTEVMVPMAHSERSPVLLFMGGGMGAGKSTVLKDILKESFWSGAASNAVVVEADAFKESDVIYRALSSRGHHDDMLQTAELVHQSSTDAASSLLVTALNEGRDVIMDGTLSWEPFVEQTIAMARNVHKHRYRMGVGYKVAEDGTITENYWEQVNDAEEHQSEEISNGEAHTQKPYRIELVGVVCDGYLAVVRGIRRAIMTGRAVRVNSQLKSHKRFANAFPRYCKLVDNARLYCTNAVGGPPKLIGRKDGDHNLLVDREEIKCLETLGSLNAGADSIYELHKEPSPIMEPGSVWNDIVMSPSRPSDQKELKESIQKIEKSIRKM

SEQ ID NO: 59741 - protein, 451 aa, Glycine max
  peptide (1)..(451): Ceres Seq. ID no. 15172022
MGFEDADEVPELCILAQEYLKKSKGCDESIFEYISSGNVENTDSLYAKLVEELERCILSYLAFHWNQATSVISQVLGVESQQKKKLKGILLAATREQRFDRVTKNLKVTRVISTLVEEMKAINGDSQCTEVMVPMAHSERSPVLLFMGGGMGAGKSTVLKDILKESFWSGAASNAVVVEADAFKESDVIYRALSSRGHHDDMLQTAELVHQSSTDAASSLLVTALNEGRDVIMDGTLSWEPFVEQTIAMARNVHKHRYRMGVGYKVAEDGTITENYWEQVNDAEEHQSEEISNGEAHTQKPYRIELVGVVCDGYLAVVRGIRRAIMTGRAVRVNSQLKSHKRFANAFPRYCKLVDNARLYCTNAVGGPPKLIGRKDGDHNLLVDREEIKCLETLGSLNAGADSIYELHKEPSPIMEPGSVWNDIVMSPSRPSDQKELKESIQKIEKSIRKM

SEQ ID NO: 59742 - protein, 333 aa, Glycine max
  peptide (1)..(333): Ceres Seq. ID no. 15172023
MKAINGDSQCTEVMVPMAHSERSPVLLFMGGGMGAGKSTVLKDILKESFWSGAASNAVVVEADAFKESDVIYRALSSRGHHDDMLQTAELVHQSSTDAASSLLVTALNEGRDVIMDGTLSWEPFVEQTIAMARNVHKHRYRMGVGYKVAEDGTITENYWEQVNDAEEHQSEEISNGEAHTQKPYRIELVGVVCDGYLAVVRGIRRAIMTGRAVRVNSQLKSHKRFANAFPRYCKLVDNARLYCTNAVGGPPKLIGRKDGDHNLLVDREEIKCLETLGSLNAGADSIYELHKEPSPIMEPGSVWNDIVMSPSRPSDQKELKESIQKIEKSIRKM

SEQ ID NO: 59743 - DNA, 909 bp, Glycine max
  misc_feature (1)..(909): Ceres Seq. ID no. 15176678
gtgaaggaaacgtcgaaaccttaaagcgaaccatgccagaaggagaacccaccaatggttactgcagcagcagcagcggcgaagaagacggtgacgccgcttggagagcagccatcgattccattgctcaaaccaccacctatgtctcttccaccaccaaacacactcaccctaatcatgatgatgatgatgattacgatggccacaaacccaaaacacgacaacttaagcactaccaactcaaggcacaaaaccttctgaatgaaatattggaaaattcaatagagatagtgagaaaacctgtccctgtcgtggatgaggatcccgagagcaatgaatgcggcattcgcttgtttaaacatgctcagccaggaatagtgtttgatcacgtagatgaacctcaaccaccaaggaaacggcctagaatacttcctggaggggatattgatgagaaatcaaagaagcagtttagaaagcagattagatctgttgctgttaatggtatagaaataatagctgcagcaaacgatgcatacaagaagtcattagctagactagaagctaaagatgcagcagcaaaagctaaagccaagagagaagatgaaagagttgaaaatttgaaaaagattaggggagaaaagtggctaccttccatggcccaggagatgcaggttaaaattcgacactgatttttgtctttcattctcttaacttcaattctagttttatgtgtaactagatgattgattagctttgttgatttggtagtggagctggttgtaccctaaaaaatatagttatgggattatagtttagttgtgaaaagctttttttttttttttttttttcactattctgttacaacactcttcacaagttcacatattgaaatttccgaaaatgtaaatc

SEQ ID NO: 59744 - protein, 228 aa, Glycine max
  peptide (1)..(228): Ceres Seq. ID no. 15176679
EGNVETLKRTMPEGEPTNGYCSSSSGEEDGDAAWRAAIDSIAQTTTYVSSTTKHTHPNHDDDDDYDGHKPKTRQLKHYQLKAQNLLNEILENSIEIVRKPVPVVDEDPESNECGIRLFKHAQPGIVFDHVDEPQPPRKRPRILPGGDIDEKSKKQFRKQIRSVAVNGIEIIAAANDAYKKSLARLEAKDAAAKAKAKREDERVENLKKIRGEKWLPSMAQEMQVKIRH

SEQ ID NO: 59745 - protein, 218 aa, Glycine max
  peptide (1)..(218): Ceres Seq. ID no. 15176680
MPEGEPTNGYCSSSSGEEDGDAAWRAAIDSIAQTTTYVSSTTKHTHPNHDDDDDYDGHKPKTRQLKHYQLKAQNLLNEILENSIEIVRKPVPVVDEDPESNECGIRLFKHAQPGIVFDHVDEPQPPRKRPRILPGGDIDEKSKKQFRKQIRSVAVNGIEIIAAANDAYKKSLARLEAKDAAAKAKAKREDERVENLKKIRGEKWLPSMAQEMQVKIRH

SEQ ID NO: 59746 - DNA, 1243 bp, Glycine max
  misc_feature (1)..(1243): Ceres Seq. ID no. 14303355
gaggcaattatacatttaagttcatttcctcctctcctctctcttcattttatttttcttccatctgctaggaaaatgtctgtcagcgttgagggctctgcctttggggcactatttgaagaaaaaaatgtccattctgaagacagcaacgagcttgtgttgcatggtgcatttccattggctaaacatgagagacagaatggatttaatgccacagacatgaatgcatttggaaactccttcaggaactatgatgcagaaagtgaaaggcaaagaatggtggaggaattatataggatgcaacacatcaaccagacatatgactatgggaagagaatgagggaggagtatgggaaattggacaaattagaaatgggtatatgggagtgttgtgagctgctcaatgaagtgacggatgatagcgatcctgatttggatgaaccacaaatacaacatttgttgcagtccgctgaagccattagaaaagactatcctaatgaagattggttacatttaactgctcttattcatgatcttggaaagatccttatgcttccaagctttggtggccttcctcaatggtctgttgttggagatacatttcccctcggatgtgcttttgatgagtcaaatgttcaccacaagcatttcaaggacaatccggataacacaaatcctacttataacacgaaaaatggaatctacaaagaaggaattggactagacaatgttgtgatgtcatggggacatgatgagtatatgtatttggttgcaaaggaaaacggcaccactttgcctccagtagcattgttcattatcaaataccattctttttacgctttacatagggcaggagcatatacacatttgatgaatgaagaagatattgagaatttgaagtggctcaaaatatttagcaaatatgacctctacagcaagagtaaagttctagtagacatagaaaaagttaagccatactatatgtcgctcatcgagaagtatttcccagcaaagcttaggtggtgaaactcaaagacatacacatcgatatggaatcaaagtcatgggcaagctaaggatttaagtttatacttatgaattatgatcgttatgccgaacgtttaaggaattgtttttttcttttatcagattgaagttgttgcctaactttaaattattcttattaagctgtaccgaacgtttaccgtactagaagttgatgtatttacggtttggttgttcc

SEQ ID NO: 59747 - protein, 341 aa, Glycine max
  peptide (1)..(341): Ceres Seq. ID no. 14303356
EAIIHLSSFPPLLSLHFIFLPSARKMSVSVEGSAFGALFEEKNVHSEDSNELVLHGAFPLAKHERQNGFNATDMNAFGNSFRNYDAESERQRMVEELYRMQHINQTYDYGKRMREEYGKLDKLEMGIWECCELLNEVTDDSDPDLDEPQIQHLLQSAEAIRKDYPNEDWLHLTALIHDLGKILMLPSFGGLPQWSVVGDTFPLGCAFDESNVHHKHFKDNPDNTNPTYNTKNGIYKEGIGLDNVVMSWGHDEYMYLVAKENGTTLPPVALFIIKYHSFYALHRAGAYTHLMNEEDIENLKWLKIFSKYDLYSKSKVLVDIEKVKPYYMSLIEKYFPAKLRW

SEQ ID NO: 59748 - protein, 316 aa, Glycine max
  peptide (1)..(316): Ceres Seq. ID no. 14303357
MSVSVEGSAFGALFEEKNVHSEDSNELVLHGAFPLAKHERQNGFNATDMNAFGNSFRNYDAESERQRMVEELYRMQHINQTYDYGKRMREEYGKLDKLEMGIWECCELLNEVTDDSDPDLDEPQIQHLLQSAEAIRKDYPNEDWLHLTALIHDLGKILMLPSFGGLPQWSVVGDTFPLGCAFDESNVHHKHFKDNPDNTNPTYNTKNGIYKEGIGLDNVVMSWGHDEYMYLVAKENGTTLPPVALFIIKYHSFYALHRAGAYTHLMNEEDIENLKWLKIFSKYDLYSKSKVLVDIEKVKPYYMSLIEKYFPAKLRW

SEQ ID NO: 59749 - protein, 268 aa, Glycine max
  peptide (1)..(268): Ceres Seq. ID no. 14303358
MNAFGNSFRNYDAESERQRMVEELYRMQHINQTYDYGKRMREEYGKLDKLEMGIWECCELLNEVTDDSDPDLDEPQIQHLLQSAEAIRKDYPNEDWLHLTALIHDLGKILMLPSFGGLPQWSVVGDTFPLGCAFDESNVHHKHFKDNPDNTNPTYNTKNGIYKEGIGLDNVVMSWGHDEYMYLVAKENGTTLPPVALFIIKYHSFYALHRAGAYTHLMNEEDIENLKWLKIFSKYDLYSKSKVLVDIEKVKPYYMSLIEKYFPAKLRW

SEQ ID NO: 59750 - DNA, 1715 bp, Glycine max
  misc_feature (1)..(1715): Ceres Seq. ID no. 14304838
actttcctctttctttcccttttcctcgtttccacaaccctcccgaattcttgagacgcttcccgaatcctttcacacacacgttgctgaatctatatatctaaatcccttcacttcccattcctaaatcctcttacaaaaactatacaacgttgcttttgttttgttttgttttgtctctctctaatcattccaatggccaaagaaggacccaactgggacgggttgctcaaatggagcattcctcattccgatgggactcgccccactcgcaatttaagtgaggaggatcggagatggtttatggaagcgatgcagtcacagaccattgatgttgtaaaacgtatgaaagagatcacacttgtgatgcaaactccagaacaagtcttgaaagaccaaggagttacccctgcagacattgaagatatgttggatgagttgcaagagcatgttgagtcaattgacatggccaatgatctccattcaattggtggcttggttcctcttcttggttacctaaagagttctcatgccaatattcgagcaaaggctgctgatgttgtgaccacaatagtccagaataatcctcgaagtcagcaacttgttatggaagcaaatggctttgaacctcttatttctaatttcagttcagatcctgatgtgactgttagaactaaagcactgggtgcaatatcttcactaatccggcacaacaaacaaggcattactgtatttcgtttggcaaatgggtatgctgctttgaaagatgcactagcctctgaaaatgtgagatttcaaaggaaagctctcaacttgacccattacctgttgcatgagaataattcagactgcaacatcgtgaatgagcttgggtttcctcgactgttgatgcaccttgcctcaagtgaagattcagatgtcagagaagctgcccttcggggccttcttgagcttgcttgcaatactcaagatggcaaggatggcaatgaggaagacagtgagaagatgaagcaacttcttcaagaacgaataaacaatatcagtttaatgtcagctgaggaccttggtgtagtcagggaggagaggcaacttgtggactccctgtggagcacttgcttcaacgagccatcttctcttcgagagaaagggtcttcttgtgcttccaggtgaagatgcaccccctccagatgttgctagccaatattttgaggcctcctctaagatattcgagtgtgaatccatcttccaagaaagactcaaacaatgaaaagaaagagatccctttgcttttagggtcagggccttctcttgcagacactaacaaccaaggttcaaatagagaaaatgctaatagctgaaagcttggatgctttctgctctgttttttttttgccgtgctttctttctatcttatcatacaagtaatttcatataggctctttttttcccctttcttttctcaccttagattggtcttccattgtatttcaagaatgatctcatggtatgtgacactataactagccttccattgcagcggtgaatgccttcaattttttgcacttgatatttttaaatacttgtttagatgttacagtcccactcttacatgtataaaaggatctacttgtccacattatccttcaattttgggtttgggcagtgtgtttctagtgaataaaaagagagaatgatagttatgatagttatgatag

SEQ ID NO: 59751 - protein, 324 aa, Glycine max
  peptide (1)..(324): Ceres Seq. ID no. 14304839
MAKEGPNWDGLLKWSIPHSDGTRPTRNLSEEDRRWFMEAMQSQTIDVVKRMKEITLVMQTPEQVLKDQGVTPADIEDMLDELQEHVESIDMANDLHSIGGLVPLLGYLKSSHANIRAKAADVVTTIVQNNPRSQQLVMEANGFEPLISNFSSDPDVTVRTKALGAISSLIRHNKQGITVFRLANGYAALKDALASENVRFQRKALNLTHYLLHENNSDCNIVNELGFPRLLMHLASSEDSDVREAALRGLLELACNTQDGKDGNEEDSEKMKQLLQERINNISLMSAEDLGVVREERQLVDSLWSTCFNEPSSLREKGSSCASR

SEQ ID NO: 59752 - protein, 288 aa, Glycine max
  peptide (1)..(288): Ceres Seq. ID no. 14304840
MEAMQSQTIDVVKRMKEITLVMQTPEQVLKDQGVTPADIEDMLDELQEHVESIDMANDLHSIGGLVPLLGYLKSSHANIRAKAADVVTTIVQNNPRSQQLVMEANGFEPLISNFSSDPDVTVRTKALGAISSLIRHNKQGITVFRLANGYAALKDALASENVRFQRKALNLTHYLLHENNSDCNIVNELGFPRLLMHLASSEDSDVREAALRGLLELACNTQDGKDGNEEDSEKMKQLLQERINNISLMSAEDLGVVREERQLVDSLWSTCFNEPSSLREKGSSCASR

SEQ ID NO: 59753 - protein, 285 aa, Glycine max
  peptide (1)..(285): Ceres Seq. ID no. 14304841
MQSQTIDVVKRMKEITLVMQTPEQVLKDQGVTPADIEDMLDELQEHVESIDMANDLHSIGGLVPLLGYLKSSHANIRAKAADVVTTIVQNNPRSQQLVMEANGFEPLISNFSSDPDVTVRTKALGAISSLIRHNKQGITVFRLANGYAALKDALASENVRFQRKALNLTHYLLHENNSDCNIVNELGFPRLLMHLASSEDSDVREAALRGLLELACNTQDGKDGNEEDSEKMKQLLQERINNISLMSAEDLGVVREERQLVDSLWSTCFNEPSSLREKGSSCASR

SEQ ID NO: 59754 - DNA, 1619 bp, Glycine max
  misc_feature (1)..(1619): Ceres Seq. ID no. 15172124
gatccatcttcaactttcctttctttcctttcctcttctttttctccctccaagaacacatttttctttgacccttttgttccctctccacccacttcccctttaagacaatttcatgcttctctgtctcggatcctagatcttgctgtcggtgggttgatcggagtagatgtcgccgtcaaacgggttgcataacggcggcggaggcggcagcggtggtggcggaggtaatggggtgagttatatagagcaccaggtttcaaaacttgacactcttgctggtgtggcaatcaagtatggtgttgaggtagctgacataaaaaggatgaatgggttggccacagatcttcaaatgttcgcactgaagacattgaaaattccattaccaggacgtcatccaccatctcctgctcctggtccacatgatgaacctgcaaagtcaggagaagctagtattgagaggaaacccctacgcataggtcaatctgccatgaaggaacctctccagtccttagaactgaaaccacctcaaccgaatatttctccagctatgagcattttacagaaattctatggcctcaaatcttcaaattcaagagatacattgaatggaacagaaatggcagtttatttgtcctcaaattctgatcattctagtggggaatggcttcccaaagcctcacccattttagacctaccatcagcatcaaatgattaccccaggtcaacaaatttagtgtatgatctactgaccggggatgatgaatatgtgcctcttgcggaaattggggacacaggagttgagaagtctgatgagaaatctgtccgaagacgtcagaaagctgaagttgataacggaaccagtaccccagaaaagattatgaaagaaggaaatggtaatggatcaaatggtctttcttcaaatggaaaaacattagccatgaggccgaaatcggctagtcgagcagcgctgttccctgagtcagaatcaggatggttagattcaattccagtggggttgggagaatctatatttactgatggcttttccggagtgcgcaaatcgtcaagtgcatcaagcctcagagagcaggaaaaaaacaattcagcagcagcctggccgcctgcaatatggagcttgaaacctgacttgcaagcagccatttcgaaacctatctttgatggtctacctatcccaatatctggccgcagaagcaaagctgcccttgattagtgtaaaattgttccccatttgagcaaaatactttttgactttacacaaatataaattgcaacaagatgcaattatttgggttagtaagccttgcaaagaaggaaaagaaaaaagaagagagaaaaatacaaaattaggatatttgttccaggcctagcaaggggtagatgacctcctaagaggaaaagcttcagcagttgcaactgaggaaaaggtgcatgaaaatggtaagcagctggtttttcaattgtaccaataatgtaatggtgttcgaccccacctggatgataaagagttatttacatattgattatttcctttgttaaatgaacgagtgaagtgaaagtcattctgttcagtggttaatcatgtgattattattatt

SEQ ID NO: 59755 - protein, 354 aa, Glycine max
  peptide (1)..(354): Ceres Seq. ID no. 15172125
MSPSNGLHNGGGGGSGGGGGNGVSYIEHQVSKLDTLAGVAIKYGVEVADIKRMNGLATDLQMFALKTLKIPLPGRHPPSPAPGPHDEPAKSGEASIERKPLRIGQSAMKEPLQSLELKPPQPNISPAMSILQKFYGLKSSNSRDTLNGTEMAVYLSSNSDHSSGEWLPKASPILDLPSASNDYPRSTNLVYDLLTGDDEYVPLAEIGDTGVEKSDEKSVRRRQKAEVDNGTSTPEKIMKEGNGNGSNGLSSNGKTLAMRPKSASRAALFPESESGWLDSIPVGLGESIFTDGFSGVRKSSSASSLREQEKNNSAAAWPPAIWSLKPDLQAAISKPIFDGLPIPISGRRSKAALD

SEQ ID NO: 59756 - protein, 302 aa, Glycine max
  peptide (1)..(302): Ceres Seq. ID no. 15172126
MNGLATDLQMFALKTLKIPLPGRHPPSPAPGPHDEPAKSGEASIERKPLRIGQSAMKEPLQSLELKPPQPNISPAMSILQKFYGLKSSNSRDTLNGTEMAVYLSSNSDHSSGEWLPKASPILDLPSASNDYPRSTNLVYDLLTGDDEYVPLAEIGDTGVEKSDEKSVRRRQKAEVDNGTSTPEKIMKEGNGNGSNGLSSNGKTLAMRPKSASRAALFPESESGWLDSIPVGLGESIFTDGFSGVRKSSSASSLREQEKNNSAAAWPPAIWSLKPDLQAAISKPIFDGLPIPISGRRSKAALD

SEQ ID NO: 59757 - protein, 293 aa, Glycine max
  peptide (1)..(293): Ceres Seq. ID no. 15172127
MFALKTLKIPLPGRHPPSPAPGPHDEPAKSGEASIERKPLRIGQSAMKEPLQSLELKPPQPNISPAMSILQKFYGLKSSNSRDTLNGTEMAVYLSSNSDHSSGEWLPKASPILDLPSASNDYPRSTNLVYDLLTGDDEYVPLAEIGDTGVEKSDEKSVRRRQKAEVDNGTSTPEKIMKEGNGNGSNGLSSNGKTLAMRPKSASRAALFPESESGWLDSIPVGLGESIFTDGFSGVRKSSSASSLREQEKNNSAAAWPPAIWSLKPDLQAAISKPIFDGLPIPISGRRSKAALD

SEQ ID NO: 59758 - DNA, 1448 bp, Glycine max
  misc_feature (1)..(1448): Ceres Seq. ID no. 14304859
attgacaacgactcctttagaagacagaaaattcttgaagagtgaaatgaccaatgatgcaaatttatcccgagttaagcctttggcatctgaaatccctcacaaagattatgcggatagatttgatagaaaaatctcgcaagtcggagaaatcaagtatcatgaagaaccagatgaggaacttgtcagacattacaagcgtcttccaaatagtatccttacagagcaatctcttaaagatatgctttctgattccctcacttcactgaatctagctaacctcaagtgggtgaaaaacgaacatttgaataagcttggttttgttgctccaaacttagtggagcttaatatttcaggtaccgttgctaatgacaccacccttgaagaaattggcaagacatgcttgaatcttaagtcaattgacatttctcattgtccggagcttactgagaaaggagtccgagcatttttcgagaactgtccccctattcaaaaattctgggcatcaacttgtcccaattctgtaacagatgagtcattggcctatttcacaaatgctgaagaattaactacattcaatatcgaattttgttctaaggtcagtgacgtatccctccaggtcattgtcgaagctgctcctccactcaaagagttatacgtttcaggctgtactaaaattaccggaaagattgtaaccgctttaatacagataggaaattaccaattagaaattgccgaaatctcaaacttaagccaagctgagtttgataacgagaccatgaaagcggtcggaacatgttcaaagttaagaagattaaacatttcaggggatagtaatattggagatgaaggtgtacacaacttgatctcaggatataaggaagcagatgattcattggtgaagaaagatgaagggttcaagcacttagttgagtttagaatgagttcaaccaagatcaattctgaaggcgctgtgataaaattctgcaatgcttgtccaaacttggagatcttggacatgaatggttttgtgcctgtaggagagactggaataaatatgatctgcaaatcattatctaagcttaagatctgcttgataaactttacggataagatatcagatccttacctagttgagcttcgtcagacttatcctgatgtgaagtttgtccgcacaataattgcgcctagtaatccagctgataatgaattgagagtgccattcccaaggattcaacaaggaaagaagaaaaagaagaagggtaagaagaagaagtaaaaaggcatagtttagcagttgatattgtaataatataaatatttctatattaaagagctttttttttgttgctgcctcagaacctttattttagtttatttttgctgatatatgacttaatttaaggagatatattccatatatactaaaaacactcttagcttaattc

SEQ ID NO: 59759 - protein, 425 aa, Glycine max
  peptide (1)..(425): Ceres Seq. ID no. 14304860
LTTTPLEDRKFLKSEMTNDANLSRVKPLASEIPHKDYADRFDRKISQVGEIKYHEEPDEELVRHYKRLPNSILTEQSLKDMLSDSLTSLNLANLKWVKNEHLNKLGFVAPNLVELNISGTVANDTTLEEIGKTCLNLKSIDISHCPELTEKGVRAFFENCPPIQKFWASTCPNSVTDESLAYFTNAEELTTFNIEFCSKVSDVSLQVIVEAAPPLKELYVSGCTKITGKIVTALIQIGNYQLEIAEISNLSQAEFDNETMKAVGTCSKLRRLNISGDSNIGDEGVHNLISGYKEADDSLVKKDEGFKHLVEFRMSSTKINSEGAVIKFCNACPNLEILDMNGFVPVGETGINMICKSLSKLKICLINFTDKISDPYLVELRQTYPDVKFVRTIIAPSNPADNELRVPFPRIQQGKKKKKKGKKKK

SEQ ID NO: 59760 - protein, 410 aa, Glycine max
  peptide (1)..(410): Ceres Seq. ID no. 14304861
MTNDANLSRVKPLASEIPHKDYADRFDRKISQVGEIKYHEEPDEELVRHYKRLPNSILTEQSLKDMLSDSLTSLNLANLKWVKNEHLNKLGFVAPNLVELNISGTVANDTTLEEIGKTCLNLKSIDISHCPELTEKGVRAFFENCPPIQKFWASTCPNSVTDESLAYFTNAEELTTFNIEFCSKVSDVSLQVIVEAAPPLKELYVSGCTKITGKIVTALIQIGNYQLEIAEISNLSQAEFDNETMKAVGTCSKLRRLNISGDSNIGDEGVHNLISGYKEADDSLVKKDEGFKHLVEFRMSSTKINSEGAVIKFCNACPNLEILDMNGFVPVGETGINMICKSLSKLKICLINFTDKISDPYLVELRQTYPDVKFVRTIIAPSNPADNELRVPFPRIQQGKKKKKKGKKKK

SEQ ID NO: 59761 - protein, 345 aa, Glycine max
  peptide (1)..(345): Ceres Seq. ID no. 14304862
MLSDSLTSLNLANLKWVKNEHLNKLGFVAPNLVELNISGTVANDTTLEEIGKTCLNLKSIDISHCPELTEKGVRAFFENCPPIQKFWASTCPNSVTDESLAYFTNAEELTTFNIEFCSKVSDVSLQVIVEAAPPLKELYVSGCTKITGKIVTALIQIGNYQLEIAEISNLSQAEFDNETMKAVGTCSKLRRLNISGDSNIGDEGVHNLISGYKEADDSLVKKDEGFKHLVEFRMSSTKINSEGAVIKFCNACPNLEILDMNGFVPVGETGINMICKSLSKLKICLINFTDKISDPYLVELRQTYPDVKFVRTIIAPSNPADNELRVPFPRIQQGKKKKKKGKKKK

SEQ ID NO: 59762 - DNA, 1496 bp, Glycine max
  misc_feature (1)..(1496): Ceres Seq. ID no. 15177818
acaaaatcgcccgcagtttcatcttcttcttcactctcttgctctcagtctcagactatttttctgaaagcatttcaaatggttgatagcaatccttcctctggatcacccgaagaaacacaaaatcccaacccagatgggaatgcacctgttgaaagtgatcttgcattggagaatctagcccaaaaagttcaagaatctctctctctggaaaaaagacataaattttgggaaacccaacctgttgggcagttcaaggatgtaggggactccagtttgccagaaggcccgattgaacttccaacccccttatctgaggtcaaacaagaaccatacaaccttcctgaccactatgaatgggttacttgtgacataaactctgaggagacgtgtgatgaggtatacaaccttcttgctcataattatgttgaggatgatgagaatatgtttcgatttaactactcaaaggaatttctgcgctgggctctgcaacctccgggttatttcaagagttggcatattggtgtccgtgttaaaagttccaagaagatggttgcctttataacaggtattcctgctagaatccgagttcgtgatgaggttgttcatatggcagagatcaattttctgtgtgtccataagaagcttcgaacaaagaggcttgctcctgtcatgatcaaagaggtcaccaggagggtgcatctggaaaatatgtggcaggcagcctacactgctggagtagttctccctacaccaataacaacttgtcaatactggcacagatctttgaatcccaagaagctaattgatgttggtttttctcggcttggtgcacgaatgacaatgagtcgaaccatcaagctttacaagctaccagaatcaacaatcaccccagggtttaggaagatggaaattcatgacgttcctgcagttaccaggctaattagaaattatttgagtcattttgttgttgcacctgattttgatgaaaacgatgtggagcattggcttcttccaagggatggtgttattgacagttatctggttgaaagtccggaaactcacgaggtcacggacttttgtagtttttacacacttccttcttctatccttggccacctaaattataaaattttgaaagcagcatattcattttataatgtttccacagtaactcctttgcttcagctgataaatgatgctctcattgtcgcaaaacacaaggattatgatgttttcaatgcattagatgtcatgcagaatgagaccttcttgagggaactgaagtttggaccaggtgatgggaaacttcattattatctttacaactaccgaataaggcatgcattgaagccatcagagcttgggcttgtgcttctgtagtctaaattttggaaatttgtcttgctatattgggatttataatggttttgctgtagacattgtatggttgcaaattatgtggtgatcaacgattagaccttaaattttgcttc

SEQ ID NO: 59763 - protein, 460 aa, Glycine max
  peptide (1)..(460): Ceres Seq. ID no. 15177819
TKSPAVSSSSSLSCSQSQTIFLKAFQMVDSNPSSGSPEETQNPNPDGNAPVESDLALENLAQKVQESLSLEKRHKFWETQPVGQFKDVGDSSLPEGPIELPTPLSEVKQEPYNLPDHYEWVTCDINSEETCDEVYNLLAHNYVEDDENMFRFNYSKEFLRWALQPPGYFKSWHIGVRVKSSKKMVAFITGIPARIRVRDEVVHMAEINFLCVHKKLRTKRLAPVMIKEVTRRVHLENMWQAAYTAGVVLPTPITTCQYWHRSLNPKKLIDVGFSRLGARMTMSRTIKLYKLPESTITPGFRKMEIHDVPAVTRLIRNYLSHFVVAPDFDENDVEHWLLPRDGVIDSYLVESPETHEVTDFCSFYTLPSSILGHLNYKILKAAYSFYNVSTVTPLLQLINDALIVAKHKDYDVFNALDVMQNETFLRELKFGPGDGKLHYYLYNYRIRHALKPSELGLVLL

SEQ ID NO: 59764 - protein, 434 aa, Glycine max
  peptide (1)..(434): Ceres Seq. ID no. 15177820
MVDSNPSSGSPEETQNPNPDGNAPVESDLALENLAQKVQESLSLEKRHKFWETQPVGQFKDVGDSSLPEGPIELPTPLSEVKQEPYNLPDHYEWVTCDINSEETCDEVYNLLAHNYVEDDENMFRFNYSKEFLRWALQPPGYFKSWHIGVRVKSSKKMVAFITGIPARIRVRDEVVHMAEINFLCVHKKLRTKRLAPVMIKEVTRRVHLENMWQAAYTAGVVLPTPITTCQYWHRSLNPKKLIDVGFSRLGARMTMSRTIKLYKLPESTITPGFRKMEIHDVPAVTRLIRNYLSHFVVAPDFDENDVEHWLLPRDGVIDSYLVESPETHEVTDFCSFYTLPSSILGHLNYKILKAAYSFYNVSTVTPLLQLINDALIVAKHKDYDVFNALDVMQNETFLRELKFGPGDGKLHYYLYNYRIRHALKPSELGLVLL

SEQ ID NO: 59765 - protein, 312 aa, Glycine max
  peptide (1)..(312): Ceres Seq. ID no. 15177821
MFRFNYSKEFLRWALQPPGYFKSWHIGVRVKSSKKMVAFITGIPARIRVRDEVVHMAEINFLCVHKKLRTKRLAPVMIKEVTRRVHLENMWQAAYTAGVVLPTPITTCQYWHRSLNPKKLIDVGFSRLGARMTMSRTIKLYKLPESTITPGFRKMEIHDVPAVTRLIRNYLSHFVVAPDFDENDVEHWLLPRDGVIDSYLVESPETHEVTDFCSFYTLPSSILGHLNYKILKAAYSFYNVSTVTPLLQLINDALIVAKHKDYDVFNALDVMQNETFLRELKFGPGDGKLHYYLYNYRIRHALKPSELGLVLL

SEQ ID NO: 59766 - DNA, 1026 bp, Glycine max
  misc_feature (1)..(1026): Ceres Seq. ID no. 14306375
aagatgcatttttctttttctattcaacatggattgttgaaggtagctgaaagagctcttttcttatggaacaatgaccacatcgtcaacttgattgcgcataaccgacaagtgatcctgcccatcatatttccagctttagacaggaatgttcaaagccattggaaccctgctgtcgtcaacctaactcacaatattagaaagatgttcttggagatggatgagaagctcttcatttcttgtcataatcactttaaggaggaagaagcaatcttgatctcaacagcggagaagcggaaggaggcatggaaacaactagagcatgcagccagtctcaggcccgtaattggaaatactgcagttttagtgtcctgacttgcattgcgggctggatcctcaatccttgttaacctcatgttatggtggaaaatctcaagatatgtggaatagctggttattgggagtggcattttgtatttgaatcctatgttcttagccttaattgcaaaaatattcctcctatttttttcaacttactaaattggtcctcttatattttaattcactgtcagagtctttttttttttttttaaatggctatttgtgttcttagagtagaaattgaacattgatggttaaggggaaatgttactaatacgtgttattatctaattggtaagtaaaatggtaaataaaaattaatgattaataagacaatgacacttgggagtaaatgttctttattaacagtccacgttcaattttagatatgggaatttaaatagtcaattttagatatgggaatttaaatagtcaattaaaatatagaagattgattttttgagtttgagtttgaataaataggaggattattttttgcaattaagccatgtacttatgatgcttttgaagtgagagggttttgattgctactgtgtggtacatcatgatgaagaccatgcagtgaatgaaaccattttctgtgcaactttatttccaaaatcttccgtgtatgttcttttactc

SEQ ID NO: 59767 - protein, 124 aa, Glycine max
  peptide (1)..(124): Ceres Seq. ID no. 14306376
KMHFSFSIQHGLLKVAERALFLWNNDHIVNLIAHNRQVILPIIFPALDRNVQSHWNPAVVNLTHNIRKMFLEMDEKLFISCHNHFKEEEAILISTAEKRKEAWKQLEHAASLRPVIGNTAVLVS

SEQ ID NO: 59768 - protein, 123 aa, Glycine max
  peptide (1)..(123): Ceres Seq. ID no. 14306377
MHFSFSIQHGLLKVAERALFLWNNDHIVNLIAHNRQVILPIIFPALDRNVQSHWNPAVVNLTHNIRKMFLEMDEKLFISCHNHFKEEEAILISTAEKRKEAWKQLEHAASLRPVIGNTAVLVS

SEQ ID NO: 59769 - DNA, 1325 bp, Glycine max
  misc_feature (1)..(1325): Ceres Seq. ID no. 14303413
agggcaaaaacagaacagaaacagagatgggttgcaatagctccaaggctgagccaccaccgttggaaaacaccatgcatcatcatcatcatgcagacgttgcagagttccaaaaacccaaaaccctaaaagaagaagtagtgctacagattccaggatgcaaagttcatctgatggaccaaggcgaggccctcgaactcgcacaaggtcacttcacgatcatgaagatcatggagcagaacgtggcactagcaaccattataaaagttggaaacagtgttcaatggcctctaacgaaagacgagccggtggtgaaggtggatgctcttcactacctgttctctctgcctgtgaaagatggtggggagcctcttagctatggtgtcacctttccagaacagtgctatgggaacatggagatgttggattcttttctcaaggatcactcttgcttttctggtttggaaaggaataagaagagtgatcttaaatgggaggagtttgctccaagggttgaagattacaatcattttctggcaagggcaattgcaggagggactggccagattgttaagggtatcttcttgtgcagcaatgcttacaccaaccaggtccaaaaaggaggggaaacgatcctaaatactgctgcagaaaagaacaatggtggcatggtcacagaaagtatgaaccacaggagtgatgccacaaagaataatgcaacgaacgataacctcaaacgtgtgagaaagctgacaaatatgacagaaaggttaaccaaatctttgcttgatggtgttggaataatgagtggatcagtgatgactcctgtgctgaaatcccaaccaggacaggcattcctaaatatgctccctggagaggtgctgttggcttcccttgatgccgtcaatagagtttttgaagcagctgaagctgctgaaaaacaaaccttttctgccacctctcaagctgcaaccagaatggtttctaacaggtttggggaagaagcaggagaggctactgagcatgtgtttgcaactgcaggacatgctgttaacactgcttggaatgtctctaagatacggaaggccatcaatccagcctcttcagcaaatgctgcaggagcactgagaaattctgccaaaaatagaaatgttatatattaaattcctatcatgtactgctttatgtttgacaatggtgaaggcataaaattttgcctatacatattgcaatatcattttggttgttatatgtaagtattaatgtgtgtattggtcatcccaaagcagaccttagaagaaacaaactataaaaagtgtccacat

SEQ ID NO: 59770 - protein, 386 aa, Glycine max
  peptide (1)..(386): Ceres Seq. ID no. 14303414
GKNRTETEMGCNSSKAEPPPLENTMHHHHHADVAEFQKPKTLKEEVVLQIPGCKVHLMDQGEALELAQGHFTIMKIMEQNVALATIIKVGNSVQWPLTKDEPVVKVDALHYLFSLPVKDGGEPLSYGVTFPEQCYGNMEMLDSFLKDHSCFSGLERNKKSDLKWEEFAPRVEDYNHFLARAIAGGTGQIVKGIFLCSNAYTNQVQKGGETILNTAAEKNNGGMVTESMNHRSDATKNNATNDNLKRVRKLTNMTERLTKSLLDGVGIMSGSVMTPVLKSQPGQAFLNMLPGEVLLASLDAVNRVFEAAEAAEKQTFSATSQAATRMVSNRFGEEAGEATEHVFATAGHAVNTAWNVSKIRKAINPASSANAAGALRNSAKNRNVIY

SEQ ID NO: 59771 - protein, 378 aa, Glycine max
  peptide (1)..(378): Ceres Seq. ID no. 14303415
MGCNSSKAEPPPLENTMHHHHHADVAEFQKPKTLKEEVVLQIPGCKVHLMDQGEALELAQGHFTIMKIMEQNVALATIIKVGNSVQWPLTKDEPVVKVDALHYLFSLPVKDGGEPLSYGVTFPEQCYGNMEMLDSFLKDHSCFSGLERNKKSDLKWEEFAPRVEDYNHFLARAIAGGTGQIVKGIFLCSNAYTNQVQKGGETILNTAAEKNNGGMVTESMNHRSDATKNNATNDNLKRVRKLTNMTERLTKSLLDGVGIMSGSVMTPVLKSQPGQAFLNMLPGEVLLASLDAVNRVFEAAEAAEKQTFSATSQAATRMVSNRFGEEAGEATEHVFATAGHAVNTAWNVSKIRKAINPASSANAAGALRNSAKNRNVIY

SEQ ID NO: 59772 - protein, 362 aa, Glycine max
  peptide (1)..(362): Ceres Seq. ID no. 14303416
MHHHHHADVAEFQKPKTLKEEVVLQIPGCKVHLMDQGEALELAQGHFTIMKIMEQNVALATIIKVGNSVQWPLTKDEPVVKVDALHYLFSLPVKDGGEPLSYGVTFPEQCYGNMEMLDSFLKDHSCFSGLERNKKSDLKWEEFAPRVEDYNHFLARAIAGGTGQIVKGIFLCSNAYTNQVQKGGETILNTAAEKNNGGMVTESMNHRSDATKNNATNDNLKRVRKLTNMTERLTKSLLDGVGIMSGSVMTPVLKSQPGQAFLNMLPGEVLLASLDAVNRVFEAAEAAEKQTFSATSQAATRMVSNRFGEEAGEATEHVFATAGHAVNTAWNVSKIRKAINPASSANAAGALRNSAKNRNVIY

SEQ ID NO: 59773 - DNA, 1458 bp, Glycine max
  misc_feature (1)..(1458): Ceres Seq. ID no. 15172096
atatccgaagctactcacgagtctatgagtgtgaaggaaccagcctcacaagggagtgctcagcaggttgaggaagaagtgcagcaaaagttggttcctactgaggctggaaagaaaaagaaaaagaagaaagttcgtttgcccccaaatgatttgcagtggaaaaccccacatgactttggggctgagaactatatgatgaataatatgatgccaatggttccacctcctggctataattcgtactggaatggcatgcaacctatggatggatttatggcaccgtatggtaatccaatgcaaatgatgggttatggtctgggccccttggacatgccatttggtggtatgccacaagacccatttggcatgcaaggttacatgatgcctggtttcccgcctcatagggatcttgctgacttcagtatgggaatgaatgttccacctcctgtaatgagtagagaggagtttgaagcccggaaagctgatatgaggaggaagcgtgaaaatgatagacgtcctgaaagggacttctctaaagatcgagactttggtagggaagtgagcagtgttggggatgtttcttcaatgaaatcaaaaactaggtcaattccaccgtcctcgggtagcgattaccatcagccccgtttccgttcagagcgacactcacctgataggtctccgcgcgatgtggaacctccacctccacgcccaaccaagagaaagttagagcaccactccgatcgcgaacgcgaagacagggatcgcgactatgagcacgagcgccaccaccgccgtcaccgatcggaatcctcatccagaaggtcatcggaaccagtcgccaaaccttcatccaatgccgctgctgctgctgctgcagcagcagcagcagcagcggcagcagccgcggatcgcaagcagaaggccagcgtgttctcccgcataagctttcctgctgaagaggaacctcctaagaagagaaaagtcaccgcttcttccacaacggaaccagccgctaccgccgccgcacccagtgcctcttcggcacacctaaagacagtgtcgaacggttactacgaagggaggaagagtagcggcgtggcggactacgaatccagtgacgacgagcggcactttaaacggaggccgtcgaggtacgagccgtcgcctccgccgcagccggcggagtgggaggaggaagggaggcattcgagaggaacgagggagcgcaagcataggtgagtggcaattttgataggcagccaaggacgaaggaaacggacaccgagagacgaccagactcaacttgtctcttccgaaccttgaaataaacttcttgttctttgaaggaagggaatttcaatgtaactttgctgctgtgactgaatcccgtcaattttcaataatttctccatgtaaaattataactgttttattcaaatctaattaattgctacc

SEQ ID NO: 59774 - protein, 413 aa, Glycine max
  peptide (1)..(413): Ceres Seq. ID no. 15172097
ISEATHESMSVKEPASQGSAQQVEEEVQQKLVPTEAGKKKKKKKVRLPPNDLQWKTPHDFGAENYMMNNMMPMVPPPGYNSYWNGMQPMDGFMAPYGNPMQMMGYGLGPLDMPFGGMPQDPFGMQGYMMPGFPPHRDLADFSMGMNVPPPVMSREEFEARKADMRRKRENDRRPERDFSKDRDFGREVSSVGDVSSMKSKTRSIPPSSGSDYHQPRFRSERHSPDRSPRDVEPPPPRPTKRKLEHHSDREREDRDRDYEHERHHRRHRSESSSRRSSEPVAKPSSNAAAAAAAAAAAAAAAAADRKQKASVFSRISFPAEEEPPKKRKVTASSTTEPAATAAAPSASSAHLKTVSNGYYEGRKSSGVADYESSDDERHFKRRPSRYEPSPPPQPAEWEEEGRHSRGTRERKHR

SEQ ID NO: 59775 - protein, 405 aa, Glycine max
  peptide (1)..(405): Ceres Seq. ID no. 15172098
MSVKEPASQGSAQQVEEEVQQKLVPTEAGKKKKKKKVRLPPNDLQWKTPHDFGAENYMMNNMMPMVPPPGYNSYWNGMQPMDGFMAPYGNPMQMMGYGLGPLDMPFGGMPQDPFGMQGYMMPGFPPHRDLADFSMGMNVPPPVMSREEFEARKADMRRKRENDRRPERDFSKDRDFGREVSSVGDVSSMKSKTRSIPPSSGSDYHQPRFRSERHSPDRSPRDVEPPPPRPTKRKLEHHSDREREDRDRDYEHERHHRRHRSESSSRRSSEPVAKPSSNAAAAAAAAAAAAAAAAADRKQKASVFSRISFPAEEEPPKKRKVTASSTTEPAATAAAPSASSAHLKTVSNGYYEGRKSSGVADYESSDDERHFKRRPSRYEPSPPPQPAEWEEEGRHSRGTRERKHR

SEQ ID NO: 59776 - protein, 348 aa, Glycine max
  peptide (1)..(348): Ceres Seq. ID no. 15172099
MMNNMMPMVPPPGYNSYWNGMQPMDGFMAPYGNPMQMMGYGLGPLDMPFGGMPQDPFGMQGYMMPGFPPHRDLADFSMGMNVPPPVMSREEFEARKADMRRKRENDRRPERDFSKDRDFGREVSSVGDVSSMKSKTRSIPPSSGSDYHQPRFRSERHSPDRSPRDVEPPPPRPTKRKLEHHSDREREDRDRDYEHERHHRRHRSESSSRRSSEPVAKPSSNAAAAAAAAAAAAAAAAADRKQKASVFSRISFPAEEEPPKKRKVTASSTTEPAATAAAPSASSAHLKTVSNGYYEGRKSSGVADYESSDDERHFKRRPSRYEPSPPPQPAEWEEEGRHSRGTRERKHR

SEQ ID NO: 59777 - DNA, 904 bp, Glycine max
  misc_feature (1)..(904): Ceres Seq. ID no. 13639267
attctctgttttcttttaacatccgataaggatcggatctagctctcttcttattcgattcctctgtctcgtcgatcgaggaactaagcagtgatgggtgctggccggagatgggccgtcgatttctccgatcaatctaccgtcccatcttcccgggacatcctagatccacctggcttctctcgtgtttctcccgagcaggatgactcagcaacgagccgccaaaagaaagacgctgaagctaactggaaacttcagaaagcgtgggaagtagcgcagtcaccatttaagaatttgatgatgatgggtttcatgatgtggatggctggaaacactgttcatctctttagcattggtatcactttctctgctctttggcagcctctcagcgccctccagagcgttggaaaggtttttgagccattcaaggataacaaggtggaactacttatgcccaagctggtgtttcttgcccttaaccttggagggttagctttgggtatttggaagctcaacactttggggcttcttccaactcatgcatcagattgggtttcatctctaccccctcctcaggaggttgaacactctggcggaggatttgctttccactgatgagcatgtgtctctttgagataattacgaaagatacttaagtgatttgttcaatcctatatcatgaggggaagattcatgtggaccttctcatctcgtgatcttcttgtagcattttcaaaactctgaaaccatagcttttttcacttatggtgtgatgttcattgctcatcataactttgaattgtattattggcactgaaggaactttcccagcttttttatagacaggaatggataatgttacagactgaagtttggttcttaatttgcttgaaccatgactctg

SEQ ID NO: 59778 - protein, 173 aa, Glycine max
  peptide (1)..(173): Ceres Seq. ID no. 13639268
MGAGRRWAVDFSDQSTVPSSRDILDPPGFSRVSPEQDDSATSRQKKDAEANWKLQKAWEVAQSPFKNLMMMGFMMWMAGNTVHLFSIGITFSALWQPLSALQSVGKVFEPFKDNKVELLMPKLVFLALNLGGLALGIWKLNTLGLLPTHASDWVSSLPPPQEVEHSGGGFAFH

SEQ ID NO: 59779 - protein, 105 aa, Glycine max
  peptide (1)..(105): Ceres Seq. ID no. 13639269
MMMGFMMWMAGNTVHLFSIGITFSALWQPLSALQSVGKVFEPFKDNKVELLMPKLVFLALNLGGLALGIWKLNTLGLLPTHASDWVSSLPPPQEVEHSGGGFAFH

SEQ ID NO: 59780 - protein, 104 aa, Glycine max
  peptide (1)..(104): Ceres Seq. ID no. 13639270
MMGFMMWMAGNTVHLFSIGITFSALWQPLSALQSVGKVFEPFKDNKVELLMPKLVFLALNLGGLALGIWKLNTLGLLPTHASDWVSSLPPPQEVEHSGGGFAFH

SEQ ID NO: 59781 - DNA, 1032 bp, Glycine max
  misc_feature (1)..(1032): Ceres Seq. ID no. 13639317
taaccgcatcattcctcctcatccgtcggcgatcggcataaggcagcgctccaccccgttggcatacccagactaactcatcgcgtgccggatcagctccagccatggcgtcgatgcaggctcccgcgccggggccgtcagggtacccgccgcacggcggccaggccgcgcgcccgcagtccacggccgtcgccgtcacggcggccagcaacggcgccggaaacccctacgtgcaggtcaccccggccagcgcgtccccctccacctgccagtccatcatgaaggcgctggggcggtacggcaagctgctggaggacggcacccgcaaggccgccgacaccaccggcaacatctggaaccacctccggacggcgccgaacatggcggacgcggcggtggcgcggctggcgcaggggaccaaggtgtacgcggagggcgggcacgagagggtgttccatcaggtgttcggcgccgtgcccggggagcagctccgcaaggcctacgcctgctacctctccacctcatccggccccgtcatcggcacgctctacctctccacggggcgcctcgccttctgcagcgactcccccgtctcctaccacgccccctccggcagccagccgccggagcccatgtactacaaggtggtgcttccgctgaaccaggtgaggacggtgagcccgtccgccagcatgtggaggccgtcggagcggtacatccaggtggccaccaccgacaaccacgagttctggttcatgggcttcgtctcctacgacaaggcgctcaagcacctctccgacgccctgcagcgccgtccctgaccgatccccgtccgtccgtccgtctgcaccatcgcagctgctaggagtataagctccagttcttcggcagtggcactatcctgtcactgactgatcagtgtttgtactcttcattcctgtaccgcaactcgccccatcagcagttcttgctctggaataatttataagacaccaataaagctccgttgcctgccgtcggtatcaccaacct

SEQ ID NO: 59782 - protein, 238 aa, Glycine max
  peptide (1)..(238): Ceres Seq. ID no. 13639318
MASMQAPAPGPSGYPPHGGQAARPQSTAVAVTAASNGAGNPYVQVTPASASPSTCQSIMKALGRYGKLLEDGTRKAADTTGNIWNHLRTAPNMADAAVARLAQGTKVYAEGGHERVFHQVFGAVPGEQLRKAYACYLSTSSGPVIGTLYLSTGRLAFCSDSPVSYHAPSGSQPPEPMYYKVVLPLNQVRTVSPSASMWRPSERYIQVATTDNHEFWFMGFVSYDKALKHLSDALQRRP

SEQ ID NO: 59783 - protein, 235 aa, Glycine max
  peptide (1)..(235): Ceres Seq. ID no. 13639319
MQAPAPGPSGYPPHGGQAARPQSTAVAVTAASNGAGNPYVQVTPASASPSTCQSIMKALGRYGKLLEDGTRKAADTTGNIWNHLRTAPNMADAAVARLAQGTKVYAEGGHERVFHQVFGAVPGEQLRKAYACYLSTSSGPVIGTLYLSTGRLAFCSDSPVSYHAPSGSQPPEPMYYKVVLPLNQVRTVSPSASMWRPSERYIQVATTDNHEFWFMGFVSYDKALKHLSDALQRRP

SEQ ID NO: 59784 - protein, 180 aa, Glycine max
  peptide (1)..(180): Ceres Seq. ID no. 13639320
MKALGRYGKLLEDGTRKAADTTGNIWNHLRTAPNMADAAVARLAQGTKVYAEGGHERVFHQVFGAVPGEQLRKAYACYLSTSSGPVIGTLYLSTGRLAFCSDSPVSYHAPSGSQPPEPMYYKVVLPLNQVRTVSPSASMWRPSERYIQVATTDNHEFWFMGFVSYDKALKHLSDALQRRP

SEQ ID NO: 59785 - DNA, 551 bp, Glycine max
  misc_feature (1)..(551): Ceres Seq. ID no. 13595787
acacaaacacaaaacccacaagaccagaaaaaaaaaaacagagagtaaacatgagatctctcttcttactagccttgttcctagttcttgcttttcaccatggtgaagcagccgtgacttgcaacaacgtggttggtgatctttacccttgcctctcctacgtgatgcaaggcggaaacgctccatcaactaactgctgcaacggtgtcagaacgctcaacagtcaggctcaaaccactgcggatcgtcagagtgtttgtcgttgcatcaaaaatgctattggaggagcctcttactcttcaagcaaccttaacaatgctctgtctttgcctgctaagtgtggtgttaatctccctttcagtatcagcccttccaccaactgcaacagtatccactgaaataagcagaagatcctgaaggaagctactactactactacactactacaagaacttaggacatggcctggtagtagtaactacgttgttcagtgatgtatcttcatctctatgttcttcaaggttctaataaaaattacaacatgctatgag

SEQ ID NO: 59786 - protein, 131 aa, Glycine max
  peptide (1)..(131): Ceres Seq. ID no. 13595788
TNTKPTRPEKKKQRVNMRSLFLLALFLVLAFHHGEAAVTCNNVVGDLYPCLSYVMQGGNAPSTNCCNGVRTLNSQAQTTADRQSVCRCIKNAIGGASYSSSNLNNALSLPAKCGVNLPFSISPSTNCNSIH

SEQ ID NO: 59787 - protein, 115 aa, Glycine max
  peptide (1)..(115): Ceres Seq. ID no. 13595789
MRSLFLLALFLVLAFHHGEAAVTCNNVVGDLYPCLSYVMQGGNAPSTNCCNGVRTLNSQAQTTADRQSVCRCIKNAIGGASYSSSNLNNALSLPAKCGVNLPFSISPSTNCNSIH

SEQ ID NO: 59788 - protein, 77 aa, Glycine max
  peptide (1)..(77): Ceres Seq. ID no. 13595790
MQGGNAPSTNCCNGVRTLNSQAQTTADRQSVCRCIKNAIGGASYSSSNLNNALSLPAKCGVNLPFSISPSTNCNSIH

SEQ ID NO: 59789 - DNA, 972 bp, Glycine max
  misc_feature (1)..(972): Ceres Seq. ID no. 14302529
accctctcggtctctagggttttgggactttagcctcctgcgccgccgccgccgccgcccagcgaattcgacaagcccccgagctcgccggatccgatggccgtcacgttctccgacctccacaccgccgacgggctcaaggccctcgaggcgcacctcgccggcaagacctacatctccggcgatgggatcaccaaggacgacgtcaaggtgttcgcggcggtgcccgtgaagcccagcgccgagttcccgaacgctgcccgctggtacgacaccgtcgccgcggctgttgcttcaaggttccctggccagtcctctggggtgagtgcatcatcggctcctgctgcagctgctcctgccgcttccaaggatgaagatgacgatgatgacatggatctgtttggcgatgagaccgaggaggacaagaaagctgcagctgagcgtgaggctgccaagcctgcaaagaagaaagaaagtggcaaatcctccgtcctcatggacatcaagccatgggacgatgagactgacatgaagaagttggaggaggctgtccgcagtgttcaaatggagggtctcacctggggtgcatataagcttatgcctgtgggttatggcatcaagaagctccagatcatgctgacgatcatcgatgaccttgtgtccgtcgacactcttattgaggaagtgctttgcgaggcgcccatcaacgaatatgtccagtcgtgtgacatcgttgccttcaacaagatctagaatctttgttctcccacctgctggattcttggtactgggattggtcgatctggaaaacattatgtcgtcccatttagttacccctcttacagaaatgctactggttttgtttttgagtgatgccctggtcttgaatgtctgctacctttaaatagttgaactgctgagcggtttgtaatggcgaaacatctatcatgtggagtaaaatcagtctttgat

SEQ ID NO: 59790 - protein, 218 aa, Glycine max
  peptide (1)..(218): Ceres Seq. ID no. 14302530
MAVTFSDLHTADGLKALEAHLAGKTYISGDGITKDDVKVFAAVPVKPSAEFPNAARWYDTVAAAVASRFPGQSSGVSASSAPAAAAPAASKDEDDDDDMDLFGDETEEDKKAAAEREAAKPAKKKESGKSSVLMDIKPWDDETDMKKLEEAVRSVQMEGLTWGAYKLMPVGYGIKKLQIMLTIIDDLVSVDTLIEEVLCEAPINEYVQSCDIVAFNKI

SEQ ID NO: 59791 - protein, 120 aa, Glycine max
  peptide (1)..(120): Ceres Seq. ID no. 14302531
MDLFGDETEEDKKAAAEREAAKPAKKKESGKSSVLMDIKPWDDETDMKKLEEAVRSVQMEGLTWGAYKLMPVGYGIKKLQIMLTIIDDLVSVDTLIEEVLCEAPINEYVQSCDIVAFNKI

SEQ ID NO: 59792 - DNA, 1000 bp, Glycine max
  misc_feature (1)..(1000): Ceres Seq. ID no. 13595464
agttttaccgttgttgttggcaatgaaaaaatcatcatcagcttcaaaaggtgcagcagccaatgatggagttattaagggaggaagcatagattgggagctaagacctggtggcatgcttgttcagaagagacaaccccttgattcctcttctagttccatgatcaaaatcaaggtctctcatggttcttaccaccatgaggtcactgttcctgcacaatccacttttgggcatctaaaaatggtgcttacatccgagactggtcttgagcctaaagagcaaaggttactatttagagggaaagagaaagaggatgaggaatgcttgcatatggtgggagtgaaagacatgtctaaggttatattgctagaggatccagccagcaaagagagaaagcttgaggagatgcataagagtgaagatatctcaaaggcatgtgaagccatctccaaagtcagaacagaagttgacaagctatatcaaaaggtggttgctttggagacaactgtttgtggtggtgctaaggttgaagacaaagaatttgctatcttgacagaattgctaatggttcaattgcttaaactggattccattgctgctgagggagaagccaaagggcagagaagagttgaggttcgtcgtgtacagagttatgtggacacaattgacaacctgaaggcaagaaattttgctgcatttagcaatgctggtaacaatgcagtccctgtgatttgggaggccttggaatccggagttggaagcttgaagtcaccaacttcatttccaacatctacagtgattactcaaaactgggagcactttgaataaatacaagttaatccttccactttatttatagaagaggcttctatgatgacacttggttttttgtaatgacaagctgtttttggtagggaagggttatgcttgtacaaaattaatacatgtacatgttacttctctatgtccaaataaacactgattttgccttgtgtgttc

SEQ ID NO: 59793 - protein, 275 aa, Glycine max
  peptide (1)..(275): Ceres Seq. ID no. 13595465
VLPLLLAMKKSSSASKGAAANDGVIKGGSIDWELRPGGMLVQKRQPLDSSSSSMIKIKVSHGSYHHEVTVPAQSTFGHLKMVLTSETGLEPKEQRLLFRGKEKEDEECLHMVGVKDMSKVILLEDPASKERKLEEMHKSEDISKACEAISKVRTEVDKLYQKVVALETTVCGGAKVEDKEFAILTELLMVQLLKLDSIAAEGEAKGQRRVEVRRVQSYVDTIDNLKARNFAAFSNAGNNAVPVIWEALESGVGSLKSPTSFPTSTVITQNWEHFE

SEQ ID NO: 59794 - protein, 268 aa, Glycine max
  peptide (1)..(268): Ceres Seq. ID no. 13595466
MKKSSSASKGAAANDGVIKGGSIDWELRPGGMLVQKRQPLDSSSSSMIKIKVSHGSYHHEVTVPAQSTFGHLKMVLTSETGLEPKEQRLLFRGKEKEDEECLHMVGVKDMSKVILLEDPASKERKLEEMHKSEDISKACEAISKVRTEVDKLYQKVVALETTVCGGAKVEDKEFAILTELLMVQLLKLDSIAAEGEAKGQRRVEVRRVQSYVDTIDNLKARNFAAFSNAGNNAVPVIWEALESGVGSLKSPTSFPTSTVITQNWEHFE

SEQ ID NO: 59795 - protein, 237 aa, Glycine max
  peptide (1)..(237): Ceres Seq. ID no. 13595467
MLVQKRQPLDSSSSSMIKIKVSHGSYHHEVTVPAQSTFGHLKMVLTSETGLEPKEQRLLFRGKEKEDEECLHMVGVKDMSKVILLEDPASKERKLEEMHKSEDISKACEAISKVRTEVDKLYQKVVALETTVCGGAKVEDKEFAILTELLMVQLLKLDSIAAEGEAKGQRRVEVRRVQSYVDTIDNLKARNFAAFSNAGNNAVPVIWEALESGVGSLKSPTSFPTSTVITQNWEHFE

SEQ ID NO: 59796 - DNA, 1153 bp, Glycine max
  misc_feature (1)..(1153): Ceres Seq. ID no. 13595812
cattacctagaacatcctaatcvaaaaaagtcaatcvagtcaatcctaaaatcacaatacccgaccacaaggtcttttttttctctgtggcggcatcattggcaatggttaaaagttaaaacttcaacacacagaatccagattcgtcgagaaagagaaaagagaaaagaagaatgggcgattaccatttcgtgtacaaggatttagaaggggcttctactcaatgggacgatattcaaagaaagctcggaaatttgcctccaaaggcacccgctttcaagcccccacctttcacccctgcctctgatgatcaacccaaagacaaaacatggatcgattccaaaacctccgaggaactcgaagacctcgaagacaacctcgatgatgatcgcttcctccaagaatacaggaagaagaggctggctgagatgcaagaggcagcaaaagtattgaggtttggatctgtgattcccatttcgggatctgatttcgttcgagaggtgtcacaagctccatctgatgtttgggtggttgtcatcctatacaaagaagggattcctgaatgtgggttgttgatgcaaagcattgaagaattggcactaagatatccttcaacaaaatttgtgaagataatatctactgattgcataccgaactacccggatcggaatcttcccactttgttggtgtacaacaatggagcagtcaaaggaaattatgtgggtttgcatagtttcgggcgaagatgcactcctgaaggtgttgcattagtgttgtgccaatcagatcctgtacttaatgatggccataatggaaatgaggctatcattgaaggagtccgcaaacggtttatagagaaagttgttgctgatcatgaagagggtggtgatgatgattactctagcgattaacattttttcttgtatttgttgtgttgctttctttggagggggtatgcttttctaactttcttttggtctcacttttataattttgcctaaaaaaaagagtaacggatctgttattaaatacttaaattatgcgtgtgtgtttmwacacaataaaggcttttcnngttcctagtaattagatggttttatcaggtattatgtktawacamartgattttattgtttaaacacaataaagtggg

SEQ ID NO: 59797 - protein, 245 aa, Glycine max
  peptide (1)..(245): Ceres Seq. ID no. 15221665
MGDYHFVYKDLEGASTQWDDIQRKLGNLPPKAPAFKPPPFTPASDDQPKDKTWIDSKTSEELEDLEDNLDDDRFLQEYRKKRLAEMQEAAKVLRFGSVIPISGSDFVREVSQAPSDVWVVVILYKEGIPECGLLMQSIEELALRYPSTKFVKIISTDCIPNYPDRNLPTLLVYNNGAVKGNYVGLHSFGRRCTPEGVALVLCQSDPVLNDGHNGNEAIIEGVRKRFIEKVVADHEEGGDDDYSSD

SEQ ID NO: 59798 - protein, 160 aa, Glycine max
  peptide (1)..(160): Ceres Seq. ID no. 15221666
MQEAAKVLRFGSVIPISGSDFVREVSQAPSDVWVVVILYKEGIPECGLLMQSIEELALRYPSTKFVKIISTDCIPNYPDRNLPTLLVYNNGAVKGNYVGLHSFGRRCTPEGVALVLCQSDPVLNDGHNGNEAIIEGVRKRFIEKVVADHEEGGDDDYSSD

SEQ ID NO: 59799 - DNA, 742 bp, Glycine max
  misc_feature (1)..(742): Ceres Seq. ID no. 13582260
agcttgggaggaaataatatcatttccgttctcaaaatcataacagtacttcgcgtgccctagctcactccgtcgctcctcacccttccggcagtgcttggtcgtggccgtcacggttcaaacttcaaaagcatttgttgtgttggagtaggctatggatgacttgtttgattcttcgctgaacttggaggacacccattacaaggaaggctatgacgaaggctacagccatggccttgtcactggcaaggaagaagctaggcaggttggcctcaaggttggctttgaggttggcgaggagcttggtttctataggggttgtgtcgaaatctggacttctgcgatccggctcgacccaacctgtttctctccacgggctaaaacatttatttgccagatggaggagttgatccagaaataccctctcatggatccagaaaatgcacaagtgcaagagatcatggatagcctcaggctcaagttcaagatggtttgttcttccttgcatgtcaaacttgagtataatgggtatcccaaatcttctacggaggtcaatgatattcaattctgagctagttatgatattttcagtctttagggatatccatgtgtagggaacctctgagttgggttagttgatgaacaaattacgtgttatcattttacaaacatttgtgcaagtcaatgtatcgaataattattttatattaaaaatgatgatatatacattgtttatgaacgt

SEQ ID NO: 59800 - protein, 138 aa, Glycine max
  peptide (1)..(138): Ceres Seq. ID no. 13582261
MDDLFDSSLNLEDTHYKEGYDEGYSHGLVTGKEEARQVGLKVGFEVGEELGFYRGCVEIWTSAIRLDPTCFSPRAKTFICQMEELIQKYPLMDPENAQVQEIMDSLRLKFKMVCSSLHVKLEYNGYPKSSTEVNDIQF

SEQ ID NO: 59801 - DNA, 840 bp, Glycine max
  misc_feature (1)..(840): Ceres Seq. ID no. 13639278
acaattcccaggaagaacgtttcaattctaatcagtagttaaacttttccctacaccaaaatcatctcttcactaatggaaggtggactaaagggaagctcattacaagatatgaagcttttgtttgttgaaatgggtgttggctatgaccttcatggtcaggacataacagctgccgcaatgagagcatgcagagatgcaatttctgccaattcaattccagctttccgtaaaggtagcatccctggtgttacatctgatcacatgaaattacatgtcaaactgggggtgcctcatcctctgcaacaaaacttgaacaaggataaaattaagtctgtgtttccatacggacaaatcatgaactttgaagtagtggatggtggacttgtgtgctcaactgaagaaatggccgaaaagaacgatgactgctacattgttaatgctgctgtatatgttggctactaggcttttggtatcttagatccctctggaatcttaatttccatggggaacttgcatgtgtgttggagttttgttgcttcagtaaagctgcaatgagggcaaagtttgcattttagcttttttatatgtattttaattaagagtagttgtgttatcctttcattgtttctgcacgaatgtacctagtacttttgtcagttaggttgaatttactatgtttgtttgtaataatggatcaaagatcatctgaagttcatttttgaactgcatacttctcaaccattgatgtatactttaccttaaacaaaatattaatagaaaaataaaataaattaatgtagggtgaaagcttaaactgcacccctgctgttagttttc

SEQ ID NO: 59802 - protein, 129 aa, Glycine max
  peptide (1)..(129): Ceres Seq. ID no. 13639279
MEGGLKGSSLQDMKLLFVEMGVGYDLHGQDITAAAMRACRDAISANSIPAFRKGSIPGVTSDHMKLHVKLGVPHPLQQNLNKDKIKSVFPYGQIMNFEVVDGGLVCSTEEMAEKNDDCYIVNAAVYVGY

SEQ ID NO: 59803 - protein, 117 aa, Glycine max
  peptide (1)..(117): Ceres Seq. ID no. 13639280
MKLLFVEMGVGYDLHGQDITAAAMRACRDAISANSIPAFRKGSIPGVTSDHMKLHVKLGVPHPLQQNLNKDKIKSVFPYGQIMNFEVVDGGLVCSTEEMAEKNDDCYIVNAAVYVGY

SEQ ID NO: 59804 - protein, 110 aa, Glycine max
  peptide (1)..(110): Ceres Seq. ID no. 13639281
MGVGYDLHGQDITAAAMRACRDAISANSIPAFRKGSIPGVTSDHMKLHVKLGVPHPLQQNLNKDKIKSVFPYGQIMNFEVVDGGLVCSTEEMAEKNDDCYIVNAAVYVGY

SEQ ID NO: 59805 - DNA, 755 bp, Glycine max
  misc_feature (1)..(755): Ceres Seq. ID no. 12610554
aagttctatagtgttcaaaaagtgtaacaatggctcctagttccacattgcaattcccaattctcttgggtcttctcttaatttcatttctgggtgttgaaggggtacttcccccatcatgcaatcgctatgagtgccccaactataatgtcaaatatgtaggcaaaaactttgaaatccgtcgttataattcacctgtgtggatttcaaatctggctgttcaagacccttctttggttggagctacaagatctggcttcaaaagactatttagttatatttatggtaacaacaactataagaaggaaatgaacatgacaacgcctgtgatcagtgaagtatcaattaatggtggaaattcctcaattgttgtgagcttctatgtgccgaaagtgaaccaagcagacccacctttggcaaatggtctctatgttcagagatggaaaactatagatgtagcagtaagacaatttggtggatttgtcaaagattctaatattgggttgcaagtgtcggccttgaacgatagtcttaccggcactacatggtccgctattgttaagaataagtacattgtggcacagtacaattccccttttgaattgtacaatagagtgaatgagatatggtttttttatgaatgataatgatatgcaagtggaatatgctagacaagattgactcatcttgttatcaacttaaatcagtgaattatatcatatataaatgaacaaattgttgcaataaaaaaaaaa

SEQ ID NO: 59806 - protein, 204 aa, Glycine max
  peptide (1)..(204): Ceres Seq. ID no. 12610555
MAPSSTLQFPILLGLLLISFLGVEGVLPPSCNRYECPNYNVKYVGKNFEIRRYNSPVWISNLAVQDPSLVGATRSGFKRLFSYIYGNNNYKKEMNMTTPVISEVSINGGNSSIVVSFYVPKVNQADPPLANGLYVQRWKTIDVAVRQFGGFVKDSNIGLQVSALNDSLTGTTWSAIVKNKYIVAQYNSPFELYNRVNEIWFFYE

SEQ ID NO: 59807 - protein, 111 aa, Glycine max
  peptide (1)..(111): Ceres Seq. ID no. 12610556
MNMTTPVISEVSINGGNSSIVVSFYVPKVNQADPPLANGLYVQRWKTIDVAVRQFGGFVKDSNIGLQVSALNDSLTGTTWSAIVKNKYIVAQYNSPFELYNRVNEIWFFYE

SEQ ID NO: 59808 - protein, 109 aa, Glycine max
  peptide (1)..(109): Ceres Seq. ID no. 12610557
MTTPVISEVSINGGNSSIVVSFYVPKVNQADPPLANGLYVQRWKTIDVAVRQFGGFVKDSNIGLQVSALNDSLTGTTWSAIVKNKYIVAQYNSPFELYNRVNEIWFFYE

SEQ ID NO: 59809 - DNA, 778 bp, Glycine max
  misc_feature (1)..(778): Ceres Seq. ID no. 12611396
cccctcgtcgctgcgtctctctcccgcaaccttatagattcgtttttattcccatcgatcggagagagagagaataattcaataagcgaccatgttggtgtacactgatcttctcaccggtgatgagcttctctctgactctttcccttacaaggagattgagaatggtattctttgggaagttgaaggaaagtggactacccagggatgtgtagaggttaacattggtgccaacccctctgctgaagaaggtggtgaggacgagggtgttgacgactctgttcaaaaggttgttgacattgtcgacaccttcaggctccaggagcaaccgacctacgacaagaaggggttcatcgcctatatcaaaaagtacatcaagcttttgacccccaagctcaacgccgaagatcaagaagctttcaagaagggtattgagggagctaccaagtacttgctccctaagctcaaggacttccaattctttgttggggagagcatgcacgatgacagcactgtggtctttgcttactacaaggagggtgctactaacccaacatttttgtacttcggacatggtttgaaggaggtcaagtgctgattgagagaagctctcgtgtggtcggtcgcagcgactctattaagtctatgtctctttatattgttatgtgtttcttccccaccattttacttttctttctacttctcatctctgttgcaaaattctcaagttattaatccgaaaacaatggtttgttagttgaattttggttcgtccttt

SEQ ID NO: 59810 - protein, 168 aa, Glycine max
  peptide (1)..(168): Ceres Seq. ID no. 12611397
MLVYTDLLTGDELLSDSFPYKEIENGILWEVEGKWTTQGCVEVNIGANPSAEEGGEDEGVDDSVQKVVDIVDTFRLQEQPTYDKKGFIAYIKKYIKLLTPKLNAEDQEAFKKGIEGATKYLLPKLKDFQFFVGESMHDDSTVVFAYYKEGATNPTFLYFGHGLKEVKC

SEQ ID NO: 59811 - DNA, 1645 bp, Glycine max
  misc_feature (1)..(1645): Ceres Seq. ID no. 13639022
aaaatagaagaaaggattatcagagtcgcattgtcgattcagagaaaaaaaaattgaattcaatctgatagatcctatcacagcaaaaaaaattggattgaataaggtgtttccgatttcaaaaacaatcacacaaatggttaataaaagttaggtttcttaatttctgcttcttattacatcatcttaaatctttggttttggatccatccaataatcatggagagcataataagcaagctccgcaacctagacgcctaccctaaaatcaacgaggatttctacagccgcacgctctccggcggtgtcatcactctcgcttcctccattctcatgctcttgctcttctactccgagctccggttgtatcttcacgctgtcaccgagaccaagcttgtcgtcgacacttccagagccgaaacgctgcgtatcaattttgatgttacgtttcctgcgcttccatgttccatactcagtcttgatgccatggacatcagcggagagcagcgtctagatgttaaacacgatataatcaagaagagattagactctcgtggcaatgtgatagaaacaaggcaagaaggaattggtgctcccaagattgaaaagccattgcagaggcatggaggcaggctcgagcacaatgagacttattgtggttcctgttatggttctgaagtgtcagatgatgattgttgtaattcctgtgaggatgttcgtgaagcataccgtaagaaaggttgggcactttcaaatcctgatttaattgaccagtgcaaaagagaaggattcttacaaagaatcaaggatgaagaaggtgaaggatgcaatgtgtatggtttcttggaagtaaataaggttgcagggaattttcattttgcacctgggaaaagctttcagcaatctggtgtacatgtacatgacctgctggcttttcaaaaggattcttttaatttaagtcaccacatcaacagattaactttcggagagtatttccctggtgttgttaatcctcttgacaacgtgcattggacacaagaaacaccaagtgggatgtaccagtattttattaaggttgtgcctacagtatacactgatgtgagtgggcatactatccagtcaaaccagttctctgttacagaacacttcaggactggagacatgggccgtctgcagtcccttcccggagttttctttttctatgacctctctccaattaaggttacttttacggaagaaaatgtctcattcttacattttcttactaatgtttgtgccatagttggaggtattttcaccgtttctggaatactagattcattcatctatcacggtcaaagggctatcaagaagaagatggaacttggtaaatttaactgatgggtgctatttgagtaatttcgagcgaatggctctccagagacaatctattcaagagaaggtcaactactgattgaaattccccttggggttctgagttcttcggttacaacaaaaggattttgcccttagatcaaggttgaaatgcctagatatcatgtgcaacaaatgctactttgccttgattcatatcttttctgacagctctgatgttgtgaatgttatgtgttttatggaaagtagaggggcttttccttgcagaagc

SEQ ID NO: 59812 - protein, 386 aa, Glycine max
  peptide (1)..(386): Ceres Seq. ID no. 13639023
MESIISKLRNLDAYPKINEDFYSRTLSGGVITLASSILMLLLFYSELRLYLHAVTETKLVVDTSRAETLRINFDVTFPALPCSILSLDAMDISGEQRLDVKHDIIKKRLDSRGNVIETRQEGIGAPKIEKPLQRHGGRLEHNETYCGSCYGSEVSDDDCCNSCEDVREAYRKKGWALSNPDLIDQCKREGFLQRIKDEEGEGCNVYGFLEVNKVAGNFHFAPGKSFQQSGVHVHDLLAFQKDSFNLSHHINRLTFGEYFPGVVNPLDNVHWTQETPSGMYQYFIKVVPTVYTDVSGHTIQSNQFSVTEHFRTGDMGRLQSLPGVFFFYDLSPIKVTFTEENVSFLHFLTNVCAIVGGIFTVSGILDSFIYHGQRAIKKKMELGKFN

SEQ ID NO: 59813 - protein, 348 aa, Glycine max
  peptide (1)..(348): Ceres Seq. ID no. 13639024
MLLLFYSELRLYLHAVTETKLVVDTSRAETLRINFDVTFPALPCSILSLDAMDISGEQRLDVKHDIIKKRLDSRGNVIETRQEGIGAPKIEKPLQRHGGRLEHNETYCGSCYGSEVSDDDCCNSCEDVREAYRKKGWALSNPDLIDQCKREGFLQRIKDEEGEGCNVYGFLEVNKVAGNFHFAPGKSFQQSGVHVHDLLAFQKDSFNLSHHINRLTFGEYFPGVVNPLDNVHWTQETPSGMYQYFIKVVPTVYTDVSGHTIQSNQFSVTEHFRTGDMGRLQSLPGVFFFYDLSPIKVTFTEENVSFLHFLTNVCAIVGGIFTVSGILDSFIYHGQRAIKKKMELGKFN

SEQ ID NO: 59814 - protein, 297 aa, Glycine max
  peptide (1)..(297): Ceres Seq. ID no. 13639025
MDISGEQRLDVKHDIIKKRLDSRGNVIETRQEGIGAPKIEKPLQRHGGRLEHNETYCGSCYGSEVSDDDCCNSCEDVREAYRKKGWALSNPDLIDQCKREGFLQRIKDEEGEGCNVYGFLEVNKVAGNFHFAPGKSFQQSGVHVHDLLAFQKDSFNLSHHINRLTFGEYFPGVVNPLDNVHWTQETPSGMYQYFIKVVPTVYTDVSGHTIQSNQFSVTEHFRTGDMGRLQSLPGVFFFYDLSPIKVTFTEENVSFLHFLTNVCAIVGGIFTVSGILDSFIYHGQRAIKKKMELGKFN

SEQ ID NO: 59815 - DNA, 1503 bp, Glycine max
  misc_feature (1)..(1503): Ceres Seq. ID no. 13595199
ctccattcgatccgaacccatccgattcggaagagaggtactcacttgccccaaccaatcgaagcagggcgagctcgactttgcggcgctaattcgtcggcagctagtatcccgcgctgtgtgtttccctcgttcgtgttcaggtggtgatgccgcttgtggaatcgcctcaatggcgccggaaggccaccgatttcttctcttcatctagcttcaagctgaagcaggcagggcaatctgcaggggataatatagctgatgttgccgggaaggttggaacagtggtgaagagtcggtgggctatcttccaggatgctagacagcgaccgccaccaccaggagatactgtgcaggagcgcttcatctctgctgctgccaacactggagtgattctgaggaagggcatttcagagacaaaggagaaggtcgcggtgggaaaggtcaaagttgaagaggctgccaaaaaaactgcggacaaaagcaaaactattttgaacaatattgaacgctggcagaagggagttgcgagcaatgacgtttttggtgttcctgttgaagccactgtacaacgggagcaatatggtaaagctgtgcctctgatactggtgaggtgtgcagaccacttggttatatcaggcttgagtaatgagtgcttgttcaaatctgaaggtgacagaaaagttcttcagcaactagtttcactttacaatgaggattcgggtgcatctttgcctgatggtgttagccctcttgatgtagctgcactgatcaagtgctaccttgccagcatccccgaaccgcttacaacatttgctctttatgatgagcttaaagacgcgagggttagcattgatgatcttaagaacatactgaagaagcttccaaatgtgaactacatgacactagaatttgttacagcattgctactgagagtaagccgtaaatcagcactcaacaagatggactctcgtacccttgctgtggagttcgcacctttgatcatatggcagcaaggggattctggaacagatttacggaatcatctcagattcacactgaaaccacctccaaaaattgtggacgcgacgacaagtaccactacatgggacttgctagatgaggatgatgtggatgcttcgtcgcaaatccccttggacgatggttcgcctctagactatggtgctattgaggtgattcaatgcttaattgagcatcacaatcccatattcacggatgcaaacgagactgtatggagatgacctgacctggccggctcctctttagatttctgtggtatttagctcgtgctatgtacaagttccaggtagtaggatggagtggagtgccgcgaataagtctagtcttggggaagcattttggtccaaacttttttttgtgggagtaaaagttggaactgtatatattaattgtccacatgacagagttgtcttgtgggatttgcctcgacatggctcgtcaataatgtaccatgattcttgtgct

SEQ ID NO: 59816 - protein, 369 aa, Glycine max
  peptide (1)..(369): Ceres Seq. ID no. 13595200
MPLVESPQWRRKATDFFSSSSFKLKQAGQSAGDNIADVAGKVGTVVKSRWAIFQDARQRPPPPGDTVQERFISAAANTGVILRKGISETKEKVAVGKVKVEEAAKKTADKSKTILNNIERWQKGVASNDVFGVPVEATVQREQYGKAVPLILVRCADHLVISGLSNECLFKSEGDRKVLQQLVSLYNEDSGASLPDGVSPLDVAALIKCYLASIPEPLTTFALYDELKDARVSIDDLKNILKKLPNVNYMTLEFVTALLLRVSRKSALNKMDSRTLAVEFAPLIIWQQGDSGTDLRNHLRFTLKPPPKIVDATTSTTTWDLLDEDDVDASSQIPLDDGSPLDYGAIEVIQCLIEHHNPIFTDANETVWR

SEQ ID NO: 59817 - DNA, 1699 bp, Glycine max
  misc_feature (1)..(1699): Ceres Seq. ID no. 13582285
acttttgttgtctaacatggctttggtgaatccgtttctgtgtaccactcgaacgtccctccctctgcgagtttcaggtccaccaaaccaagtcctaccacgttggactctctgctcccaatattcattcaaaacatcatcactaagatcgaagcaactcaggtgtggcgccactgcagacatcaaagcagatcacgcggttcttgtgggccccaccagcgaggaggagagaaaaggggactatgactggacacaggaatggtaccctttgtatctcactcagaatgtgcccgaagatgcacctttgggtctcagagtgtttgataaacagctcgtgttgttcaaggatggcaatggccagtttcgctgttacgaagatcgctgcccccacaggttagcgaaactatctgagggacagttgattgatggaaggctcgagtgtctataccatggatggcaatttgaaggggagggaaaatgtgtgaagatacctcagcttccagctgatgccaaaatcccaagggctgcttgtgttaaaacatatgaagtgagggactctcaaggtgttatttgggtatggatgtccctcaagacacctccaaatgtcagtaaattaccttggtttgagaacttcgcaaggccggggtttcaagatgtttcgacaattcacgaactcccttatgatcactctattcttctggagaacctgatggatcctgctcatatcccaatctcccatgacagaacagattggactgcgaaaagggaggatgctcagccgctgtgttttgaggtgaccgaacgaacagatagagggtttgcaggttggtggggcagagagaaagatggatccatgcctaacttcttgcggtttgaggctccttgtgttctacaaaacaacagggaaattgttgataagaatggtgaaataaactacttcagtggcctgttcctttgtagaccaaccgggcaagggaaatccatgctgatagttaggtttggaggaacaaaaagatctccactagcaaaagtgtttcctaagtggtacttccatcagaatgcaagcaaggtgtttgagcaagacatgggattcttgtcatcacaaaatgaaattcttctgagagaaaaggttccaacaaaggaactatacctgaatctgaaatcatcagacacatgggttgctgaatacaggaagtggatggacaaagcggggcatggaatgccatatcattttggtcacagcactatctctttgcctaaagagcctgctgtggttgaacacgcacctgctggactagtcgcaggacaatcagcttcctcaccaaccaaggggggcattggaacaatgcatgcccctaattttgccaacagatattttaggcatgtgattcattgcaaaggatgtagaaccgtcgtcaaagctttcgaagcttggaaaaatgctctttcagctgtggcaattgcattaactgcgttggcaattctgctttctgggagacaatggaaggtccttctcttggcatctgcagctctctgctctgttggagtctatgcttgctcaaccgccattgcaatgaatacaacaaattttattaggacacataggagattgtgagtgactggttgtaaaaatagttgttcaaatgaatactaaacagtttgtctaatgactaattagttgttacagattgtgtttggc

SEQ ID NO: 59818 - protein, 537 aa, Glycine max
  peptide (1)..(537): Ceres Seq. ID no. 13582286
LLLSNMALVNPFLCTTRTSLPLRVSGPPNQVLPRWTLCSQYSFKTSSLRSKQLRCGATADIKADHAVLVGPTSEEERKGDYDWTQEWYPLYLTQNVPEDAPLGLRVFDKQLVLFKDGNGQFRCYEDRCPHRLAKLSEGQLIDGRLECLYHGWQFEGEGKCVKIPQLPADAKIPRAACVKTYEVRDSQGVIWVWMSLKTPPNVSKLPWFENFARPGFQDVSTIHELPYDHSILLENLMDPAHIPISHDRTDWTAKREDAQPLCFEVTERTDRGFAGWWGREKDGSMPNFLRFEAPCVLQNNREIVDKNGEINYFSGLFLCRPTGQGKSMLIVRFGGTKRSPLAKVFPKWYFHQNASKVFEQDMGFLSSQNEILLREKVPTKELYLNLKSSDTWVAEYRKWMDKAGHGMPYHFGHSTISLPKEPAVVEHAPAGLVAGQSASSPTKGGIGTMHAPNFANRYFRHVIHCKGCRTVVKAFEAWKNALSAVAIALTALAILLSGRQWKVLLLASAALCSVGVYACSTAIAMNTTNFIRTHRRL

SEQ ID NO: 59819 - protein, 532 aa, Glycine max
  peptide (1)..(532): Ceres Seq. ID no. 13582287
MALVNPFLCTTRTSLPLRVSGPPNQVLPRWTLCSQYSFKTSSLRSKQLRCGATADIKADHAVLVGPTSEEERKGDYDWTQEWYPLYLTQNVPEDAPLGLRVFDKQLVLFKDGNGQFRCYEDRCPHRLAKLSEGQLIDGRLECLYHGWQFEGEGKCVKIPQLPADAKIPRAACVKTYEVRDSQGVIWVWMSLKTPPNVSKLPWFENFARPGFQDVSTIHELPYDHSILLENLMDPAHIPISHDRTDWTAKREDAQPLCFEVTERTDRGFAGWWGREKDGSMPNFLRFEAPCVLQNNREIVDKNGEINYFSGLFLCRPTGQGKSMLIVRFGGTKRSPLAKVFPKWYFHQNASKVFEQDMGFLSSQNEILLREKVPTKELYLNLKSSDTWVAEYRKWMDKAGHGMPYHFGHSTISLPKEPAVVEHAPAGLVAGQSASSPTKGGIGTMHAPNFANRYFRHVIHCKGCRTVVKAFEAWKNALSAVAIALTALAILLSGRQWKVLLLASAALCSVGVYACSTAIAMNTTNFIRTHRRL

SEQ ID NO: 59820 - protein, 344 aa, Glycine max
  peptide (1)..(344): Ceres Seq. ID no. 13582288
MSLKTPPNVSKLPWFENFARPGFQDVSTIHELPYDHSILLENLMDPAHIPISHDRTDWTAKREDAQPLCFEVTERTDRGFAGWWGREKDGSMPNFLRFEAPCVLQNNREIVDKNGEINYFSGLFLCRPTGQGKSMLIVRFGGTKRSPLAKVFPKWYFHQNASKVFEQDMGFLSSQNEILLREKVPTKELYLNLKSSDTWVAEYRKWMDKAGHGMPYHFGHSTISLPKEPAVVEHAPAGLVAGQSASSPTKGGIGTMHAPNFANRYFRHVIHCKGCRTVVKAFEAWKNALSAVAIALTALAILLSGRQWKVLLLASAALCSVGVYACSTAIAMNTTNFIRTHRRL

SEQ ID NO: 59821 - DNA, 1089 bp, Glycine max
  misc_feature (1)..(1089): Ceres Seq. ID no. 12611159
ctcccattcttctcgtgtgtcctcctccatatcgctctttttttttctttatttctttttactctttctctaacacttgcttattatatatatcatccccacctaggttcttccgtttttgtagctggggtttataccctttgaggtttgaaaggaaatccaagcaaaggtagaaagaatgaggaagcctagttgtgatatcaaagaattgaacaaaggagcttggtccaaacaagaagaccagaaactcgtagattatatcaagaaacatggtgaagtttgttggcgtacactcccccaggctgcaggtttacatcggtgtggtaaaagttgtaggctgagatggataaactatctacgtccagacctcaaaagaggcaactttgctgaagatgaagaagatctcatcatcaagcttcatgccctgctaggcaaccggtggtcactaatagctgggagattgcctggacgtacagataatgaagtgaagaattattggaattctcatataagaaaaaagcttattagcaatggcattgacccaaataatcatagattaaaccatacaatcccttccgtttatcagaatccacctatgtctgatgatagttcaaaacactttggcatgaaagacaataatagcaagaacgagacaagcaaatcacctcgtgtttacaaccatggtgaagtctcagatgctgcgagtggtgaggctgagtcatcatgtgcattgccagatttaaaccttgatctctctatttgcgaaaaaaatctaaaaccatttcacgaatctaagttgtcgaggaaagtgccatttgattccccttctacacttcttctgtttcagtaattaatcaatcaacatcgaccttggcttgaatatggtgattcagcaaatcgtcatgtggagacgcatgcaagtgtgttgtgatatatagtatattgagatcttaattatcgacatggaaaaggacttagcttgtgtttcattttgaagaatgaaagccctcaactagctagaaagaatgttggcttatgctttgttacaaccttgcaatggcatacaattggcaaacattaattgctgct

SEQ ID NO: 59822 - protein, 223 aa, Glycine max
  peptide (1)..(223): Ceres Seq. ID no. 12611160
MRKPSCDIKELNKGAWSKQEDQKLVDYIKKHGEVCWRTLPQAAGLHRCGKSCRLRWINYLRPDLKRGNFAEDEEDLIIKLHALLGNRWSLIAGRLPGRTDNEVKNYWNSHIRKKLISNGIDPNNHRLNHTIPSVYQNPPMSDDSSKHFGMKDNNSKNETSKSPRVYNHGEVSDAASGEAESSCALPDLNLDLSICEKNLKPFHESKLSRKVPFDSPSTLLLFQ

SEQ ID NO: 59823 - DNA, 961 bp, Glycine max
  misc_feature (1)..(961): Ceres Seq. ID no. 13582052
acaaaatagatttggctgtcgtttcgtccctccctcttccgttgaacgaacatcggcgttttcaccgacgaatccaactttctttccatttctctctacgattcaggtctttcacttggattcagaatagtacttttgtttcttctagattattagcgacagagatggatgattgggaagctgaagactttcaaccaactcctgctaaagttgaactgaaaagtaactgggatgatgaggatgttgatgagaatgacatcaaggactcttgggaggaagaggatgatgatgagcctactccggcagctgtagtaaagcctgctccaaagaaagcagcaaaagttgttgaaaagaaggctaaatctgttgaagaaccatcaaaggaagagccttttgatcctattgctgacaaacttcgcatgcagaggctagtggaggaagctgattaccaggcaactgctgaactctttggagcaaagactgaagcaaaaagcgttgatattttcattcccaagtctgaaagcgatttcttggaatatgctgagatgatatctcgtaagcttgtaccttatgagaaaagctttcactatattgggctgctcaaagcagtgatgagactttctgtggccaatatgaaagcagctgatgttaaagacgttgcttcctccatttcggcaataggaaacgaaaaactcaaggctgagaaagatgctgctgccggcaaaaagaagtcaggtaagaagaaacaactgcacgtggataagcctgatgatgatcttgtttcgggtccttatggcgccatggacgacgatgatttcatgtaaaagaaaatggcttggagattgcacttactacctatgtaggatattgcaactaagaagaggtttaaatcattttacgtttttttttaaattatctattgaagcaacacaaattagtaaaacagaattgcctttttctc

SEQ ID NO: 59824 - protein, 273 aa, Glycine max
  peptide (1)..(273): Ceres Seq. ID no. 13582053
KIDLAVVSSLPLPLNEHRRFHRRIQLSFHFSLRFRSFTWIQNSTFVSSRLLATEMDDWEAEDFQPTPAKVELKSNWDDEDVDENDIKDSWEEEDDDEPTPAAVVKPAPKKAAKVVEKKAKSVEEPSKEEPFDPIADKLRMQRLVEEADYQATAELFGAKTEAKSVDIFIPKSESDFLEYAEMISRKLVPYEKSFHYIGLLKAVMRLSVANMKAADVKDVASSISAIGNEKLKAEKDAAAGKKKSGKKKQLHVDKPDDDLVSGPYGAMDDDDFM

SEQ ID NO: 59825 - protein, 219 aa, Glycine max
  peptide (1)..(219): Ceres Seq. ID no. 13582054
MDDWEAEDFQPTPAKVELKSNWDDEDVDENDIKDSWEEEDDDEPTPAAVVKPAPKKAAKVVEKKAKSVEEPSKEEPFDPIADKLRMQRLVEEADYQATAELFGAKTEAKSVDIFIPKSESDFLEYAEMISRKLVPYEKSFHYIGLLKAVMRLSVANMKAADVKDVASSISAIGNEKLKAEKDAAAGKKKSGKKKQLHVDKPDDDLVSGPYGAMDDDDFM

SEQ ID NO: 59826 - DNA, 881 bp, Glycine max
  misc_feature (1)..(881): Ceres Seq. ID no. 13595627
atcgaaaaacaccaaacaacacactaacatacacatcatctcctctctcttctcttatcttctccgctatgaagctcgccactagcctcagctccaagttcctccgcctcagccctaaacgtatcttccgcgccaagtccaagtcctcctccgtctccagatccgaaccttcttccttcagctccggtgcttcatccgacggctcctacagcgacctcaagccaggtcccgccgccactcccgtcagtgtcctccccggagaacaagatttttactccgagctgatacaggcctttaagctcatagaccgcgacgacgacggtgtggtttcaagaaaagaactagctgcgctgcttagcgggctcagtcctgagcctccgagtcaagaagaggttactctgatgcttcaagaagtcgatggaggaggagacggttgtatcagcctcgaggagcttgctagccgcgtggcgggatcctcctctgactctgatgaaagctcggtcgagatgagagaggtgtttgagttttttgacgtggatcacgacgggaggatatcggcggaggagcttcatagagtttttggagttatcggagacgagcggtgcacgttagaggagtgtgtgcgtatgatagcgacggttgatgggaacggtgacggttttgtttgctttgatgacttttgccgcatgatggaagcttcaggctccagcgatgagtgatcatcattgagtcatgtttgtatgattgatgataatgacatcgttatgctctcctttgtttacacattattttttactattactgtaatttgggtataattttgtcacggcaaagcacttcaaatttttaccgtcaagaatcaatcaatcactataccagtg

SEQ ID NO: 59827 - protein, 238 aa, Glycine max
  peptide (1)..(238): Ceres Seq. ID no. 13595628
RKTPNNTLTYTSSPLSSLIFSAMKLATSLSSKFLRLSPKRIFRAKSKSSSVSRSEPSSFSSGASSDGSYSDLKPGPAATPVSVLPGEQDFYSELIQAFKLIDRDDDGVVSRKELAALLSGLSPEPPSQEEVTLMLQEVDGGGDGCISLEELASRVAGSSSDSDESSVEMREVFEFFDVDHDGRISAEELHRVFGVIGDERCTLEECVRMIATVDGNGDGFVCFDDFCRMMEASGSSDE

SEQ ID NO: 59828 - protein, 216 aa, Glycine max
  peptide (1)..(216): Ceres Seq. ID no. 13595629
MKLATSLSSKFLRLSPKRIFRAKSKSSSVSRSEPSSFSSGASSDGSYSDLKPGPAATPVSVLPGEQDFYSELIQAFKLIDRDDDGVVSRKELAALLSGLSPEPPSQEEVTLMLQEVDGGGDGCISLEELASRVAGSSSDSDESSVEMREVFEFFDVDHDGRISAEELHRVFGVIGDERCTLEECVRMIATVDGNGDGFVCFDDFCRMMEASGSSDE

SEQ ID NO: 59829 - DNA, 788 bp, Glycine max
  misc_feature (1)..(788): Ceres Seq. ID no. 15224680
cacgagacccagacccgcagaccgccttcccccccactcctctccgcttccagactcctcttcgccgccgattcgtcccgccgccccatccgctccgtcgcgacgccatgtcggtgacgctgcacacgaacctgggggacatcaaggtggaggttttctgcgaccaggtgccgcggacggcggagaactttttagccctgtgcgcgagcggctactacgacggcaccgtcttccaccgcaacatcaaggggttcatggtgcagggcggcgacccgacgggcaccggcaagggcggcgcctcgatctggggcggcaagttcgcggacgagttccgggaggcgctcaagcacggcgcccggggcaccctgtccatggccaactccgggcccaacaccaacggcagccagttcttcatcacctacgccaagcagccccacctcaacggccactacaccgtgttcgccaaggtcatccacggcttcgacgtgcttgacctcatggagaagacccccaccggccccgccgaccgccccctcgccgagatcaggctcaaccgcgtcaccgtccacgccaaccccctcgccgggtaggcctttcttctctcctggatggctggcctggcctggcctggcctctgctgctaatctaggaaccggaaccaaatttggctctgtaatatcatcatcgtctggttacctgaattctacctacctgcctacccgcaagaacatgatgctgctagtatactggtgtgttgaatgatgatactgcaatgcaagcgtttggct

SEQ ID NO: 59830 - protein, 195 aa, Glycine max
  peptide (1)..(195): Ceres Seq. ID no. 15224681
RDPDPQTAFPPTPLRFQTPLRRRFVPPPHPLRRDAMSVTLHTNLGDIKVEVFCDQVPRTAENFLALCASGYYDGTVFHRNIKGFMVQGGDPTGTGKGGASIWGGKFADEFREALKHGARGTLSMANSGPNTNGSQFFITYAKQPHLNGHYTVFAKVIHGFDVLDLMEKTPTGPADRPLAEIRLNRVTVHANPLAG

SEQ ID NO: 59831 - protein, 163 aa, Glycine max
  peptide (1)..(163): Ceres Seq. ID no. 15224682
TRPRPADRLPPHSSPLPDSSSPPIRPAAPSAPSRRHVGDAAHEPGGHQGGGFLRPGAADGGELFSPVRERLLRRHRLPPQHQGVHGAGRRPDGHRQGRRLDLGRQVRGRVPGGAQARRPGHPVHGQLRAQHQRQPVLHHLRQAAPPQRPLHRVRQGHPRLRRA

SEQ ID NO: 59832 - protein, 160 aa, Glycine max
  peptide (1)..(160): Ceres Seq. ID no. 15224683
MSVTLHTNLGDIKVEVFCDQVPRTAENFLALCASGYYDGTVFHRNIKGFMVQGGDPTGTGKGGASIWGGKFADEFREALKHGARGTLSMANSGPNTNGSQFFITYAKQPHLNGHYTVFAKVIHGFDVLDLMEKTPTGPADRPLAEIRLNRVTVHANPLAG

SEQ ID NO: 59833 - DNA, 1183 bp, Glycine max
  misc_feature (1)..(1183): Ceres Seq. ID no. 13595509
cttcctctcctcagatcgttcctcttcgtctccttcaatcactcgtaagactcttccgagacggtgtgttcgctctttgattgaatggaaagtgaagacatgcattcgaaacctgacggtgggaatcagatcgtttcagagtcggttcatcatcactccataaatagtttaaacccttggcaacgtgctgctgctgcctgcaatgcaagttctttagtggaggaagctggagataagtctatagctttggagaaccaaaacaattgggaatcaactaatggttccaagtcaccatctcataaagatgaaaatggtaacaaggaatcaccacaagtcacatcctctccccaacaatcagctggagattacagtgaaaaaagtcaagaacttgtgcatgttggcgtcacaggacctcctcaccctcaacttgttagccacacaggatgggcatcctcaaatccataccaggatccttattatgctggaatgatgggagcctatcccatggcttatgttccatatggtgggatgcctcattcaagaatgccactgcctcctgaggtggcacaggaaccagtttatgtgaatgctaaacagtaccaggcgatacttaggcgaaggcaggcacgcgccaaggcagagcttgaaatgaagctaatcaaatccagaaagccttatctccatgaatctcggcatcagcatgctatgaggaggcctaggggcactggaggccggtttgcaaagaaaacaaacaccgaagtttcacagccgaaacctggagaaaagaacaatgctactcagtccccgacgtcatctcactctgaccaacctgaagcctggaatgatgagtgtagaaaacagtctgaagagatgcaaagctcagcttctaagagaagggaagaagcagactgttcagggcaacaatggaacagcatttcctcaaaccatacttctgaagctcgtctagccatcaaatgacatctccactggcaactcattcttggctctctctttgttggcttatttggtagcagccattgaagagtcccctgtacaaatacttctgtgtttttcttcttttgtgatatgtcaaatgttactgctttcttttgtcaactctctttagcacatttttgaatcaaaaactatgtgtttaaaattaaattccaaagtgtgcaaactg

SEQ ID NO: 59834 - protein, 297 aa, Glycine max
  peptide (1)..(297): Ceres Seq. ID no. 13595510
MESEDMHSKPDGGNQIVSESVHHHSINSLNPWQRAAAACNASSLVEEAGDKSIALENQNNWESTNGSKSPSHKDENGNKESPQVTSSPQQSAGDYSEKSQELVHVGVTGPPHPQLVSHTGWASSNPYQDPYYAGMMGAYPMAYVPYGGMPHSRMPLPPEVAQEPVYVNAKQYQAILRRRQARAKAELEMKLIKSRKPYLHESRHQHAMRRPRGTGGRFAKKTNTEVSQPKPGEKNNATQSPTSSHSDQPEAWNDECRKQSEEMQSSASKRREEADCSGQQWNSISSNHTSEARLAIK

SEQ ID NO: 59835 - protein, 292 aa, Glycine max
  peptide (1)..(292): Ceres Seq. ID no. 13595511
MHSKPDGGNQIVSESVHHHSINSLNPWQRAAAACNASSLVEEAGDKSIALENQNNWESTNGSKSPSHKDENGNKESPQVTSSPQQSAGDYSEKSQELVHVGVTGPPHPQLVSHTGWASSNPYQDPYYAGMMGAYPMAYVPYGGMPHSRMPLPPEVAQEPVYVNAKQYQAILRRRQARAKAELEMKLIKSRKPYLHESRHQHAMRRPRGTGGRFAKKTNTEVSQPKPGEKNNATQSPTSSHSDQPEAWNDECRKQSEEMQSSASKRREEADCSGQQWNSISSNHTSEARLAIK

SEQ ID NO: 59836 - protein, 163 aa, Glycine max
  peptide (1)..(163): Ceres Seq. ID no. 13595512
MMGAYPMAYVPYGGMPHSRMPLPPEVAQEPVYVNAKQYQAILRRRQARAKAELEMKLIKSRKPYLHESRHQHAMRRPRGTGGRFAKKTNTEVSQPKPGEKNNATQSPTSSHSDQPEAWNDECRKQSEEMQSSASKRREEADCSGQQWNSISSNHTSEARLAIK

SEQ ID NO: 59837 - DNA, 809 bp, Glycine max
  misc_feature (1)..(809): Ceres Seq. ID no. 15227150
actgcccttccgaagcctctcccaaaccctcccgccgccgccgccgccgcccgccaccgaacagcagccatgccgcccaagctcgacccgtcgcaggtggtggaggtctacgtccgggtgaccggaggcgaggtcggcgcggcgtcttcgcttgcccccaagatcggccccctcggtctctcccccaagaagatcggtgaggacatcgccaaggagacggccaaggactggaagggcctccgcgtcaccgtcaagctcaccgtccagaaccgtcaggccaaggtctccgtcgtcccttccgccgcggcgctcgtcatcaagtccctcaaggagcccgagagggacaggaagaaggtgaagaacatcaagcacaacggcaacatcagcctcgacgacgtcatcgagatcgccaagatcatgaagcccaggtccatggccaaggagatggccgggactgtcaaggagatcctcggcacctgcgtcagcgtcggctgcaccgtcgacgggaaggaccccaaggacctgcagacggagatcgacgacggcgaggtcgagatcccctccgcttaaaggccgatgtcgaggtgattatcatctgatgatatggaagtcataccctgttgcaaatgttgcctatgtacctcccaaacgatgtgatccctcctctttttgtcatgttttagcagtaatcctgtgagacctcattgttactactgcatatttggtctttgcaatgtagtttgtgcacttcagttaacttaatctataccattcagtggtgagaagtttgttcaaaaaaaaaaaaaaaa

SEQ ID NO: 59838 - protein, 189 aa, Glycine max
  peptide (1)..(189): Ceres Seq. ID no. 15227151
TALPKPLPNPPAAAAAARHRTAAMPPKLDPSQVVEVYVRVTGGEVGAASSLAPKIGPLGLSPKKIGEDIAKETAKDWKGLRVTVKLTVQNRQAKVSVVPSAAALVIKSLKEPERDRKKVKNIKHNGNISLDDVIEIAKIMKPRSMAKEMAGTVKEILGTCVSVGCTVDGKDPKDLQTEIDDGEVEIPSA

SEQ ID NO: 59839 - protein, 166 aa, Glycine max
  peptide (1)..(166): Ceres Seq. ID no. 15227152
MPPKLDPSQVVEVYVRVTGGEVGAASSLAPKIGPLGLSPKKIGEDIAKETAKDWKGLRVTVKLTVQNRQAKVSVVPSAAALVIKSLKEPERDRKKVKNIKHNGNISLDDVIEIAKIMKPRSMAKEMAGTVKEILGTCVSVGCTVDGKDPKDLQTEIDDGEVEIPSA

SEQ ID NO: 59840 - DNA, 1759 bp, Glycine max
  misc_feature (1)..(1759): Ceres Seq. ID no. 13595521
aacggttccctttgttttctttttttctctgctagttgagcaaaaatggaggaagcgagtcctaaaattttcattccaaacacgatccagggagtgagtgagcacgtgacggggcagattgaactgctctgggagttagtgaaagtgccattgatagtgcctctgctgaagcttggagtgtacatttgtttagcaatgtcacttatgcttttcatggagaggctctacatgggcatcgtcatcattctagtgaaactcttctggaaaaaacccgaacagcgttacaactacaagcccctccaagacgacgtcgaattgggctccttcatcttccccacggtcctaatacaaatcccaatgttcaacgaaaaagaggtttacaaggtgtccatcggagcagcttgtgggctttcatggcccagtgaccgtctcgttatccaagtcctggacgattcaactgacactgtcattaaggaaatggtggagcaagaatgtttgagatgggcaagtaaaggcatcaacataacgtaccaaataagggagaacagaacgggttacaaagctggtgcgttgaaagaaggcctcaagcgaagctatgtggagcattgcgagtacgtggcaatattcgacgcggatttcaggccagagccagactttctcaggcgagcgattccattcttggtggggaaccctgagattgccctggttcaagctcgttggaggtttgtgaatgcgaatgagtgcttgttgacaagaatgcaagagatgtcactggattatcatttcacagtagagcaagaagttgggtcagccactcatgctttctttggtttcaatgggacagcgggtatatggagaattgctgctatcaatgaagctggagggtggaaagacagaacaacggtggaggacatggatcttgctgttcgtgccagccttaggggctggaagtttttgtacctcggagaccttcaggcgaaaagtgagcttccaagtactcttagagccttccgcttccagcagcatcgatggtcttgtggtcctgctaatctattccgcaaaatggtgatggagatagtaaggaacaagaaagtaaaattctggaagaaagtgtacgttatatacagcttcttctttgttcgtaaaatcatagctcacatggtcacattcttcttctactgtgtggtgcttcccttgacaattttggtccctgaagttcgtgttccaatttggggagctgtttatattccttccatcatcaccaccctcaactcagtaggcacaccaaggtccattcatctgttgttctactggatcctttttgagaatgcgatgtcattgcaccgtacgaaggcgaccttcataggcctgctagaggccgggagagccaatgagtgggtcgttactgaaaaacttggtgactctgtcaataataagaacaaaagcaatgtcaccaaagcaatcagaaaatctcgattcaaatttggtgaaagacttcatttattggagcttggattcgctgccttcctcttcctttgtggatgctatgactatgtgcacggcaagaactactactttttgtacctcttccttcagaccataaccttctcaatcgtaggatttggctatgttggcaccattgtttagtacttgttaagctaaaatcttcagtgacttaagtttcagagtcactagtgttcatgtcttactagtttctctcctcaataaaatgcaaaaggtagggctgatttctcaagct

SEQ ID NO: 59841 - protein, 533 aa, Glycine max
  peptide (1)..(533): Ceres Seq. ID no. 13595522
MEEASPKIFIPNTIQGVSEHVTGQIELLWELVKVPLIVPLLKLGVYICLAMSLMLFMERLYMGIVIILVKLFWKKPEQRYNYKPLQDDVELGSFIFPTVLIQIPMFNEKEVYKVSIGAACGLSWPSDRLVIQVLDDSTDTVIKEMVEQECLRWASKGINITYQIRENRTGYKAGALKEGLKRSYVEHCEYVAIFDADFRPEPDFLRRAIPFLVGNPEIALVQARWRFVNANECLLTRMQEMSLDYHFTVEQEVGSATHAFFGFNGTAGIWRIAAINEAGGWKDRTTVEDMDLAVRASLRGWKFLYLGDLQAKSELPSTLRAFRFQQHRWSCGPANLFRKMVMEIVRNKKVKFWKKVYVIYSFFFVRKIIAHMVTFFFYCVVLPLTILVPEVRVPIWGAVYIPSIITTLNSVGTPRSIHLLFYWILFENAMSLHRTKATFIGLLEAGRANEWVVTEKLGDSVNNKNKSNVTKAIRKSRFKFGERLHLLELGFAAFLFLCGCYDYVHGKNYYFLYLFLQTITFSIVGFGYVGTIV

SEQ ID NO: 59842 - protein, 483 aa, Glycine max
  peptide (1)..(483): Ceres Seq. ID no. 13595523
MSLMLFMERLYMGIVIILVKLFWKKPEQRYNYKPLQDDVELGSFIFPTVLIQIPMFNEKEVYKVSIGAACGLSWPSDRLVIQVLDDSTDTVIKEMVEQECLRWASKGINITYQIRENRTGYKAGALKEGLKRSYVEHCEYVAIFDADFRPEPDFLRRAIPFLVGNPEIALVQARWRFVNANECLLTRMQEMSLDYHFTVEQEVGSATHAFFGFNGTAGIWRIAAINEAGGWKDRTTVEDMDLAVRASLRGWKFLYLGDLQAKSELPSTLRAFRFQQHRWSCGPANLFRKMVMEIVRNKKVKFWKKVYVIYSFFFVRKIIAHMVTFFFYCVVLPLTILVPEVRVPIWGAVYIPSIITTLNSVGTPRSIHLLFYWILFENAMSLHRTKATFIGLLEAGRANEWVVTEKLGDSVNNKNKSNVTKAIRKSRFKFGERLHLLELGFAAFLFLCGCYDYVHGKNYYFLYLFLQTITFSIVGFGYVGTIV

SEQ ID NO: 59843 - protein, 480 aa, Glycine max
  peptide (1)..(480): Ceres Seq. ID no. 13595524
MLFMERLYMGIVIILVKLFWKKPEQRYNYKPLQDDVELGSFIFPTVLIQIPMFNEKEVYKVSIGAACGLSWPSDRLVIQVLDDSTDTVIKEMVEQECLRWASKGINITYQIRENRTGYKAGALKEGLKRSYVEHCEYVAIFDADFRPEPDFLRRAIPFLVGNPEIALVQARWRFVNANECLLTRMQEMSLDYHFTVEQEVGSATHAFFGFNGTAGIWRIAAINEAGGWKDRTTVEDMDLAVRASLRGWKFLYLGDLQAKSELPSTLRAFRFQQHRWSCGPANLFRKMVMEIVRNKKVKFWKKVYVIYSFFFVRKIIAHMVTFFFYCVVLPLTILVPEVRVPIWGAVYIPSIITTLNSVGTPRSIHLLFYWILFENAMSLHRTKATFIGLLEAGRANEWVVTEKLGDSVNNKNKSNVTKAIRKSRFKFGERLHLLELGFAAFLFLCGCYDYVHGKNYYFLYLFLQTITFSIVGFGYVGTIV

SEQ ID NO: 59844 - DNA, 663 bp, Glycine max
  misc_feature (1)..(663): Ceres Seq. ID no. 13595251
atgcaaattcaccaccaccaccaaagcctaaactttaagcaaccaaaatccccctcttctctctatcctcccatccatcttccccatcaacaaaaatagtaacaaatcccatttccctctctctcccccaaaataaaacaaaaaaaaaatccattctttctccattttcaaccccatttccccccaaaaatccaatctttccccatacccacctcccaaaatctcttctttctccaaacccaaatccccaattcccccaaatccaaccaaagagaatcaaacacacaaaaaagaaaacaaatttgtagcttcccaccttcaatgtggcgaccgtggggcaaatcaactgttcgaattcacagcgcgtcttcatcaccctcttccacattctcttgttcttccttcaaagacattcaaaccctttgcctcgacgaacccccacaacaaaaccagcatcatcaacaattaccctctccttcccccacaagaaaaccctccgttttccaccgagtccgactcgccaactcgctcctccgaacctggtcaactcacctccacccccaaccccaacctcccaaactccccgaaccccccgaatccgaacctgatgttgtcgtctcgaaacccgaaccacaacaacctgcgatttattatttcccgggc

SEQ ID NO: 59845 - protein, 114 aa, Glycine max
  peptide (1)..(114): Ceres Seq. ID no. 13595252
MWRPWGKSTVRIHSASSSPSSTFSCSSFKDIQTLCLDEPPQQNQHHQQLPSPSPTRKPSVFHRVRLANSLLRTWSTHLHPQPQPPKLPEPPESEPDVVVSKPEPQQPAIYYFPG

SEQ ID NO: 59846 - DNA, 1058 bp, Glycine max
  misc_feature (1)..(1058): Ceres Seq. ID no. 12782188
aaacttcaaagccctcctttgcctctctctcttcgcttattgttgcaccttcctcgtaaaagataactcccggtcggcgtgcatagccgccgattgaggcaaaaaaaaaacacaaaacacactgtagctcatcacagccaaacgcggcgtcaacgatgacgagcttctgaaattccaacttcgcccttcttctctgtgtatattcttttttatttatttattattatttctattattttttcggtgaggttagctccatgcctagtcccaagagcagccgcagcggccagatcgagagtcaccggaggggaaggtcgtcgtccttccacggccagtgcgcgatgtctgtcggtcagctccaccgtccgaagacggtttccgacctcccgtcgctcagaagcctcgccggaacggcgccggcgcctatgccggagggattgcctagacagccgccgaagatgctgctgaaggtgacggtgctgagaagcctcgcgcccgtgcaggtgctgatgacgccgggatccaccgtccgcgacctgatagcggcggcggtgcggcagtacgtgaaggaaggtcgccggccaatcttgccgtccagcgaagtctccgaattcgacctccattattcgcagtttagcctagaaagtttggataggaaggagaagctgctagagcttggatctaggaacttttttctatgtccgagaaagccagctacaacagtggaagatggcgtaacgacgtcgtttgcgtcttgtgcgaaagaggcagagaaagagagggagggatatggtggtggtggtggtgggtttgcttggttcaaactcatgcagttcatgatgtgattggttggttgattagtcattattgttattttatttcaattgaaatgtctttttatttgtcccagaatgaatggccggttacttgtaaaaaataataggttggcttggcaattaggtacagggtttgagatttgtgtgtaagcaaagcaaaattgtaaaatagcatgtatgatttttaaacacatacatggtaatgttaaagctttcaattgc

SEQ ID NO: 59847 - protein, 195 aa, Glycine max
  peptide (1)..(195): Ceres Seq. ID no. 12782189
MPSPKSSRSGQIESHRRGRSSSFHGQCAMSVGQLHRPKTVSDLPSLRSLAGTAPAPMPEGLPRQPPKMLLKVTVLRSLAPVQVLMTPGSTVRDLIAAAVRQYVKEGRRPILPSSEVSEFDLHYSQFSLESLDRKEKLLELGSRNFFLCPRKPATTVEDGVTTSFASCAKEAEKEREGYGGGGGGFAWFKLMQFMM

SEQ ID NO: 59848 - protein, 167 aa, Glycine max
  peptide (1)..(167): Ceres Seq. ID no. 12782190
MSVGQLHRPKTVSDLPSLRSLAGTAPAPMPEGLPRQPPKMLLKVTVLRSLAPVQVLMTPGSTVRDLIAAAVRQYVKEGRRPILPSSEVSEFDLHYSQFSLESLDRKEKLLELGSRNFFLCPRKPATTVEDGVTTSFASCAKEAEKEREGYGGGGGGFAWFKLMQFMM

SEQ ID NO: 59849 - protein, 139 aa, Glycine max
  peptide (1)..(139): Ceres Seq. ID no. 12782191
MPEGLPRQPPKMLLKVTVLRSLAPVQVLMTPGSTVRDLIAAAVRQYVKEGRRPILPSSEVSEFDLHYSQFSLESLDRKEKLLELGSRNFFLCPRKPATTVEDGVTTSFASCAKEAEKEREGYGGGGGGFAWFKLMQFMM

SEQ ID NO: 59850 - DNA, 1847 bp, Glycine max
  misc_feature (1)..(1847): Ceres Seq. ID no. 13504578
actaatcgaaaaaagatttattgttaagtccaaagagtgtctttagttttctgtcccatgtacatatatatatatatattagccacccttatcggtggtactatgtgcaagctcaaaactttaccaaatctataatcttccccttctctctcctctccccatctccctgatggggttctcatgaattcaagtagtgaaatcaagctatgatcaagccttttggggcttcgatttaccatctttttgtgctaattaaacacttgaaaattaccaccatgtccaccatgaagaacaatttcaaagaccaagaccatctctactcttcatggagcttctcaaagctcatggctttcttcttcctcttaatctccatctcctacctcttctactccctaaggttcgttagccactccttcgattgtgatcaaacccctcacattcccaccatcactcatcatatttcttccaacaccccatctgaagaagagtccacaccccccytttgaagaagttaccaacatttcccacatagtctttggcataggagcctcagcaaagctttggaagcagagaaaagagtacatcaagctatggtggaggcctaatgagatgcgtggggttgtgtggttggagcaaaaggtgaaaactgagcctcaagatgagaatttcttgcccccgttgaggatctctagtgacacttcaaggttcaagtataagaacccaaaggggcatagatcagctattagaatctcacgcatagtgtctgagacacttaggcttgggatggaggatgtgaggtggtttgtgatgnggggatgatgacacggwttttgtggcagaaaatttggtgaaarmrwtgcaaaaatatgaccacaatcagttttattacattgggagttcctcggagagtcacttgcaaaacatttatttttcttataatatggcttatgggggtggtggttttgccattagttatcccttggctgtggcattggagaagatgcaagataggtgcattcagaggtatccagggttgtatggctctgatgataggattcagrcttgtatggcagaattgggagttccactcaccaaggaaaaagggttccatcagtttgatgygtacggcaatctccttgrgcttctggcgscccatccagttacgccactggwatccctccatcacttggacgtggtagagcccatatttccaaacgtgagccgggtccaggccctgaagaggctgaaagggcccatgaaacttgacccagccgggctcatccaacaatccatttgctacgacaaagcccggacctggaccatatccgtttcatggggctatgcggttcaaattttccggggcatcttctcagcccgggaaatggagatgccagcaaggacattcctgaactggtacaagcgggcggattacacggcgtatccgttcaacacgcggccggtcagccgccatgtttgtcagaaaccgtttgtttattacttgtctagggcagtgtatgatgagggtgctaatgaaactgcaagtcaatatgtacgggttcagcaaaacccggaatgcaattggaaaatggaggatccaacccaaatcaaagtggtgcatgtttataagaaacccgacccgcatttgtgggacaaggctccaagaagaaattgttgtagggttcgacgtacaaagaagcaaggaactatggtgattgatgtgggggaatgcaaggaagatgaacttgttgaattgtagttagaggtcctacacatcaattgataattcttaactcaatcgtttgctatatgtattttcttcttytatayatatatgatttactttgagg

SEQ ID NO: 59851 - protein, 271 aa, Glycine max
  peptide (1)..(271): Ceres Seq. ID no. 15222815
  misc_feature (41)..(41): Xaa is any aa, unknown or other
  misc_feature (61)..(61): Xaa is any aa, unknown or other
  misc_feature (67)..(67): Xaa is any aa, unknown or other
  misc_feature (71)..(71): Xaa is any aa, unknown or other
  misc_feature (78)..(78): Xaa is any aa, unknown or other
MAYGGGGFAISYPLAVALEKMQDRCIQRYPGLYGSDDRIQXCMAELGVPLTKEKGFHQFDXYGNLLXLLAXHPVTPLXSLHHLDVVEPIFPNVSRVQALKRLKGPMKLDPAGLIQQSICYDKARTWTISVSWGYAVQIFRGIFSAREMEMPARTFLNWYKRADYTAYPFNTRPVSRHVCQKPFVYYLSRAVYDEGANETASQYVRVQQNPECNWKMEDPTQIKVVHVYKKPDPHLWDKAPRRNCCRVRRTKKQGTMVIDVGECKEDELVEL

SEQ ID NO: 59852 - protein, 251 aa, Glycine max
  peptide (1)..(251): Ceres Seq. ID no. 15222816
  misc_feature (21)..(21): Xaa is any aa, unknown or other
  misc_feature (41)..(41): Xaa is any aa, unknown or other
  misc_feature (47)..(47): Xaa is any aa, unknown or other
  misc_feature (51)..(51): Xaa is any aa, unknown or other
  misc_feature (58)..(58): Xaa is any aa, unknown or other
MQDRCIQRYPGLYGSDDRIQXCMAELGVPLTKEKGFHQFDXYGNLLXLLAXHPVTPLXSLHHLDVVEPIFPNVSRVQALKRLKGPMKLDPAGLIQQSICYDKARTWTISVSWGYAVQIFRGIFSAREMEMPARTFLNWYKRADYTAYPFNTRPVSRHVCQKPFVYYLSRAVYDEGANETASQYVRVQQNPECNWKMEDPTQIKVVHVYKKPDPHLWDKAPRRNCCRVRRTKKQGTMVIDVGECKEDELVEL

SEQ ID NO: 59853 - protein, 229 aa, Glycine max
  peptide (1)..(229): Ceres Seq. ID no. 15222817
  misc_feature (19)..(19): Xaa is any aa, unknown or other
  misc_feature (25)..(25): Xaa is any aa, unknown or other
  misc_feature (29)..(29): Xaa is any aa, unknown or other
  misc_feature (36)..(36): Xaa is any aa, unknown or other
MAELGVPLTKEKGFHQFDXYGNLLXLLAXHPVTPLXSLHHLDVVEPIFPNVSRVQALKRLKGPMKLDPAGLIQQSICYDKARTWTISVSWGYAVQIFRGIFSAREMEMPARTFLNWYKRADYTAYPFNTRPVSRHVCQKPFVYYLSRAVYDEGANETASQYVRVQQNPECNWKMEDPTQIKVVHVYKKPDPHLWDKAPRRNCCRVRRTKKQGTMVIDVGECKEDELVEL

SEQ ID NO: 59854 - DNA, 1428 bp, Glycine max
  misc_feature (1)..(1428): Ceres Seq. ID no. 13595616
gaacatcctaatcgaaaaattttttttcccttatttttcttaaatatttttatggctccggagtcaaaagttcctggagcaagtagaaagaagaaagcgagtgacgagggaaacgtttaaaccatatatgttttgttgtttctagctccattctatagcaatggccacgtctgttcttagtcctcctttctttcatcctctgcatcaacttcaattctcgaaatgcccccgcctttcttctaaatcccactttcgccctcgcctcctccgctccatatcccaaagaaccattcgcgctatctccgcagttgccgcagaatcagagttaggtacacagcaggatcatgcaattgaagcagacatctttgcttgccctgtatgttatgaaccattgataagaaaaggtccttctggccttaacttgtctggtttcatgtgtaagagatgtaagaagacatattctagcaaagataggtatctggatctgactgtaactgctggattgagagactacactgaaattcaacctgctcggactgagcttttcaggagtcccctggtttcattcttgtatgaaagaggttggcgtcagaatttcaggcaaagtggctttcctggtcctgatgaagagttcaaaatggctcaagagtactttgaatctgctgaaggtggacttcttgttgatgttagctgtggtagtggtttattttcccgaaaattcgccaaatctggaacatattcgggagtcatagcactagatttttctgagaatatgcttcgtcaatgttatgatttcattgagaaagataacacactttcaacaaataatattgctcttgtaagggcagatgtttctagacttcccttctcatcaggttcggttgatgctgttcatgctggtgcagctttgcattgctggccatctccctccaatgctgttgctgaaatcacccggacactaaaaaatggtggagtatttgttgggagcacttttctgcgttatagttcaaaaactccctggtttttacgccctttcagggagaggactccacaaggctatggctatctaacagaggaagagatcaaagacctttgcacctcatgtggtcttaccaattactcaagcaaaattcagcaggcttttattatgttcacagctcagaagccataaaactgggtctgatctatttataacattgattctccactgcattttatcaattccttctgtatgtatgtattgtatcacttgtttcatctgtaaagaagaaattgtaaataaatgagaaatgaaaaggtcaaaacctgagtccggtgtgttcgcaggttgtaaaatgcatcgtgtatcagtgcctaataatatatccaaattctgacaatttttgtaaagaatatatattttgttggcttaaatatatttttggttct

SEQ ID NO: 59855 - protein, 336 aa, Glycine max
  peptide (1)..(336): Ceres Seq. ID no. 13595617
MATSVLSPPFFHPLHQLQFSKCPRLSSKSHFRPRLLRSISQRTIRAISAVAAESELGTQQDHAIEADIFACPVCYEPLIRKGPSGLNLSGFMCKRCKKTYSSKDRYLDLTVTAGLRDYTEIQPARTELFRSPLVSFLYERGWRQNFRQSGFPGPDEEFKMAQEYFESAEGGLLVDVSCGSGLFSRKFAKSGTYSGVIALDFSENMLRQCYDFIEKDNTLSTNNIALVRADVSRLPFSSGSVDAVHAGAALHCWPSPSNAVAEITRTLKNGGVFVGSTFLRYSSKTPWFLRPFRERTPQGYGYLTEEEIKDLCTSCGLTNYSSKIQQAFIMFTAQKP

SEQ ID NO: 59856 - protein, 245 aa, Glycine max
  peptide (1)..(245): Ceres Seq. ID no. 13595618
MCKRCKKTYSSKDRYLDLTVTAGLRDYTEIQPARTELFRSPLVSFLYERGWRQNFRQSGFPGPDEEFKMAQEYFESAEGGLLVDVSCGSGLFSRKFAKSGTYSGVIALDFSENMLRQCYDFIEKDNTLSTNNIALVRADVSRLPFSSGSVDAVHAGAALHCWPSPSNAVAEITRTLKNGGVFVGSTFLRYSSKTPWFLRPFRERTPQGYGYLTEEEIKDLCTSCGLTNYSSKIQQAFIMFTAQKP

SEQ ID NO: 59857 - protein, 177 aa, Glycine max
  peptide (1)..(177): Ceres Seq. ID no. 13595619
MAQEYFESAEGGLLVDVSCGSGLFSRKFAKSGTYSGVIALDFSENMLRQCYDFIEKDNTLSTNNIALVRADVSRLPFSSGSVDAVHAGAALHCWPSPSNAVAEITRTLKNGGVFVGSTFLRYSSKTPWFLRPFRERTPQGYGYLTEEEIKDLCTSCGLTNYSSKIQQAFIMFTAQKP

SEQ ID NO: 59858 - DNA, 860 bp, Glycine max
  misc_feature (1)..(860): Ceres Seq. ID no. 13595538
ctgttccaattcgttccgaaacaatcttctcaattcctttcggttattataatctgagttaaaaagaaaataggaggaggtaaagacaagcatcatgacgagcaagacaaagggtttcatgggttcccaggaggtggacatcattacccacccgctggataccctccacaacaagggtatcctccagctgggggctatccaccagctggttacccacccggtgcttaccctcctggacctggaggttatcctcctgctccgggtcacggtggctatcctcctgcaggctatcctgctcctcaccactcaggacactctagtggtggactcggaggtatgatcgctggtgcagctggtgcagccgcagcagcctatggaactcaccacgttggtcatgcatcacacaacccttacggtcatgcaggccacggaggatttggccacggaggatttggccacgttggccatgcctctcatgggtatggtggtcatggtcatggcaaattcaagcacggaaagcatggaggcaagcatggaggcaagttcaagcatggaaagcatgggaaacatggtatgtttggaggaggaggaggcaaattcaagaagtggaagtaatctaaagaaaccaccctttcattctctcctccggtagtctcatttacctgaccgatgttttctaataatcccctccaaacacattatattttaactatatcggtttagagattactggttcagaggaaataaatggagagtggtagtataatgtaaacaaaccttatggtatctgcagaagaggtttcttcaatctcttaatagcagatgccctgaaacttatctataatttggttttataatcg

SEQ ID NO: 59859 - protein, 92 aa, Glycine max
  peptide (1)..(92): Ceres Seq. ID no. 13595539
MELTTLVMHHTTLTVMQATEDLATEDLATLAMPLMGMVVMVMANSSTESMEASMEASSSMESMGNMVCLEEEEANSRSGSNLKKPPFHSLLR

SEQ ID NO: 59860 - protein, 92 aa, Glycine max
  peptide (1)..(92): Ceres Seq. ID no. 13595540
MIAGAAGAAAAAYGTHHVGHASHNPYGHAGHGGFGHGGFGHVGHASHGYGGHGHGKFKHGKHGGKHGGKFKHGKHGKHGMFGGGGGKFKKWK

SEQ ID NO: 59861 - protein, 85 aa, Glycine max
  peptide (1)..(85): Ceres Seq. ID no. 13595541
MHHTTLTVMQATEDLATEDLATLAMPLMGMVVMVMANSSTESMEASMEASSSMESMGNMVCLEEEEANSRSGSNLKKPPFHSLLR

SEQ ID NO: 59862 - DNA, 1268 bp, Glycine max
  misc_feature (1)..(1268): Ceres Seq. ID no. 13595542
gaacatcctaatcgaaaaagacgtttcgatccctctctgactctctcctcccccctgccccctcctcggcgcccgcctcgcgaatccgtcggaaacccctcgccgctcccggttctagcgcagcgcagagatggtagccgcgcgcctcctcgcgcgggccacgaggcaatgcgccgccgcggtggtggcgtccgctactaggcggccgctcggcggcgtggcggcggtggccgctcgcccgctcgcctcttccttcggccccgccagggttccatatatgttgaatcagcccttgagatactcaagcaacatctttcaaaggtttggcttttcatcttctactcctcaacaaaatgataaggaggtacacgaacccaaagaccaggaaagtactgcacatgaatcgaatggtgaagcttcaaaggaagacagtggttcgcctggaagtacagaagatcttgatctgtcaaaggaggatctagtgaagctagtttttgagaaggatgaattattaacctcgaaagatgaagagatcaaagatatgaaggacaaggttttgcgcagctatgcagaaatggaaaatgtcattgcccggacaaagcgtgaatctgaaaattcaaaaaaatatgcagtacagaacttctctaagagcttgttagatgttgctgacaatttggctagagcttcatctgttgtaaaggaaagcttctcaaaattagatacatccgaagattctagtggagctgtaccgttactaaaaaccctactggagggtgttgacatgactgataagcaacttggagaggtttttaagaagttcggagtcgaaaggtttgatccgttgaatgagaaattcgatcctgataagcattttgcacttttccaaattcctgatccttcaaaaccatccggaactgttgcttctgttgtgaaggtggggtacatgttacatgatcgcgtgctccgtcctgcggaagttggtgttactgagggaggtccgtccgaagagcctgaggagaaatcaggtggagattagattaaaattggaatctagaagacgtagctgttcctgcttgacgacaaccggtacctcatcagcgaaggagcttggcgatggcagtgtttcggattgatttttaatggtaaaacacaaggttggcttgttgaaatcccatttgtatgggtgcacgtcacaccattccttagcagtacaacgtttcggagaattttgcgagggctttgagaccttaataagagtatttcttttc

SEQ ID NO: 59863 - protein, 301 aa, Glycine max
  peptide (1)..(301): Ceres Seq. ID no. 15221605
MVAARLLARATRQCAAAVVASATRRPLGGVAAVAARPLASSFGPARVPYMLNQPLRYSSNIFQRFGFSSSTPQQNDKEVHEPKDQESTAHESNGEASKEDSGSPGSTEDLDLSKEDLVKLVFEKDELLTSKDEEIKDMKDKVLRSYAEMENVIARTKRESENSKKYAVQNFSKSLLDVADNLARASSVVKESFSKLDTSEDSSGAVPLLKTLLEGVDMTDKQLGEVFKKFGVERFDPLNEKFDPDKHFALFQIPDPSKPSGTVASVVKVGYMLHDRVLRPAEVGVTEGGPSEEPEEKSGGD

SEQ ID NO: 59864 - protein, 252 aa, Glycine max
  peptide (1)..(252): Ceres Seq. ID no. 15221606
MLNQPLRYSSNIFQRFGFSSSTPQQNDKEVHEPKDQESTAHESNGEASKEDSGSPGSTEDLDLSKEDLVKLVFEKDELLTSKDEEIKDMKDKVLRSYAEMENVIARTKRESENSKKYAVQNFSKSLLDVADNLARASSVVKESFSKLDTSEDSSGAVPLLKTLLEGVDMTDKQLGEVFKKFGVERFDPLNEKFDPDKHFALFQIPDPSKPSGTVASVVKVGYMLHDRVLRPAEVGVTEGGPSEEPEEKSGGD

SEQ ID NO: 59865 - protein, 164 aa, Glycine max
  peptide (1)..(164): Ceres Seq. ID no. 15221607
MKDKVLRSYAEMENVIARTKRESENSKKYAVQNFSKSLLDVADNLARASSVVKESFSKLDTSEDSSGAVPLLKTLLEGVDMTDKQLGEVFKKFGVERFDPLNEKFDPDKHFALFQIPDPSKPSGTVASVVKVGYMLHDRVLRPAEVGVTEGGPSEEPEEKSGGD

SEQ ID NO: 59866 - DNA, 1007 bp, Glycine max
  misc_feature (1)..(1007): Ceres Seq. ID no. 13595613
cctttcccccctcccgttccaactttattgtgtttaacaacctagaacatcctaatcgaaaaacaacccaccccacgtattccccgcacctttcccccctcccccggcctcggcaagaccgcgcgcggcgcgccatgacgagctccgcctcctcctccccttcccgcaaggtgctgagcaagatcgcgtgcctccggctgcagaaggagctcggggagtggcaggccagccctcccggcggcttcacctacaaggtctccgacaacctccagcggtgggtcatcgaggtgtccggggcggaggggacgctctacgccggcgagacgtaccggctgcaggttgacttcccggagcagtaccccatggaggctccacaggttatatttatgcatccggcgccgatgcatccgcacatttacagcaatgggcacatctgtctagatatattgtacgactcgtggtcaccagcaatgacggtcagttccgtgtgcatcagcatcttgtccatgttgtcaagttcaccagcgaaggaacgcccatccgataacgatcgctatgtcaggaactgccgcaacgggaggtctccgaaggagacgaggtggtggtttcatgatgacaaagtgtgatgcgctccagctggtttcttcttccggcatcagcagctcttacacatcatcctgcctaccgtagtatggcgtgcgtcgttcatgaaaagattatttaggcaaatatttcaagccatctatttggcggcaaattgacatgcccatgtatgtggttttgtacatgatgaatctgcacctgtatcaactcccgtgcttaccaactcttatcccttttgatatgatgaaagtagtaatcgagtgttttatcttaacaaaaaaaaaaaaaaaaaaaaaaaaaaaaaaaaaaaaaaaaaaaaaaaaaaaaaaaaaaaaaaaaaaaaaagaaaaaaaaaaaaaaaaaggtttatcgatcccgccaacctcaagggggggcccggaacc

SEQ ID NO: 59867 - protein, 207 aa, Glycine max
  peptide (1)..(207): Ceres Seq. ID no. 13595614
FPPSRSNFIVFNNLEHPNRKTTHPTYSPHLSPLPRPRQDRARRAMTSSASSSPSRKVLSKIACLRLQKELGEWQASPPGGFTYKVSDNLQRWVIEVSGAEGTLYAGETYRLQVDFPEQYPMEAPQVIFMHPAPMHPHIYSNGHICLDILYDSWSPAMTVSSVCISILSMLSSSPAKERPSDNDRYVRNCRNGRSPKETRWWFHDDKV

SEQ ID NO: 59868 - protein, 163 aa, Glycine max
  peptide (1)..(163): Ceres Seq. ID no. 13595615
MTSSASSSPSRKVLSKIACLRLQKELGEWQASPPGGFTYKVSDNLQRWVIEVSGAEGTLYAGETYRLQVDFPEQYPMEAPQVIFMHPAPMHPHIYSNGHICLDILYDSWSPAMTVSSVCISILSMLSSSPAKERPSDNDRYVRNCRNGRSPKETRWWFHDDKV

SEQ ID NO: 59869 - DNA, 1016 bp, Glycine max
  misc_feature (1)..(1016): Ceres Seq. ID no. 13595561
aatcaaatccatgttctagctctgctgtacagttaaccttaagaaacgatgaatcagtgggcgattcagccaaaggctttcgctgcgggaggagagcagagtgttgtagtttgcccaaaaccccgtcgtattggtctcggtaaccatctccaccatccctcctcccgctctctgcgatgttacttcagccagcaagttgaatccaaggctgagactgatatcttagatatcatactcaccaaggaacaagttaatcactcgcaggtattagactcgccgtccccgtttttatgtgggtcgccgccgagtagagtcgctaacccattaacacaggatgctcgtttcagagatgaaatcaagctggtctcttcttccccgatcacgactccgctgggccaacctccgtcgtccccttcttcctctgggaggaaaggaggatgtgttagaggcaattttggtaacagcccagcggttaggatcgaagggtttgattgccttgacagggacagtagaaactgcagcatccctgccttggcttagaaaccaaaccaacctcgaaaacgcatccactctgttgaattatctcatgaaaaccaatttagtgcgtcgtacatatatgagtttaaggatatggaaatgtgtggaatataatctttgagggaagtgaaagagcatgtgagatcaatcttttggragtttggttgttttgtttttaaagagtgtaaataggtgacggagtaaaaccgattttctgggttaagtttttagtattcgtggtcattttgtaagtataagtatcaagtctaaagatgaatcgttgaggataaggaagaataacatttgaaggtcaggttttcttgtgtaaagagagatcgagatagaaaagtgcattttgggtattttctacttttgtttttgtttctattatgtgttcatgttggttatgaagatgagaaagaagaatttgtacaaaaggaaagaaatttaaatgatgtaaattttacttttgaattccg

SEQ ID NO: 59870 - protein, 163 aa, Glycine max
  peptide (1)..(163): Ceres Seq. ID no. 15221612
MNQWAIQPKAFAAGGEQSVVVCPKPRRIGLGNHLHHPSSRSLRCYFSQQVESKAETDILDIILTKEQVNHSQVLDSPSPFLCGSPPSRVANPLTQDARFRDEIKLVSSSPITTPLGQPPSSPSSSGRKGGCVRGNFGNSPAVRIEGFDCLDRDSRNCSIPALA

SEQ ID NO: 59871 - protein, 107 aa, Glycine max
  peptide (1)..(107): Ceres Seq. ID no. 15221613
MLVSEMKSSWSLLPRSRLRWANLRRPLLPLGGKEDVLEAILVTAQRLGSKGLIALTGTVETAASLPWLRNQTNLENASTLLNYLMKTNLVRRTYMSLRIWKCVEYNL

SEQ ID NO: 59872 - protein, 102 aa, Glycine max
  peptide (1)..(102): Ceres Seq. ID no. 15221614
MKSSWSLLPRSRLRWANLRRPLLPLGGKEDVLEAILVTAQRLGSKGLIALTGTVETAASLPWLRNQTNLENASTLLNYLMKTNLVRRTYMSLRIWKCVEYNL

SEQ ID NO: 59873 - DNA, 1666 bp, Glycine max
  misc_feature (1)..(1666): Ceres Seq. ID no. 13595562
catcaaggatattagagtgtgaaaaaggtgaagaacaaaccaaatctttatcatagtcataaatggtaggataggaatgtacatggaaactaggaaaagattgagtaaatatcaaatgtaatataccctttttagtgtgaggcttgaagcccaaaaaaatggaagcagaggctctaagatcaagttttttttttgttattagtgagagtgttgatgtagcataagcaaccaaagactttcaaagaagaaatgtcatatgcagtaccatataatttttcaaaaggagacttattattaagaaatggagttggcaaacaattgatgagtaaaacagcatgttgtaaagcaaaagaccaaaagattggtggtaacttggactgaaaaagaagggctcgagtaacatttaataaatgttgatgctttctttccacaattccattttgttgtagggtttcaacacaggaagtctggtgtatgataccagtattatgataaaactatttcataataaattctggaccattgtctgatcggatagctttcacttttgtattgaattgcctctcaacataggaaacaaaggcttgtaaatgagtttgagtctcagcttttgaagtcattataaaaatccaaacaaatctagtatgatcatccacaattctcgtgcaaaaataatgctagaaaaggttgcaaggtgaaggggtaggtgctcaaaaggggactctgtctgggaaggaagatcttagtggcttctttcgtagcttctgctgccccggttgttgttccacctcttgttgttgcttctgctattggcatggctctttctatgccttgtgttattttcttggctagccatgtttgcactctgagtttaatgagtaagttgctccctaggcctactcctcaggatactttgttgcatgaagagatgtgttttcggccaggtaatgatgttattcacacatataaagaggttgctccctaggcctattacattgcccaatgagaagttagataataacaattttgactttgaaaatcaagaatcacagttgcatgaattaaatgaagggatgtacccgttagatgcagaagctagagaaattgctaatgaaagtgcacttgatttgtttgatggaaaccaaatagaccatgacgagtatgcatacacaattgatttaaatgaaggctcttcaaatgttgtaaggcatacaaattctatgcaggttcttgtttcgtctgttgaaaaagagtcaaggccatctaaatgttcctctgcagaaaaccatgtttgcccttctcaagagctattgcaggttgtattgggtgaagagaacatatggaaaaagatgaatatgatacggaagatagtaggatatgaaggtagaatgcaagcatcatgttcagatgaattaaaagctctctacatgttcactggagttgagcccccaacttgttctctcgctgaaatcaaggagaagctcccwctccttatgtccatccttggaattaaatmgaatgatgctyagacakgtcacacatctttgtactgttttttacatatttccgttaacatgtaatgwgtgttctttttattctccgyggayttccctgggcgatatggagacccaagaaaaggaaaggaaaattattcaamactttcttc

SEQ ID NO: 59874 - protein, 219 aa, Glycine max
  peptide (1)..(219): Ceres Seq. ID no. 15221615
  misc_feature (189)..(189): Xaa is any aa, unknown or other
  misc_feature (199)..(199): Xaa is any aa, unknown or other
  misc_feature (203)..(203): Xaa is any aa, unknown or other
  misc_feature (205)..(205): Xaa is any aa, unknown or other
MKRCVFGQVMMLFTHIKRLLPRPITLPNEKLDNNNFDFENQESQLHELNEGMYPLDAEAREIANESALDLFDGNQIDHDEYAYTIDLNEGSSNVVRHTNSMQVLVSSVEKESRPSKCSSAENHVCPSQELLQVVLGEENIWKKMNMIRKIVGYEGRMQASCSDELKALYMFTGVEPPTCSLAEIKEKLXLLMSILGIKXNDAXTXHTSLYCFLHISVNM

SEQ ID NO: 59875 - protein, 210 aa, Glycine max
  peptide (1)..(210): Ceres Seq. ID no. 15221616
  misc_feature (180)..(180): Xaa is any aa, unknown or other
  misc_feature (190)..(190): Xaa is any aa, unknown or other
  misc_feature (194)..(194): Xaa is any aa, unknown or other
  misc_feature (196)..(196): Xaa is any aa, unknown or other
MMLFTHIKRLLPRPITLPNEKLDNNNFDFENQESQLHELNEGMYPLDAEAREIANESALDLFDGNQIDHDEYAYTIDLNEGSSNVVRHTNSMQVLVSSVEKESRPSKCSSAENHVCPSQELLQVVLGEENIWKKMNMIRKIVGYEGRMQASCSDELKALYMFTGVEPPTCSLAEIKEKLXLLMSILGIKXNDAXTXHTSLYCFLHISVNM

SEQ ID NO: 59876 - protein, 209 aa, Glycine max
  peptide (1)..(209): Ceres Seq. ID no. 15221617
  misc_feature (179)..(179): Xaa is any aa, unknown or other
  misc_feature (189)..(189): Xaa is any aa, unknown or other
  misc_feature (193)..(193): Xaa is any aa, unknown or other
  misc_feature (195)..(195): Xaa is any aa, unknown or other
MLFTHIKRLLPRPITLPNEKLDNNNFDFENQESQLHELNEGMYPLDAEAREIANESALDLFDGNQIDHDEYAYTIDLNEGSSNVVRHTNSMQVLVSSVEKESRPSKCSSAENHVCPSQELLQVVLGEENIWKKMNMIRKIVGYEGRMQASCSDELKALYMFTGVEPPTCSLAEIKEKLXLLMSILGIKXNDAXTXHTSLYCFLHISVNM

SEQ ID NO: 59877 - DNA, 1945 bp, Glycine max
  misc_feature (1)..(1945): Ceres Seq. ID no. 13595833
atattttcgtttttgccgagatagggttttcggttttcttcactgctctctcaccaggggcgagttgtgaatggaagcacaaggcataaagtataaagcataaagcatagttagttgagtcaatggaaggtgttgatcaaagaaatagttctgcatttggtgttccagttccaagaccaccaaaccagaaatctcgtatgccaccatctcaccctagtatcaatgtttcaccttcagcaactccttattcccaataccctcagcgattgcgttctccgggttcctcccattcgaggtctttgtctcaacctcccattttctcgttggattcattgcccccattgagtccttcccctgctgctgttacctccatgtttgactcaatctcaacaactgatatgtctgtggaggaaagtaatgtttcctctcaggtgcccctcaatagagggcatgcccttcttcctcctaggaagggacacaggcgctctagtagtgattcccctttgggaatctctggttttatgcagtcttctccagttccctccggaggagagagctcggggttcgagaagccgattcagttggtcttgaaggcgtcctttagggacagcctggatgggggccatgctaatgagcctgttaatgggaggaaggaggaggctgcggatgatttgttcagggaatacatgaatttggacaactttgataatctgaactttcctggcatggaagataaggacttggatagcaggaccagtggttccaagacagttgagagcagcgataatgaagttgagagtcatgtcaatgggaaggcgagtggggctcagggggcaagttcaagctgctcggaggaaaggagggaaggagtcaagaggagttcaaatggggaggttgcaccgggttcccggcatcggaggagtttttcgttggatagttccatagggaactttaacattgaagatggattgcctaagcttcctccttcgaaaaatcaaatgggtcagcactcacctagcaattcgatggacggcaaaatgtcagaaacctccacggagtttggaaatggcgaatttagtgcagaggaggtaaagaaaataatggaaagtgataaactagctgaaattgcttcgactgatcccaaacgtgcaaaaaggattttggctaatcgtcaatcagctgctcgttcaaaggagaggaagatgcgatacattgctgaattggaacacaaagtgcaaactcttcagacagaaacaaccacattgtctactcagtttaccaaattacagagggataactctgaccttaaaagtgagaacaacgagtgcaaattaaggcttcaagccatggaacaacagtctctattgaaagatgctctgaacgagactttggatgctgaagtccggcgtttgaggcgtgctgttgcagaacttggcggtgaatccctcacaagttgcatggctcgacagcttgctattaaccaacaaatgttcgagttacagcatcagcagcccagccaacagagacattttctactgcaaaatcaccatactcaggaagagatagagtctcgatcacagcagattcaaggcaatgaattgcatccccaggcacagattcagtcacagcagattcaacgcaatgaattgcatccccagccttaaattgcagagaaatatgttgcctattaatggtgccaaatagtggaagcaaaatacttttggacgtggagctggtgaggtataagtataatctcaatcgtacataagcagtgatctagcattagtttgcttgaagtttcataagatcggttcatcatctttatttaatttattattttgactgttttacctgcatacaaactcggactatcctattcatgtagtaaaccttattgtcatgaatacaacccacctttctctattgagaggggtcatgttgttgc

SEQ ID NO: 59878 - protein, 513 aa, Glycine max
  peptide (1)..(513): Ceres Seq. ID no. 13595834
MEGVDQRNSSAFGVPVPRPPNQKSRMPPSHPSINVSPSATPYSQYPQRLRSPGSSHSRSLSQPPIFSLDSLPPLSPSPAAVTSMFDSISTTDMSVEESNVSSQVPLNRGHALLPPRKGHRRSSSDSPLGISGFMQSSPVPSGGESSGFEKPIQLVLKASFRDSLDGGHANEPVNGRKEEAADDLFREYMNLDNFDNLNFPGMEDKDLDSRTSGSKTVESSDNEVESHVNGKASGAQGASSSCSEERREGVKRSSNGEVAPGSRHRRSFSLDSSIGNFNIEDGLPKLPPSKNQMGQHSPSNSMDGKMSETSTEFGNGEFSAEEVKKIMESDKLAEIASTDPKRAKRILANRQSAARSKERKMRYIAELEHKVQTLQTETTTLSTQFTKLQRDNSDLKSENNECKLRLQAMEQQSLLKDALNETLDAEVRRLRRAVAELGGESLTSCMARQLAINQQMFELQHQQPSQQRHFLLQNHHTQEEIESRSQQIQGNELHPQAQIQSQQIQRNELHPQP

SEQ ID NO: 59879 - protein, 488 aa, Glycine max
  peptide (1)..(488): Ceres Seq. ID no. 13595835
MPPSHPSINVSPSATPYSQYPQRLRSPGSSHSRSLSQPPIFSLDSLPPLSPSPAAVTSMFDSISTTDMSVEESNVSSQVPLNRGHALLPPRKGHRRSSSDSPLGISGFMQSSPVPSGGESSGFEKPIQLVLKASFRDSLDGGHANEPVNGRKEEAADDLFREYMNLDNFDNLNFPGMEDKDLDSRTSGSKTVESSDNEVESHVNGKASGAQGASSSCSEERREGVKRSSNGEVAPGSRHRRSFSLDSSIGNFNIEDGLPKLPPSKNQMGQHSPSNSMDGKMSETSTEFGNGEFSAEEVKKIMESDKLAEIASTDPKRAKRILANRQSAARSKERKMRYIAELEHKVQTLQTETTTLSTQFTKLQRDNSDLKSENNECKLRLQAMEQQSLLKDALNETLDAEVRRLRRAVAELGGESLTSCMARQLAINQQMFELQHQQPSQQRHFLLQNHHTQEEIESRSQQIQGNELHPQAQIQSQQIQRNELHPQP

SEQ ID NO: 59880 - protein, 430 aa, Glycine max
  peptide (1)..(430): Ceres Seq. ID no. 13595836
MFDSISTTDMSVEESNVSSQVPLNRGHALLPPRKGHRRSSSDSPLGISGFMQSSPVPSGGESSGFEKPIQLVLKASFRDSLDGGHANEPVNGRKEEAADDLFREYMNLDNFDNLNFPGMEDKDLDSRTSGSKTVESSDNEVESHVNGKASGAQGASSSCSEERREGVKRSSNGEVAPGSRHRRSFSLDSSIGNFNIEDGLPKLPPSKNQMGQHSPSNSMDGKMSETSTEFGNGEFSAEEVKKIMESDKLAEIASTDPKRAKRILANRQSAARSKERKMRYIAELEHKVQTLQTETTTLSTQFTKLQRDNSDLKSENNECKLRLQAMEQQSLLKDALNETLDAEVRRLRRAVAELGGESLTSCMARQLAINQQMFELQHQQPSQQRHFLLQNHHTQEEIESRSQQIQGNELHPQAQIQSQQIQRNELHPQP

SEQ ID NO: 59881 - DNA, 858 bp, Glycine max
  misc_feature (1)..(858): Ceres Seq. ID no. 12611801
gcaggccacataaaaccaaaggaagaagagaacgtctgtcatctgcttaattcctctgtgccgaggtagctgccaattccaaagactctgagtaagaggagaacgtggttagctaggaaatgtgcggcggagctgttatcgccgacttcgtcccggccggggcccgccgcccggatggctcctccgccgacgtccccggctccatcctcgccggtggggaggtgaaggagaaaccgctggcgccggggcggaagacggcgtaccgtgggatcaggcgccggccatggggccgctgggctgcggagatccgggaccccacgaagggcgcgcgcgtctggctgggcacgtacgccaccgcggaggaggccgcgcgcgcctacgacgtcgcggcgcgcgatatccgcgggccgaaggccaagctcaacttcccgcccgcggtgggcgcgccgcaggcggccgcggccgtggaggggccgggggcgcccaagaagcgtcggtgggtcgctgccgaggagagttcggcatcttcgtctccccttccggtcacagctgccggcggcacggagagcctgcgggagcgcatgtccgggctggaggcgttcctggggctggaggacgacgacgtggaggcctggggggccgtcgatctcatcttggattaggcgtgtgccgtcgccacgtgcggcgtccatggggtacatttaccgataaataaataagcagattggtcgaagtcttttgatttgattagctaaagtatcgattggctttcctgggcttttgccagcatatccaggtcctttgtagtgggatgctatgtaattcgagcatgacgatcagaaaaaatgtggttccgag

SEQ ID NO: 59882 - protein, 180 aa, Glycine max
  peptide (1)..(180): Ceres Seq. ID no. 12611802
MCGGAVIADFVPAGARRPDGSSADVPGSILAGGEVKEKPLAPGRKTAYRGIRRRPWGRWAAEIRDPTKGARVWLGTYATAEEAARAYDVAARDIRGPKAKLNFPPAVGAPQAAAAVEGPGAPKKRRWVAAEESSASSSPLPVTAAGGTESLRERMSGLEAFLGLEDDDVEAWGAVDLILD

SEQ ID NO: 59883 - protein, 143 aa, Glycine max
  peptide (1)..(143): Ceres Seq. ID no. 12611803
MGPLGCGDPGPHEGRARLAGHVRHRGGGRARLRRRGARYPRAEGQAQLPARGGRAAGGRGRGGAGGAQEASVGRCRGEFGIFVSPSGHSCRRHGEPAGAHVRAGGVPGAGGRRRGGLGGRRSHLGLGVCRRHVRRPWGTFTDK

SEQ ID NO: 59884 - DNA, 1104 bp, Glycine max
  misc_feature (1)..(1104): Ceres Seq. ID no. 13595647
aaaaaggacctatatgttaggccataactagcctgcactttgaaatctatttcagtttgaattttgaaagtgagtgtggcgtaccgtgtacgtatctgcagaaagtgaatgaatggtaatgggggaagaagggtgcaaggtatgtgttacaggaggcagtggttacattggttcctggctcatcaagaagctactggccaagggctacacagttcatgcaactctcagagacttgaagaatgagtcaaaggttggcctcttaaagagccttccacaatcagaaggaaaactggtgctgtttgaagctgatatttacaacccaaatgattttgaccttgcaattgaaggctgcaagtttgtgtttcatgttgctactcccatgatccatgaacctggctcccagggctatacttattcaaagacactgtcggagagacatgtgctgagctacgggaacgaagaaaatggtggaggaatggaggtggtaacactcacttgtggactagtgggaggtgacacccttctatcttctacacccgctagcggagtagtttgtatcgctcagatcatgcagaatgaaagggcgtacatatcactcaagttcctaaaggaattgttggggaaaattcctcttgtacacgttgatgatgtctgtgaagctcatattttctgcatggaaagcacctcgatcagtggaagattcttgtgtgcaagttcatatatttcattagaagagatggctaatcattacgctcttcattatccagaattcaatgtgaaacaagaatatgaagatgggctgaagaaggatatcaagtgggcctcaacaaagctgtgtgacaaaggctttgtatacaaatatgacgccaagatgctattggatgattgtatcaaatgtgcaagaaggatgggtgatatctagtctccatctacacccttgattgctatatctgcttgtaatacaatatgcaccaggcgtctgcctcatttcttcttgctccctatcttactgttgttactattgttttcgcaattatgattaaaaaataaactcggcttcaaatcaattagaaaagtgaattgactgcgactatgagagtttcc

SEQ ID NO: 59885 - protein, 269 aa, Glycine max
  peptide (1)..(269): Ceres Seq. ID no. 13595648
MVMGEEGCKVCVTGGSGYIGSWLIKKLLAKGYTVHATLRDLKNESKVGLLKSLPQSEGKLVLFEADIYNPNDFDLAIEGCKFVFHVATPMIHEPGSQGYTYSKTLSERHVLSYGNEENGGGMEVVTLTCGLVGGDTLLSSTPASGVVCIAQIMQNERAYISLKFLKELLGKIPLVHVDDVCEAHIFCMESTSISGRFLCASSYISLEEMANHYALHYPEFNVKQEYEDGLKKDIKWASTKLCDKGFVYKYDAKMLLDDCIKCARRMGDI

SEQ ID NO: 59886 - protein, 267 aa, Glycine max
  peptide (1)..(267): Ceres Seq. ID no. 13595649
MGEEGCKVCVTGGSGYIGSWLIKKLLAKGYTVHATLRDLKNESKVGLLKSLPQSEGKLVLFEADIYNPNDFDLAIEGCKFVFHVATPMIHEPGSQGYTYSKTLSERHVLSYGNEENGGGMEVVTLTCGLVGGDTLLSSTPASGVVCIAQIMQNERAYISLKFLKELLGKIPLVHVDDVCEAHIFCMESTSISGRFLCASSYISLEEMANHYALHYPEFNVKQEYEDGLKKDIKWASTKLCDKGFVYKYDAKMLLDDCIKCARRMGDI

SEQ ID NO: 59887 - protein, 180 aa, Glycine max
  peptide (1)..(180): Ceres Seq. ID no. 13595650
MIHEPGSQGYTYSKTLSERHVLSYGNEENGGGMEVVTLTCGLVGGDTLLSSTPASGVVCIAQIMQNERAYISLKFLKELLGKIPLVHVDDVCEAHIFCMESTSISGRFLCASSYISLEEMANHYALHYPEFNVKQEYEDGLKKDIKWASTKLCDKGFVYKYDAKMLLDDCIKCARRMGDI

SEQ ID NO: 59888 - DNA, 992 bp, Glycine max
  misc_feature (1)..(992): Ceres Seq. ID no. 13595658
agaacatcctaatcgaaaaaccaagctcctcctcctccacaggaaaagcaacagcgcagcgcggcttcactggtttcgccctcaatttcgagagcgagtcttggaaggccttccatggctcagccgtcgctgctcctcggctctccggcatcgatcgtcctcctccttctctccttcttccaagggccggtagtgagcgccatcacgttcaccttcgccaaccggtgcacggacacggtgtggcccgggctgctctcgggctccacctcgccgccgctggaaaccaccggcttcgcgctctcgccgggccagtcgcgctcaatctacgggcccaccgggtggtcgggccgcttctgggcgcgctctggctgtaatttcaacggcggcaagggcacctgcgtcacgggggactgcggctccggcgagatagagtgccgcggcgccggggccaccccgcccgccacgctcgcggagttcaccctcgacggcgacggcgggaaggacttctacgacgtcagcctcgtcgacggctacaacctgcccatgctggtgcagccgtccgcgcctgggtgccccgacaccgggtgcctcgtcgacctcaacgagcgctgcccctcggagctccgctccggcggcggcctcgcctgccgcagcgcctgcgaggccttcggcaagcccgagttctgctgcaacggcgcctacgggaaccctgacacgtgccacccctcccagtactcgcagctcttcaagtcggcgtgccccaagtcctacagctacgcctacgacgacgccacctccaccttcacctgcaaccacaccgattacaccattaccttctgcccgcagtccaatccttacaggtacctacctctgaatagtttctgatgctatgacagtgcaatctagttgaaatcatagtgttgcagatctgaatctgattcaactcaacaatgatattttctctgggctagaaatataatgagattttgatt

SEQ ID NO: 59889 - protein, 256 aa, Glycine max
  peptide (1)..(256): Ceres Seq. ID no. 13595659
MAQPSLLLGSPASIVLLLLSFFQGPVVSAITFTFANRCTDTVWPGLLSGSTSPPLETTGFALSPGQSRSIYGPTGWSGRFWARSGCNFNGGKGTCVTGDCGSGEIECRGAGATPPATLAEFTLDGDGGKDFYDVSLVDGYNLPMLVQPSAPGCPDTGCLVDLNERCPSELRSGGGLACRSACEAFGKPEFCCNGAYGNPDTCHPSQYSQLFKSACPKSYSYAYDDATSTFTCNHTDYTITFCPQSNPYRYLPLNSF

SEQ ID NO: 59890 - DNA, 1572 bp, Glycine max
  misc_feature (1)..(1572): Ceres Seq. ID no. 13582332
gaacacaagacaacaacaacaaatcttaagttggctttcttctcttttgttcgaccgtgtcacgtgcgagaacaatgagaattgccattttccactccctatctaaacctttgaatcttattcgattcaatttcatcacaacttaaataccatcgcatgttcattcattgatggtcatgttcttcccttaaaccttcctcaaaaagtcaaaattgaaaacctttctctctcttaactccttctcgtcatcgccccaaagcttctcaacaacatgacggataatgaagaaccgatgatcgtacctggatcgatgtctgaattagcgtttaataaatataagcgatggcaatggtggtgtcttgtgacactcagcatagcctttcttatagttggccaatctgctgctgttatccttggaagattttattatgatcagggtggaaatagtaaatggatggctactctagttcaaactgctgccttcccgatcttgttcattccattatttacaattccttcacctccagaggcttcaacttctgcttcacctcccatcaaaattattcttttgatatattttggtcttggagtcttaattgctgctgacaatatgatgtactccactggactcttatacctctcggcttctacctattcgctgatttgtgcatcacagttagcttttaatgcagttttctcatattttatcaattctcaaaagttcactgccttgattataaactctacagtggttctcactttatctgctgcactccttgctgttaacgaagacacagatgaaccatctggtttctccaagggaaagtacattattggtttcctatgtacccttggagcttctgcagtgtactctcttttgctttccctcatgcagctgacctttgagaaggttctgaagaaggaaacattttctgttgttttggaaatgcaaatctacacatcattcgttgcctctggtgcttctgtcataggcctatttgcaagtggggaatggcgtactttgcatggagaaatggagggttttcagaaaggatatgttgcttatgttatgactttggtttggacttcaatagcctggcaggtatgctctgttggtgttgttggcttgatcttcctagtgtcttctctctactccaatgttataagcacagtttctttagccgtaactcctattgctgctgttatagtttttcatgataagatgaatggggtgaagataatttctatgcttttggctctatggggttttgcctcttatatttatcagaattatcttgatgattcaaagacaagacatgcacaagctgctactaagtcccaaaatgattcttcatgttgagaatattcaatttggtcatacctttgtcgaagtttccttttttctttttagatttaaatccttcagtacaccattcgctagctttagattttatttttccttcagtctcactgaacttgtgaggtagtatagttatgaagttattggtcattctagattattgctctctcatttaagaaatgaaaagtttattggtgtctcggactggttgg

SEQ ID NO: 59891 - protein, 362 aa, Glycine max
  peptide (1)..(362): Ceres Seq. ID no. 13582333
MTDNEEPMIVPGSMSELAFNKYKRWQWWCLVTLSIAFLIVGQSAAVILGRFYYDQGGNSKWMATLVQTAAFPILFIPLFTIPSPPEASTSASPPIKIILLIYFGLGVLIAADNMMYSTGLLYLSASTYSLICASQLAFNAVFSYFINSQKFTALIINSTVVLTLSAALLAVNEDTDEPSGFSKGKYIIGFLCTLGASAVYSLLLSLMQLTFEKVLKKETFSVVLEMQIYTSFVASGASVIGLFASGEWRTLHGEMEGFQKGYVAYVMTLVWTSIAWQVCSVGVVGLIFLVSSLYSNVISTVSLAVTPIAAVIVFHDKMNGVKIISMLLALWGFASYIYQNYLDDSKTRHAQAATKSQNDSSC

SEQ ID NO: 59892 - protein, 355 aa, Glycine max
  peptide (1)..(355): Ceres Seq. ID no. 13582334
MIVPGSMSELAFNKYKRWQWWCLVTLSIAFLIVGQSAAVILGRFYYDQGGNSKWMATLVQTAAFPILFIPLFTIPSPPEASTSASPPIKIILLIYFGLGVLIAADNMMYSTGLLYLSASTYSLICASQLAFNAVFSYFINSQKFTALIINSTVVLTLSAALLAVNEDTDEPSGFSKGKYIIGFLCTLGASAVYSLLLSLMQLTFEKVLKKETFSVVLEMQIYTSFVASGASVIGLFASGEWRTLHGEMEGFQKGYVAYVMTLVWTSIAWQVCSVGVVGLIFLVSSLYSNVISTVSLAVTPIAAVIVFHDKMNGVKIISMLLALWGFASYIYQNYLDDSKTRHAQAATKSQNDSSC

SEQ ID NO: 59893 - protein, 349 aa, Glycine max
  peptide (1)..(349): Ceres Seq. ID no. 13582335
MSELAFNKYKRWQWWCLVTLSIAFLIVGQSAAVILGRFYYDQGGNSKWMATLVQTAAFPILFIPLFTIPSPPEASTSASPPIKIILLIYFGLGVLIAADNMMYSTGLLYLSASTYSLICASQLAFNAVFSYFINSQKFTALIINSTVVLTLSAALLAVNEDTDEPSGFSKGKYIIGFLCTLGASAVYSLLLSLMQLTFEKVLKKETFSVVLEMQIYTSFVASGASVIGLFASGEWRTLHGEMEGFQKGYVAYVMTLVWTSIAWQVCSVGVVGLIFLVSSLYSNVISTVSLAVTPIAAVIVFHDKMNGVKIISMLLALWGFASYIYQNYLDDSKTRHAQAATKSQNDSSC

SEQ ID NO: 59894 - DNA, 695 bp, Glycine max
  misc_feature (1)..(695): Ceres Seq. ID no. 12611808
gccacacacacgcacacacaccagattcatcaagaaaacctcgagaggatcatggccggcgtgaacaccagtgtggtcggcctcaagcccgccgcggcggtgccgcagtccgcctcgccggcggcggcaaagcgcgtgcaggtcgccccggccaaggaccggcggtcggcgcttctcggcctggcggccgtcttcgccgtcacggccgcctccgccgggtcggccagggcaagcgtcttcgacgagtacctcgagaagagcaagctcaacaaggagctgaacgacaagaagagggcggcgacgagcggcgccaacttcgcgcgcgcctacaccgtccagttcggcagctgcaagttcccctacaacttcaccggctgccaggacctcgccaagcagaagaaagtcccgttcatcaccgacgacctggagatcgagtgcgaggggaaggagaagttcaagtgcggatccaacgtcttctggaaatggtgaagctggtcgatctgccaggcaatatggcgagtgctgatgtatgtcagcgcaccgcgtgtacctagatgtccaaactgcgcaagtgtttcgactgtgaagttatcgtcgctgtaattttatcatcatcaagtggaattctgttttcacctggatatggatatatgcatgttagcatgtatcttgtcacatccagaacgcgaacattc

SEQ ID NO: 59895 - protein, 183 aa, Glycine max
  peptide (1)..(183): Ceres Seq. ID no. 12611809
HTHAHTPDSSRKPREDHGRREHQCGRPQARRGGAAVRLAGGGKARAGRPGQGPAVGASRPGGRLRRHGRLRRVGQGKRLRRVPREEQAQQGAERQEEGGDERRQLRARLHRPVRQLQVPLQLHRLPGPRQAEESPVHHRRPGDRVRGEGEVQVRIQRLLEMVKLVDLPGNMASADVCQRTACT

SEQ ID NO: 59896 - protein, 162 aa, Glycine max
  peptide (1)..(162): Ceres Seq. ID no. 12611810
ATHTHTHQIHQENLERIMAGVNTSVVGLKPAAAVPQSASPAAAKRVQVAPAKDRRSALLGLAAVFAVTAASAGSARASVFDEYLEKSKLNKELNDKKRAATSGANFARAYTVQFGSCKFPYNFTGCQDLAKQKKVPFITDDLEIECEGKEKFKCGSNVFWKW

SEQ ID NO: 59897 - protein, 145 aa, Glycine max
  peptide (1)..(145): Ceres Seq. ID no. 12611811
MAGVNTSVVGLKPAAAVPQSASPAAAKRVQVAPAKDRRSALLGLAAVFAVTAASAGSARASVFDEYLEKSKLNKELNDKKRAATSGANFARAYTVQFGSCKFPYNFTGCQDLAKQKKVPFITDDLEIECEGKEKFKCGSNVFWKW

SEQ ID NO: 59898 - DNA, 803 bp, Glycine max
  misc_feature (1)..(803): Ceres Seq. ID no. 13595582
acatcctaatcgaaaaaaaacctatttagtgtaagaaatagctaggttccacacagctgggttttgtactaaggcaagccattcattcggtgtgacagtccctgagactcgagagactgttgccgccggtattaattctcctcctcctcctccttcttcttcttctccccaaaaccctaatttcttctattcaccaaatcatattcatggctgaacacaacgacccaccccaagaacccacattgccctccaagcgcatgtccgatcccgacctccaagacctcccttccaaaatccccaagctcgacctcaaagaaacactacccactgcaaacgacaacgacctccaaaacgacgatgaagatgacgacgacaacgacgacgacgaggaggagcaggaggataaccgaaagggaaaggggattatgcgtgacgacaagggcaaagggaaaatgattgtagaagaagaagacgacgacgacgatgattccgacgaggatagtgctagcgacgacgacggaagcgatttctctaacgactcgctcacggaggtcgatttgaataacattctgccgtccaggactcgggggcggacggtgagttccggagtgcacattgccggtgactcggggaatgctgctgctgccgtggccgcgggcattgacgacgaagatagcgacagcgacgatagcgatgcttgaattcctgccgaggttagtgagggtttgggaggaaacggaaatggattagttctgttgttgactatgagaaagaagtgtttctttagatttttctttgagccc

SEQ ID NO: 59899 - protein, 164 aa, Glycine max
  peptide (1)..(164): Ceres Seq. ID no. 13595583
MAEHNDPPQEPTLPSKRMSDPDLQDLPSKIPKLDLKETLPTANDNDLQNDDEDDDDNDDDEEEQEDNRKGKGIMRDDKGKGKMIVEEEDDDDDDSDEDSASDDDGSDFSNDSLTEVDLNNILPSRTRGRTVSSGVHIAGDSGNAAAAVAAGIDDEDSDSDDSDA

SEQ ID NO: 59900 - protein, 147 aa, Glycine max
  peptide (1)..(147): Ceres Seq. ID no. 13595584
MSDPDLQDLPSKIPKLDLKETLPTANDNDLQNDDEDDDDNDDDEEEQEDNRKGKGIMRDDKGKGKMIVEEEDDDDDDSDEDSASDDDGSDFSNDSLTEVDLNNILPSRTRGRTVSSGVHIAGDSGNAAAAVAAGIDDEDSDSDDSDA

SEQ ID NO: 59901 - protein, 91 aa, Glycine max
  peptide (1)..(91): Ceres Seq. ID no. 13595585
MRDDKGKGKMIVEEEDDDDDDSDEDSASDDDGSDFSNDSLTEVDLNNILPSRTRGRTVSSGVHIAGDSGNAAAAVAAGIDDEDSDSDDSDA

SEQ ID NO: 59902 - DNA, 1529 bp, Glycine max
  misc_feature (1)..(1529): Ceres Seq. ID no. 13595665
aataacttagatgggttgggaatgagggtagtggcgagacagtgagagggtggaaatggcggctgtggcagcgagaagcacaggcagcgttggtgttggtgctgtcatcttcatctcagtcgctctcaccacttatttcatctcgaaaaagaagaagaagaagaagaaggaatccaggaagaagaagaagggactggtggacgccataggcaacactcctttgattcggatcaacagcctctccgccgccactggttgccaaattctcggcaagtgcgagttcttaaaccccggaggcagcgtcaaagaccgcgttgctgttcaaattattcaagaggctctagaatctggccagctacgtccaggtggaatagtcactgaagggagtgctggaagcactgccattagcattgccactgttgctcctgcctacgggtgcaggacccatgtggttataccagatgatgctgccattgagaagtctcaaatacttgaagcccttggggcaactgttgaaagagtgagaccggtgtccatcacccacaaagaccattttgtcaatattgcaagaagacgggcatctgaagcaaatgagtttgcattgaagcgtagaaattcacaacaattgaatggcaaggaggacaccgagaaaataaatggttatgaatctaatggatgcaattacagctctctgtttcctgaagattgtcaaggtggcttttttgctgatcagtttgagaacctagcgaacttcagggcccattatgagggtacagggcctgagatttgggaacagaccaatggaaagttagatgcatttgttgcagcagcgggtaccggtggtactgtggctggtgtttctaagtttcttcaggaaaagaatccaaacatcaagtgcttcctcttagatcctcctggctctggtttgtttaataaggtaactaggggagtgatgtacaccaaagaggaggcagaaggaagaagactcaagaatccatttgacactataacagaaggaattggaattaacaggataacaaggaattttgcaatggcaaaacttgatggggcctttagaggcaccgatagggaagctgttgaaatgtctaggtttcttttgaagaacgatggtctcttccttgggagttcttctgcaatgaactgtgttggagcagttagagtagcgcaagcaattggcactggtcacacaattgtaaccattctctgcgacagtggaatgagacatttgagcaaattctatgatgctgaatacttgtctcagcttggtttgacaccgaaagcaattggtttggagttcttaggcgtcaagtgagaaggtttcttcagagtttaaaattttaatgccactgccttggatgagagtggccacctagaagttagaactgagggtgttgtagttattgatatagaagatattacacttattaatacaatgttttggggatattacatggctcattctttgttagtctttcatggtttattgatttattaactaggccaagatg

SEQ ID NO: 59903 - protein, 425 aa, Glycine max
  peptide (1)..(425): Ceres Seq. ID no. 13595666
MAAVAARSTGSVGVGAVIFISVALTTYFISKKKKKKKKESRKKKKGLVDAIGNTPLIRINSLSAATGCQILGKCEFLNPGGSVKDRVAVQIIQEALESGQLRPGGIVTEGSAGSTAISIATVAPAYGCRTHVVIPDDAAIEKSQILEALGATVERVRPVSITHKDHFVNIARRRASEANEFALKRRNSQQLNGKEDTEKINGYESNGCNYSSLFPEDCQGGFFADQFENLANFRAHYEGTGPEIWEQTNGKLDAFVAAAGTGGTVAGVSKFLQEKNPNIKCFLLDPPGSGLFNKVTRGVMYTKEEAEGRRLKNPFDTITEGIGINRITRNFAMAKLDGAFRGTDREAVEMSRFLLKNDGLFLGSSSAMNCVGAVRVAQAIGTGHTIVTILCDSGMRHLSKFYDAEYLSQLGLTPKAIGLEFLGVK

SEQ ID NO: 59904 - DNA, 953 bp, Glycine max
  misc_feature (1)..(953): Ceres Seq. ID no. 12611846
ttccaccgcacaaaccaaatcccactcccacaatttccggaatagcaagcgcgccgccgccgcagcggttggccagctctccggggcggggctcaccgccggttcggtgaggctgccgggggccctgccgtctgcggcagggtcggcggtctgctgcagggccgcggcgaaggggaaggaggtgctcagcggcgtgatgttccagccgttcgaggagctcaagggggagctgtccctcgtgccgcagggcaaggaccagtcgctcgccaggcacaagttcgtcgacgagtgcgaggccgccctcaacgagcagatcaatgtggagtacaatgcctcgtacgcgtatcactccctcttcgcctacttcgaccgcgacaacgttgctctcaagggatttgccaagttcttcaaggaatcaagcgatgaggagagggggcacgccgagaagctcatggagtaccagaacaaacgtggaggcagggtgaggctccagtcaattgtcacacccttaacggagttcgaccatcctgagaaaggcgatgccctgtatgcaatggagttggctctagctcttgaaaagctggtgaatgagaaactgcacaacctgcacagtgtagctacgaggtgcaatgatcctcagctgaccgactttgttgagagcgaattccttcaggagcaggttgacgccatcaagaagatctctgagtatgtgtcgcagctgagaagagtcggcaaaggccacggagtgtggcacttcgatcagatgctgcttgaggaggcagcttgaaggacacgatgactacgggcaatggaggatgtaggtgtgatatgtcaagtagtggacagataagccaaccactggatgtggttctgagggatttttgcagtggggtttgtagggtgctataatgctgaactgctctgtgtttgggattgaaataaaacgaagggag

SEQ ID NO: 59905 - protein, 261 aa, Glycine max
  peptide (1)..(261): Ceres Seq. ID no. 12611847
STAQTKSHSHNFRNSKRAAAAAVGQLSGAGLTAGSVRLPGALPSAAGSAVCCRAAAKGKEVLSGVMFQPFEELKGELSLVPQGKDQSLARHKFVDECEAALNEQINVEYNASYAYHSLFAYFDRDNVALKGFAKFFKESSDEERGHAEKLMEYQNKRGGRVRLQSIVTPLTEFDHPEKGDALYAMELALALEKLVNEKLHNLHSVATRCNDPQLTDFVESEFLQEQVDAIKKISEYVSQLRRVGKGHGVWHFDQMLLEEAA

SEQ ID NO: 59906 - protein, 196 aa, Glycine max
  peptide (1)..(196): Ceres Seq. ID no. 12611848
MFQPFEELKGELSLVPQGKDQSLARHKFVDECEAALNEQINVEYNASYAYHSLFAYFDRDNVALKGFAKFFKESSDEERGHAEKLMEYQNKRGGRVRLQSIVTPLTEFDHPEKGDALYAMELALALEKLVNEKLHNLHSVATRCNDPQLTDFVESEFLQEQVDAIKKISEYVSQLRRVGKGHGVWHFDQMLLEEAA

SEQ ID NO: 59907 - DNA, 1541 bp, Glycine max
  misc_feature (1)..(1541): Ceres Seq. ID no. 15178260
acttctggactctctagctagcacctctctctattctctccctaagtgactcctacttcataatcagagggcatgcctgaatgtccagagaaagggagagatttgatgagatagggaagaagatcaagagggaaggagatgtttcatctcaaatgggaagaagacacatgttaggccctccaggaaccctaaatactatcaccccttgtgcggcatgtaagttgttgagaagaagatgtgcccaagaatgtcccttttctccatatttctctccccatgagccccaaaaatttgcttctgtccacaaagtttttggtgccagcaacgtctcaaagatgctcatggaagtaccagagtgtcaaagagctgatgcagcaaatagtctagtatatgaggctaatgtgaggctaagagatcctgtgtatggatgcatgggtgcaatttctgctttgcaacagcaagttcaatctttacaagctgaacttaatgcagtgagaggtgaaatacttaaatacaaactcagggaagctaacatgataccctcctctcatgttgcaatgctcccttcatctggggctgtttcaattgctgctccaccgccgccaccaccaccaccaccacctcttcctcctccttctcttcctcttcctcttcctctaacttcttcccctccttccatgtacatccaacaaagggatcccaccacttataccacaatttcaagtgataatatctcctattttgtctaaatttgcagcctaaaaacaattattccatttatttctctcttaagatgcatcaaggtggaataaagtaaagaaaaggagagtattgatactgaatgttgttatgccccggctgtatgcttttattattattattattatcttaattcatatgattaatactcccaaaacttcccctggctatatggttggttaaacttttatttcttgtacaccttttcaagctaattaaagctagctactaccatattggaaattaatttctccttgatcctgtgattaactattgcatttcttccccagcctcaagtacaaccgatgtagacataatgccaacttgatatatatttatgccaattaattttcccttcattattttatgaagcaatggacaataaagggggaaaagaaacttggttttatattccattgatgatatttgatcaatttggtatgtgaaacatagcaaattaagggtgggaggagggaatcactggtattgttggtagaattaattctgcacgtacgtgatgactgtggttcgtgaccataacatttcttagacatgttaatctgtgccactgaagtatctgagtttgctgtctgaagttgcgggagacaaaaggtatgcttgtgaccttcaccatgttgagtcagacttaacttctgagaaatttcgtttatatatatggaaattgggaagcataattttacgtcaagttatctatcatttgtattatacagtcaaaactatgttatattgctaactagattgagaattgagtattctaatgt

SEQ ID NO: 59908 - protein, 222 aa, Glycine max
  peptide (1)..(222): Ceres Seq. ID no. 15178261
MSRERERFDEIGKKIKREGDVSSQMGRRHMLGPPGTLNTITPCAACKLLRRRCAQECPFSPYFSPHEPQKFASVHKVFGASNVSKMLMEVPECQRADAANSLVYEANVRLRDPVYGCMGAISALQQQVQSLQAELNAVRGEILKYKLREANMIPSSHVAMLPSSGAVSIAAPPPPPPPPPPLPPPSLPLPLPLTSSPPSMYIQQRDPTTYTTISSDNISYFV

SEQ ID NO: 59909 - protein, 198 aa, Glycine max
  peptide (1)..(198): Ceres Seq. ID no. 15178262
MGRRHMLGPPGTLNTITPCAACKLLRRRCAQECPFSPYFSPHEPQKFASVHKVFGASNVSKMLMEVPECQRADAANSLVYEANVRLRDPVYGCMGAISALQQQVQSLQAELNAVRGEILKYKLREANMIPSSHVAMLPSSGAVSIAAPPPPPPPPPPLPPPSLPLPLPLTSSPPSMYIQQRDPTTYTTISSDNISYFV

SEQ ID NO: 59910 - protein, 193 aa, Glycine max
  peptide (1)..(193): Ceres Seq. ID no. 15178263
MLGPPGTLNTITPCAACKLLRRRCAQECPFSPYFSPHEPQKFASVHKVFGASNVSKMLMEVPECQRADAANSLVYEANVRLRDPVYGCMGAISALQQQVQSLQAELNAVRGEILKYKLREANMIPSSHVAMLPSSGAVSIAAPPPPPPPPPPLPPPSLPLPLPLTSSPPSMYIQQRDPTTYTTISSDNISYFV

SEQ ID NO: 59911 - DNA, 1024 bp, Glycine max
  misc_feature (1)..(1024): Ceres Seq. ID no. 14314739
tcggatgtaatgaaaggagtgatatattgtctttggaatttgactgtgttgtcttcttctttgtgactcactctctcttcagctcttgaatttgatccacctgtgttgcttttcccaccaaaccaaacaaaataacctgatattaacgtaatagtagttcttttatcgaacattgtgccatgacattcgacgaggtttccatggaacacggcaagagcttcatcttcgccttgcaggaacttaagaacctgaggcctcaactctattctgctgcagactactgtgagaaatcttatctcaatagtgataaaaaaccaatggtacttgacaacatgaaagattatgtagtaagggcccttgttaatgctgttgatcatctaggaactgtggcttacaagttaagcgacattcttgagaagcaaacatttgatgtctcgaccatggatttgaaggtctctactttgaatcagagacttcttacatggcatatgtacactgataaagaaggtcttcggcaacagcagttgttggctttcattcccagacatcataagcactacattttgccaaatcccgtcaataaaaaggtacatttcatcccacacagaaaaattggtgcaagacaaaattcatttcaaaccagaactcgtcttcattcttcaggtacccctatttcaaaaactctttcatggcatttagcatcagaaactaagtctaccttaaaaaaacagacttcacgcacttcaaaaaacaccaaggactcaaaattttataagaagatctctggagttttccaccttttagatagtgaagggagtacgcggatgaaaacctcagcagcacaacctcacttgacaaatggagttcctacttctggtgctgccacccaaactatgggtgccacaggcagggtaatgccactttcatcaggttcaaatgcctggtggtgccatgtttgatagaatagtgaaattgtgattattgttgaccaatatgttgctatttattttcgtgtgtttgcaaa

SEQ ID NO: 59912 - protein, 259 aa, Glycine max
  peptide (1)..(259): Ceres Seq. ID no. 14314740
MTFDEVSMEHGKSFIFALQELKNLRPQLYSAADYCEKSYLNSDKKPMVLDNMKDYVVRALVNAVDHLGTVAYKLSDILEKQTFDVSTMDLKVSTLNQRLLTWHMYTDKEGLRQQQLLAFIPRHHKHYILPNPVNKKVHFIPHRKIGARQNSFQTRTRLHSSGTPISKTLSWHLASETKSTLKKQTSRTSKNTKDSKFYKKISGVFHLLDSEGSTRMKTSAAQPHLTNGVPTSGAATQTMGATGRVMPLSSGSNAWWCHV

SEQ ID NO: 59913 - protein, 252 aa, Glycine max
  peptide (1)..(252): Ceres Seq. ID no. 14314741
MEHGKSFIFALQELKNLRPQLYSAADYCEKSYLNSDKKPMVLDNMKDYVVRALVNAVDHLGTVAYKLSDILEKQTFDVSTMDLKVSTLNQRLLTWHMYTDKEGLRQQQLLAFIPRHHKHYILPNPVNKKVHFIPHRKIGARQNSFQTRTRLHSSGTPISKTLSWHLASETKSTLKKQTSRTSKNTKDSKFYKKISGVFHLLDSEGSTRMKTSAAQPHLTNGVPTSGAATQTMGATGRVMPLSSGSNAWWCHV

SEQ ID NO: 59914 - protein, 213 aa, Glycine max
  peptide (1)..(213): Ceres Seq. ID no. 14314742
MVLDNMKDYVVRALVNAVDHLGTVAYKLSDILEKQTFDVSTMDLKVSTLNQRLLTWHMYTDKEGLRQQQLLAFIPRHHKHYILPNPVNKKVHFIPHRKIGARQNSFQTRTRLHSSGTPISKTLSWHLASETKSTLKKQTSRTSKNTKDSKFYKKISGVFHLLDSEGSTRMKTSAAQPHLTNGVPTSGAATQTMGATGRVMPLSSGSNAWWCHV

SEQ ID NO: 59915 - DNA, 944 bp, Glycine max
  misc_feature (1)..(944): Ceres Seq. ID no. 14314759
gaccccgggaaaaagaaaagaaaagaaactcacagctattgaatttcacttcacttcacttgcatgccaaatgaaaacaacctcttcccagaatcttgtcggtatttaactccctcgatttcacaacaccaataacaatgagagtttcaacagagacagagccggagactaaaaagataaaacgcattcgcggcggcggggactcgagcaagcaccctttgtaccgcggcgtgcggatgcggaactgggggaagtgggtgtcggaaatccgcgagccgaggaagaaatcgcggatatggctaggcacattccccacgccggaaatggcggcgagagcgcacgacgtcgccgctctcagcatcaaaggccccgccgccattctcaacttccctcacttggccaactcgctcccccgcccggcttcgctggcgccgcgcgacgttcaagctgcggcggcgaaggcggcgcacatggacccttcctccctctcctccttggtctccgcaatggacttgtcctctgcctctgacgagttgagccaaatcatagagcttccttctttggaaagcaccgatgatggctctgttgacttaaagaaggagtttgtttttgttgattcccttgatgcttggatgtatcagccaccctttggttttgacaccgaacaagacactggtttcgagggtttgatgtggaattactaggttcgatccaagtttctattctatgtcttgtgtttgtataaatttatatcgatctcttttatgttttggtttgtgtgtgtctataagcagtaagcagccacttgtggtttttctttcgggggctgccagtgctactgatcactctcgtattcatcatcatgtctctgtgtccttttcttaattcctctgattttaattgtaaatggctagatgaataaagtaagaggagaaattttctgt

SEQ ID NO: 59916 - protein, 188 aa, Glycine max
  peptide (1)..(188): Ceres Seq. ID no. 14314760
MRVSTETEPETKKIKRIRGGGDSSKHPLYRGVRMRNWGKWVSEIREPRKKSRIWLGTFPTPEMAARAHDVAALSIKGPAAILNFPHLANSLPRPASLAPRDVQAAAAKAAHMDPSSLSSLVSAMDLSSASDELSQIIELPSLESTDDGSVDLKKEFVFVDSLDAWMYQPPFGFDTEQDTGFEGLMWNY

SEQ ID NO: 59917 - protein, 155 aa, Glycine max
  peptide (1)..(155): Ceres Seq. ID no. 14314761
MRNWGKWVSEIREPRKKSRIWLGTFPTPEMAARAHDVAALSIKGPAAILNFPHLANSLPRPASLAPRDVQAAAAKAAHMDPSSLSSLVSAMDLSSASDELSQIIELPSLESTDDGSVDLKKEFVFVDSLDAWMYQPPFGFDTEQDTGFEGLMWNY

SEQ ID NO: 59918 - protein, 126 aa, Glycine max
  peptide (1)..(126): Ceres Seq. ID no. 14314762
MAARAHDVAALSIKGPAAILNFPHLANSLPRPASLAPRDVQAAAAKAAHMDPSSLSSLVSAMDLSSASDELSQIIELPSLESTDDGSVDLKKEFVFVDSLDAWMYQPPFGFDTEQDTGFEGLMWNY

SEQ ID NO: 59919 - DNA, 1889 bp, Glycine max
  misc_feature (1)..(1889): Ceres Seq. ID no. 14314755
ctagtttttctaacgtttatgacttttctttcccttcttgggtagtcaggtcccgcagcatcgaaaacctggtctggttcaacatgcataggtagttgagtgcagtgattcagattgtttttttttttttttttggctctttttgctttatttgcactcttcttatcagaaaccaagacaacaagagtttaacgttacttcatcatctctgtctctttgctatttcttttgttagcagaaaccaagacaacaagagttgagtatagtgttcttgtaccacagacagcgcagggtgtagcacatcattcctcgatcgagctcgctccaatggcagagacaccaaacaaaggccacatcgtgatggtacctctcatggcacaaggtcacctcatcccatttctcgcactagcaagacaaatccaacaaaacacaagcttcaccatcaccatagccaacacaccccaaaacattcaacaccttcgatctgcactttcttcttctacttctcctaatcatcaaatccatcttgctgagttagtacccttcaactctacccaacactccaacaaagacaacaacacacaaaaggctcctctcactgacctattgaaacttggctatgcatcactcacccttgagcctccttttcgctccttgatatcacagatcacagaagaagacggtcaccctccactttgcataatatctgacatgttccttggttgggttaacaatgttgcaaagagcttaggcactaggaacctaaccttcaccacttgtggtgcttatggtatcttggcctatatctctatctggtccaacctccctcataggaaaactgattctgatgagttccatgttccgggattccctcaaaactaccgtttccacaaaacacaactgcataggtttcttcaagcggctgatggcaccgatgactggtcaagattcctcgttccacagattcaactttctatgaagtctgatgggtggatttgcaatacgattgaaaagatagagcctttggggttaaagcttctcaggaactatcttcaacttcccgtttgggccgtggggcctctccttccacctgcttcactcatgggttcaaaacatcgttcaggaaaggaaactggcatagctcttgatgcatgcatggagtggctggattcaaaggatgaaaattctgttctctatatttcatttgggtcactgcacactatcaatgcatctcaaatgatggctttggctgagggtttggaagagagtggcaaatcgtttatttgggttataaggccaccagttggttttgacatcaatggagagttcagtccagaatggttgccaaaagggtttgaagagagaatgagagacaccaaacgtggccttttggtgcacaaatggggaccccagttggagattctgtcacacacatccacaggagcttttctaagccattgtggatggaactctgtgttggagagtctcagctatggggtgcctatgattgggtggccaattgttgcagatcaaccttataatgtgaagatgttggtggaagaaatgggtgtggctgtggaacttactcgttctacggaaactgttgtttctagggagaaggttaagaagaccatagaaatagtcatggattatgaagggaagggaaaggtgatgaaggagaaggcaaatgagattgcagcttacattagagaggccaaaacagagaaaggtaaagaaaaagggtcttctgtgagagcaatggatgatcttgttacaaccattttatcacccaaggttctgtgatttgttgcatttagaatttagaatttgaatgatataataaagttgcttgtgtgagcatacttgtcataaactgctcaccaatcttt

SEQ ID NO: 59920 - protein, 491 aa, Glycine max
  peptide (1)..(491): Ceres Seq. ID no. 14314756
MAETPNKGHIVMVPLMAQGHLIPFLALARQIQQNTSFTITIANTPQNIQHLRSALSSSTSPNHQIHLAELVPFNSTQHSNKDNNTQKAPLTDLLKLGYASLTLEPPFRSLISQITEEDGHPPLCIISDMFLGWVNNVAKSLGTRNLTFTTCGAYGILAYISIWSNLPHRKTDSDEFHVPGFPQNYRFHKTQLHRFLQAADGTDDWSRFLVPQIQLSMKSDGWICNTIEKIEPLGLKLLRNYLQLPVWAVGPLLPPASLMGSKHRSGKETGIALDACMEWLDSKDENSVLYISFGSLHTINASQMMALAEGLEESGKSFIWVIRPPVGFDINGEFSPEWLPKGFEERMRDTKRGLLVHKWGPQLEILSHTSTGAFLSHCGWNSVLESLSYGVPMIGWPIVADQPYNVKMLVEEMGVAVELTRSTETVVSREKVKKTIEIVMDYEGKGKVMKEKANEIAAYIREAKTEKGKEKGSSVRAMDDLVTTILSPKVL

SEQ ID NO: 59921 - protein, 480 aa, Glycine max
  peptide (1)..(480): Ceres Seq. ID no. 14314757
MVPLMAQGHLIPFLALARQIQQNTSFTITIANTPQNIQHLRSALSSSTSPNHQIHLAELVPFNSTQHSNKDNNTQKAPLTDLLKLGYASLTLEPPFRSLISQITEEDGHPPLCIISDMFLGWVNNVAKSLGTRNLTFTTCGAYGILAYISIWSNLPHRKTDSDEFHVPGFPQNYRFHKTQLHRFLQAADGTDDWSRFLVPQIQLSMKSDGWICNTIEKIEPLGLKLLRNYLQLPVWAVGPLLPPASLMGSKHRSGKETGIALDACMEWLDSKDENSVLYISFGSLHTINASQMMALAEGLEESGKSFIWVIRPPVGFDINGEFSPEWLPKGFEERMRDTKRGLLVHKWGPQLEILSHTSTGAFLSHCGWNSVLESLSYGVPMIGWPIVADQPYNVKMLVEEMGVAVELTRSTETVVSREKVKKTIEIVMDYEGKGKVMKEKANEIAAYIREAKTEKGKEKGSSVRAMDDLVTTILSPKVL

SEQ ID NO: 59922 - protein, 476 aa, Glycine max
  peptide (1)..(476): Ceres Seq. ID no. 14314758
MAQGHLIPFLALARQIQQNTSFTITIANTPQNIQHLRSALSSSTSPNHQIHLAELVPFNSTQHSNKDNNTQKAPLTDLLKLGYASLTLEPPFRSLISQITEEDGHPPLCIISDMFLGWVNNVAKSLGTRNLTFTTCGAYGILAYISIWSNLPHRKTDSDEFHVPGFPQNYRFHKTQLHRFLQAADGTDDWSRFLVPQIQLSMKSDGWICNTIEKIEPLGLKLLRNYLQLPVWAVGPLLPPASLMGSKHRSGKETGIALDACMEWLDSKDENSVLYISFGSLHTINASQMMALAEGLEESGKSFIWVIRPPVGFDINGEFSPEWLPKGFEERMRDTKRGLLVHKWGPQLEILSHTSTGAFLSHCGWNSVLESLSYGVPMIGWPIVADQPYNVKMLVEEMGVAVELTRSTETVVSREKVKKTIEIVMDYEGKGKVMKEKANEIAAYIREAKTEKGKEKGSSVRAMDDLVTTILSPKVL

SEQ ID NO: 59923 - DNA, 1357 bp, Glycine max
  misc_feature (1)..(1357): Ceres Seq. ID no. 14314632
aacatcctcacacacccctttctttctttcttcacttcattccccttatcctctcttcagttacacacattctcagcaaaactttgtgagcattgtctattgctacatgcttatctaatcttgttacagggcttaaaagtgtgtgatgcaagcaatggagaacattcatcagagggaaatattggaagagcaaaggtttgaattgccaccaggattcaggtttcatccaacagatgaagaactcatcactcactacctctcacagaaggttcttgatagctgcttctgtgccagagccattggagaggctgatttgaacaagtgtgaaccatgggatttgccttggatggccaaaatgggtgaaaaggagtggtattttttctgtgtgagggacagaaaatacccaactggtcaaaggactaatagggccactggtgttggctactggaaggcaacaggcaaggacagagagatatataaggcaaaggcactgattggaatgaagaaaactcttgttttctacaaaggaagagctccaagtggtgaaaaaactagctgggtcatgcatgaatacagattagaagatgaacattctgtgcacaatccacccaaaaaggccatgatgatttgggccatctgcaggatttttcagaagagtaatggtgggaagaaaatgccaatttctggttggtgagattcagcaattttgcaaaggacatgccttcatgatggattcttctccatacaacgacagtgaatcaaaacctgttttgggggagtcatcacagccaacatgcttctctgatccaaaccaaagtgaggaccagaggacacaagatgaaaacatagcggatagctatgaaactctcatgttggcatcttcatattcttcaaacccctctgatatttcccctgcctcatggactttttctaaatctgcccctaccgtgtcccaccaatcactccaagttgggaattcacacagctcagattacttcatgcttcatcaggaacagtccatgttggggatgttgattgaaaaccatggagcaagtgctggccaaagaactcagaaagctcaggatagtaaaggctctgatgctgacatgtcctctgtgatgtacaacaactatgaaatgttccaaagatcatttgggaaccaggaatattcatcaccttccgtaggacatgtgtattctagtggcctatggggattttaaagaaggttgaaggatacactatatgcagattaaaattagagaaactttagggattaaatgctattatacatgtaaataaattgctcttaagctaatgttatcctacaaagtacaggaaatggatgttacggttttcc

SEQ ID NO: 59924 - protein, 186 aa, Glycine max
  peptide (1)..(186): Ceres Seq. ID no. 14314633
MVGRKCQFLVGEIQQFCKGHAFMMDSSPYNDSESKPVLGESSQPTCFSDPNQSEDQRTQDENIADSYETLMLASSYSSNPSDISPASWTFSKSAPTVSHQSLQVGNSHSSDYFMLHQEQSMLGMLIENHGASAGQRTQKAQDSKGSDADMSSVMYNNYEMFQRSFGNQEYSSPSVGHVYSSGLWGF

SEQ ID NO: 59925 - protein, 182 aa, Glycine max
  peptide (1)..(182): Ceres Seq. ID no. 14314634
MQAMENIHQREILEEQRFELPPGFRFHPTDEELITHYLSQKVLDSCFCARAIGEADLNKCEPWDLPWMAKMGEKEWYFFCVRDRKYPTGQRTNRATGVGYWKATGKDREIYKAKALIGMKKTLVFYKGRAPSGEKTSWVMHEYRLEDEHSVHNPPKKAMMIWAICRIFQKSNGGKKMPISGW

SEQ ID NO: 59926 - protein, 179 aa, Glycine max
  peptide (1)..(179): Ceres Seq. ID no. 14314635
MENIHQREILEEQRFELPPGFRFHPTDEELITHYLSQKVLDSCFCARAIGEADLNKCEPWDLPWMAKMGEKEWYFFCVRDRKYPTGQRTNRATGVGYWKATGKDREIYKAKALIGMKKTLVFYKGRAPSGEKTSWVMHEYRLEDEHSVHNPPKKAMMIWAICRIFQKSNGGKKMPISGW

SEQ ID NO: 59927 - DNA, 1186 bp, Glycine max
  misc_feature (1)..(1186): Ceres Seq. ID no. 14306319
aaaaataatcaattcttttcttctctgtctccagctctcttctctctcagcacaagcataccatagcctctgcttaaccacgaagaaaccgagacaacaaaacacacttttttttcttttttttttcctccgtttctgccctgttctttccacgctgttcttcaccctttcaaccaaaacatgatccaccccatttcatgtttcctcttccaaccctcaaattctccataaagttcaacttttttcgatcctttctcaactgggtcaatcacaacaccaaaagggtgtcacaccattagatctcaaattcttcagctctaatggcgacgtgccctgcgaattccttcaacttcaacaccaccctctgcgcgtgcacccccggtcacgtgctccagcacgtgaggaacacgtgcgtgctctacgaggggaattcaacaatcctcaccgacaccggcgtcgactactacgcgctgagcttccccgagacgctcttcgcgttcgacagaatcaagaagttcacgcagtcgcaggcggtgttcttggaagccacgctcgttatgcttctctcgtggcttctgttctgcgtgtttctgaggtgcacgaagctcggtgatggaaggaacgtttggttcaaaatcaggtggtggatcagtaggttggatatttgcttcgccacaaggcactggctggttagtttttttttattatgtggtcctcagtatccatcagctgtcaataactaatttttatcttcggaggaaacctatctaaccacctttaatggattattatctcgtaatcacattttttttcatccaccagcctccaactccagaccttggtttgttttgtttggttctgtgtttttggtttcgtgaattgtggtgatggtttagcttcgcaatccaacttcatccatgagtttgtcttttttaaggatataatttaaatgtagtgatttagatatttttggtgttctttgcttatcagaattagaggccgccatttaatgcaaatatttattgaaattggattctcgattagtttaggcatacaaaatttaacgaaatttgctcttacttaatatctgcaattaatctggaaaacatttcacacatgtgatttttttttaaaaaaataatatgaaattctaatatattaaaacaagtaaattccattgttttgt

SEQ ID NO: 59928 - protein, 140 aa, Glycine max
  peptide (1)..(140): Ceres Seq. ID no. 14306320
MATCPANSFNFNTTLCACTPGHVLQHVRNTCVLYEGNSTILTDTGVDYYALSFPETLFAFDRIKKFTQSQAVFLEATLVMLLSWLLFCVFLRCTKLGDGRNVWFKIRWWISRLDICFATRHWLVSFFLLCGPQYPSAVNN

SEQ ID NO: 59929 - DNA, 1767 bp, Glycine max
  misc_feature (1)..(1767): Ceres Seq. ID no. 15177878
aaaccgaacactctcattataaactctcccaaacccaaactacactctccacacacacacacacactcaccgccgtatcgttcacactgaaccaatccaaaccccactctctctctctccgccgcaaacgacccttctccggggcggcgccaccgtacaacccccgatttaactaaaggagcaacagaaggagctgcttggttacaaatggcggccaccgcaagcaacaatgacgtcgccgccgccaacgacggtcccgtgatgagccttatcaacaagcgcctccgcgctctccgcaagaagctgaaccgcatcctcgccatggaagaggccgtcaccttgggcaagcccttgaacaaggagcaggaagaggttctacgctccaaaccctccgtcctcgccctcatcgatgagctcgataagctccggcaacctctcgccaccgctctctccgaagagctccaaatcaacggcacgtcttctcaaaaccctcgccacgagaccgagaccgaaaacgaaaccctagctgagagctccggctcgactgagccgaactcgaactcgaggaacgacgtcgttgtggaggacctgcttaatttgctctattttggttcacttttcgatgtgaagagtgactttgcgtccacgatgcttaccaggacgcacgagcgtggctgctgcttgacctacgactacgtcaccgacgatgccaccgatctgcttggcgagaaggacttggattcgatctccgcactgagagggttgctcgtttcgcggcccgcggattcaagcttttcgcacaagaacgcgctgcaccgctgcgtggaacacgccaagctgtggcttgctaagtcggagcagcccattgggcctgatgctgatgttacttatgctgcattaagggagaagttgaacaagattatgtcttcggagtactttactacgacacctgagatgaaggctccggttgaagttgctgcggcagctgctgggggaaattacgtttccttccatgtgccggtgcatgggtctgtggttccggttgaagtggagcagcctgtttttcagtctcaggagagggatgaaggaactgcaattcaaggacatggatctgaagaagatccctctgatcctgagggagagcttgtgaaggatgaagtagaagcagaagcagaaaatgcaggtgaagtggtgtcagttcaacatgaacagacgaaccagcaagtggatctagagtataatgaacgagatgtagaggcaaaggaccagcagtcataccccaggaggggttatcagaaccatagaggtggtcgtggtggaggtggtcgcaggggttactcaaatggtcgtggaggtcgaagtggtggcagaggaggctaccaaaatgggcgcaaccaatattatgatcaacctggaaattattatccaaggaacaactattataacaacagaggaagaggtggcagaggtggtggctattacaacaaccatggtgctggtggtcaagttaatcacgtcgcaggtgatgtgggggtgcaatcatgataagttatgagttgtttatagtggttattactgtcactagttggtggtgaaccattttttattcgcctggcatgaaaacatgttttgaacaattttgtttgacacttgaaagttcaaacgtctagactcctccactattttgtagtccagtggctagtgtggacctttgtccgaaatctcacatgaagaaactaaactgtatgcgaatatctaatgttctgg

SEQ ID NO: 59930 - protein, 445 aa, Glycine max
  peptide (1)..(445): Ceres Seq. ID no. 15177879
MAATASNNDVAAANDGPVMSLINKRLRALRKKLNRILAMEEAVTLGKPLNKEQEEVLRSKPSVLALIDELDKLRQPLATALSEELQINGTSSQNPRHETETENETLAESSGSTEPNSNSRNDVVVEDLLNLLYFGSLFDVKSDFASTMLTRTHERGCCLTYDYVTDDATDLLGEKDLDSISALRGLLVSRPADSSFSHKNALHRCVEHAKLWLAKSEQPIGPDADVTYAALREKLNKIMSSEYFTTTPEMKAPVEVAAAAAGGNYVSFHVPVHGSVVPVEVEQPVFQSQERDEGTAIQGHGSEEDPSDPEGELVKDEVEAEAENAGEVVSVQHEQTNQQVDLEYNERDVEAKDQQSYPRRGYQNHRGGRGGGGRRGYSNGRGGRSGGRGGYQNGRNQYYDQPGNYYPRNNYYNNRGRGGRGGGYYNNHGAGGQVNHVAGDVGVQS

SEQ ID NO: 59931 - protein, 427 aa, Glycine max
  peptide (1)..(427): Ceres Seq. ID no. 15177880
MSLINKRLRALRKKLNRILAMEEAVTLGKPLNKEQEEVLRSKPSVLALIDELDKLRQPLATALSEELQINGTSSQNPRHETETENETLAESSGSTEPNSNSRNDVVVEDLLNLLYFGSLFDVKSDFASTMLTRTHERGCCLTYDYVTDDATDLLGEKDLDSISALRGLLVSRPADSSFSHKNALHRCVEHAKLWLAKSEQPIGPDADVTYAALREKLNKIMSSEYFTTTPEMKAPVEVAAAAAGGNYVSFHVPVHGSVVPVEVEQPVFQSQERDEGTAIQGHGSEEDPSDPEGELVKDEVEAEAENAGEVVSVQHEQTNQQVDLEYNERDVEAKDQQSYPRRGYQNHRGGRGGGGRRGYSNGRGGRSGGRGGYQNGRNQYYDQPGNYYPRNNYYNNRGRGGRGGGYYNNHGAGGQVNHVAGDVGVQS

SEQ ID NO: 59932 - protein, 407 aa, Glycine max
  peptide (1)..(407): Ceres Seq. ID no. 15177881
MEEAVTLGKPLNKEQEEVLRSKPSVLALIDELDKLRQPLATALSEELQINGTSSQNPRHETETENETLAESSGSTEPNSNSRNDVVVEDLLNLLYFGSLFDVKSDFASTMLTRTHERGCCLTYDYVTDDATDLLGEKDLDSISALRGLLVSRPADSSFSHKNALHRCVEHAKLWLAKSEQPIGPDADVTYAALREKLNKIMSSEYFTTTPEMKAPVEVAAAAAGGNYVSFHVPVHGSVVPVEVEQPVFQSQERDEGTAIQGHGSEEDPSDPEGELVKDEVEAEAENAGEVVSVQHEQTNQQVDLEYNERDVEAKDQQSYPRRGYQNHRGGRGGGGRRGYSNGRGGRSGGRGGYQNGRNQYYDQPGNYYPRNNYYNNRGRGGRGGGYYNNHGAGGQVNHVAGDVGVQS

SEQ ID NO: 59933 - DNA, 1251 bp, Glycine max
  misc_feature (1)..(1251): Ceres Seq. ID no. 15177654
atcgactgctccaaatggccgaggtaattttgaatctaatcgtggaatccatgatgcctgatgggaatcattgcagccaaaagacatcataccagttcctggtttccttgattgtcttagaagaacaaacagccttgcatatcttttggtggtgagttaggtctttcttgaatgtacccatgaaatcaggctatcaacacggtggagttgatattactcacactaaggcctttctaacatcactgtcagctatggtggctgagaccacaactttccccatagatttgatcaagaccaggctccaactccatggcgagtcactttcctcgagtcaccccactagtgcatttcgagtaggcttgggcattattcgtgaacaaggtgcccttggcctttacagtggcctgtcaccagcaattattagacacatgttctactcgcctattcgaattgttgggtatgagaacctgagaaatgttgtttctgttgataatgcttcgttctctatcgttggcaaggctgtagttggtggaatctctggtgtcttggctcaggttatagccagcccagctgatcttgtcaaggtgaggatgcaagctgatggccaaagggtgagccaaggtcttcaaccccggtattcggggccatttgatgctctaaacaaaattgttcgtgctgaaggatttcaaggattgtggaagggtgtttttcctaatatccaaagagccttcttagtgaacatgggagaattagcctgttatgatcatgctaaacaatttgttattagaagtaggatagctgatgacaatgtttttgcccacacttttgcttccatcatgtcaggtttagcggcaacgtctttgagctgcccggctgatgttgtgaagactagaatgatgaatcaggcagctaaaaaggaagggaaagtcttatataatagctcttatgattgcttggtgaagacaattaaagttgaaggaataagagcattgtggaaaggattcttccccacatgggcaaggcttggcccatggcaatttgtgttctgggtttcctatgagaagttcaggaaatttgcagggctctcttctttctaatataacattttatttatttatttatactagcactcattcatccataataaattcacaagtcacagcctacagggtactaacacccagatttatatttttctcaacttttagctcagtgtatacttttttgagataaactacattactctttcct

SEQ ID NO: 59934 - protein, 305 aa, Glycine max
  peptide (1)..(305): Ceres Seq. ID no. 15177655
MKSGYQHGGVDITHTKAFLTSLSAMVAETTTFPIDLIKTRLQLHGESLSSSHPTSAFRVGLGIIREQGALGLYSGLSPAIIRHMFYSPIRIVGYENLRNVVSVDNASFSIVGKAVVGGISGVLAQVIASPADLVKVRMQADGQRVSQGLQPRYSGPFDALNKIVRAEGFQGLWKGVFPNIQRAFLVNMGELACYDHAKQFVIRSRIADDNVFAHTFASIMSGLAATSLSCPADVVKTRMMNQAAKKEGKVLYNSSYDCLVKTIKVEGIRALWKGFFPTWARLGPWQFVFWVSYEKFRKFAGLSSF

SEQ ID NO: 59935 - protein, 281 aa, Glycine max
  peptide (1)..(281): Ceres Seq. ID no. 15177656
MVAETTTFPIDLIKTRLQLHGESLSSSHPTSAFRVGLGIIREQGALGLYSGLSPAIIRHMFYSPIRIVGYENLRNVVSVDNASFSIVGKAVVGGISGVLAQVIASPADLVKVRMQADGQRVSQGLQPRYSGPFDALNKIVRAEGFQGLWKGVFPNIQRAFLVNMGELACYDHAKQFVIRSRIADDNVFAHTFASIMSGLAATSLSCPADVVKTRMMNQAAKKEGKVLYNSSYDCLVKTIKVEGIRALWKGFFPTWARLGPWQFVFWVSYEKFRKFAGLSSF

SEQ ID NO: 59936 - protein, 222 aa, Glycine max
  peptide (1)..(222): Ceres Seq. ID no. 15177657
MFYSPIRIVGYENLRNVVSVDNASFSIVGKAVVGGISGVLAQVIASPADLVKVRMQADGQRVSQGLQPRYSGPFDALNKIVRAEGFQGLWKGVFPNIQRAFLVNMGELACYDHAKQFVIRSRIADDNVFAHTFASIMSGLAATSLSCPADVVKTRMMNQAAKKEGKVLYNSSYDCLVKTIKVEGIRALWKGFFPTWARLGPWQFVFWVSYEKFRKFAGLSSF

SEQ ID NO: 59937 - DNA, 1282 bp, Glycine max
  misc_feature (1)..(1282): Ceres Seq. ID no. 14314647
gaaattcttttaacattgaattacctagctgagaatccagagaccacttgggtaactgaaatggaataaaaagggagtcgagtttcattagcgatagcatgagccagtctagttagccacatggggatggtagatcggcaagagcaacatattcagttcctccttaacattcttcatcccacccaaatccctaaaaattgtcacatccttccccttaacctcaacaccaccacagactgaacccttccgaagctgaaccagaagggcctcctccactcgacgccgccggagcaccggccttctcccgttcctactgaacccagcaatgagacccagctgtgcctgagcctgtcccacaaaaacaattaccaaaaaactaggctagaaaaaaaaaaaagataacttctcaatctgtttttctaaactgtttttattttaaaaaatatattttctcttgagaaacaaattttattgaatacacttatcttaaaattgattttttcctctttgttctcaagatgtcctcacccgaaacccttacattcatggagctcgccatacaacaggcaaagttagctttggatgttcttgaagtgcctgttggatgtgtaattgttgaggatggcaaggttatagcctcaggcaggaatcgaactacccagacacgaaatgctacaaggcatgcagaaatggaagctgtagatgtgcttctcgggcagtggcagaaacatggactttcaatgtctgaagtttctgaaaaattctcaaactgcagcctttatgttacctgtgaaccatgcataatgtgtgcatctgctttatcaattttaggtataaaggaagtattttatggctgttcaaatgataaatttggaggctgtggatcgatactgtcattgcatttaagtaacaccacaccgctcaataatgaagttccacccggaaagtgtttcaaatgtactggaggtataatggcatcagaagctgttcttctctttcgaacattctatgagcaaggaaatcccaatgctccaaagccacacaggcctctagcacgtcaggcatgaagtttaatttgtatataaccagttactgatatggttatcagtcatggcctgaggatctgtgctaccgtagcattttgggcaggttgaagctgttattgaatgccatacagggctttttaattcgaaaaatcaacttcatgtattgattattaatgtatgatttgaaagatgaatcaggggttgccgtttgaaatgaatcttactggattaagttc

SEQ ID NO: 59938 - protein, 182 aa, Glycine max
  peptide (1)..(182): Ceres Seq. ID no. 14314648
MSSPETLTFMELAIQQAKLALDVLEVPVGCVIVEDGKVIASGRNRTTQTRNATRHAEMEAVDVLLGQWQKHGLSMSEVSEKFSNCSLYVTCEPCIMCASALSILGIKEVFYGCSNDKFGGCGSILSLHLSNTTPLNNEVPPGKCFKCTGGIMASEAVLLFRTFYEQGNPNAPKPHRPLARQA

SEQ ID NO: 59939 - protein, 173 aa, Glycine max
  peptide (1)..(173): Ceres Seq. ID no. 14314649
MELAIQQAKLALDVLEVPVGCVIVEDGKVIASGRNRTTQTRNATRHAEMEAVDVLLGQWQKHGLSMSEVSEKFSNCSLYVTCEPCIMCASALSILGIKEVFYGCSNDKFGGCGSILSLHLSNTTPLNNEVPPGKCFKCTGGIMASEAVLLFRTFYEQGNPNAPKPHRPLARQA

SEQ ID NO: 59940 - protein, 125 aa, Glycine max
  peptide (1)..(125): Ceres Seq. ID no. 14314650
MEAVDVLLGQWQKHGLSMSEVSEKFSNCSLYVTCEPCIMCASALSILGIKEVFYGCSNDKFGGCGSILSLHLSNTTPLNNEVPPGKCFKCTGGIMASEAVLLFRTFYEQGNPNAPKPHRPLARQA

SEQ ID NO: 59941 - DNA, 1415 bp, Glycine max
  misc_feature (1)..(1415): Ceres Seq. ID no. 14314640
atttttacactctttgccagttgacacttgtttctctcttttcatgactccctttctcccaaaaagtgaaacaccaaaatcctcccacaacaacaacaaacaggttaggacttagagagccactcattcccatttgatggaggcgaagaaggaatatgaagtggaccatctgagcacacccacagggaccagtttctctcagttactattcggagatgacgacgacgacgttgatgaaagtgcattgggtctcgctgtggaccagtcttactcttacaattacaacaaccttacccgttcacctcttttctccattcacaaggcaccccaaatgctttgttttggcaaccatcaaaacgaagaaggtggcgttttgcttcctgaaaccaacgtaacccctcagaaatctgtcatcacttctagtgactcctcttctgctagcgcttcctcctgcaaccacaccaacaccgccttcaattccttacctaagtctaataatagtttgcagaaaaagcgacaagaaggagttgccaaggttggtgttggaagccagagacaaactaaaaagaacaaagcagagaaccccacctcaaccggacatgcaaagaggaaggagaagctcggagaacgaattgcaacgttacaacaacttgtttctccctttggaaagacagatacagcatcagtgcttcacgaggccatgggttatataagatttcttcatgaccaagttcaggtcctgtgctctccttacttgcaaagtttgccttcctcataccatcaaaatcagcacgggggcggaggtaacaatgaagaggaagtgaacaaggacttgaggagtaagggtctttgcttgatccctgtgggatgcaccgtacacgtggcaggtagcaatggtgctgatttttggtcatctgctgcaatagggaacaatgttagtttcaccatcagccaagcagtgaaacgaaaccaagatcaatgaatccttttcaaaaaaagttgtagccttttgggaaatgggtttcctatgtctgcccaaattgaagttgtacccaatctggagatggatggttgaggaggtaaactacatgaaatggcaaagagggataacaaataacaagaatggttcaaagttcacacatgggggtacaaaccagaggccatgattttgtccttaattatgtaacatctgttttggtttttggggggtccttttctcaggacacctatatcaatattctatagaaggaaggaaggaaatattttatgtaggatttagggatgtgtgctggcattgaaccctgaactaggagtctaggattccatatatttttattatagatattttgtctctgtaaatttcggtaggcaagccagttaatgaagttattataacatatatttttattatatac

SEQ ID NO: 59942 - protein, 281 aa, Glycine max
  peptide (1)..(281): Ceres Seq. ID no. 14314641
MEAKKEYEVDHLSTPTGTSFSQLLFGDDDDDVDESALGLAVDQSYSYNYNNLTRSPLFSIHKAPQMLCFGNHQNEEGGVLLPETNVTPQKSVITSSDSSSASASSCNHTNTAFNSLPKSNNSLQKKRQEGVAKVGVGSQRQTKKNKAENPTSTGHAKRKEKLGERIATLQQLVSPFGKTDTASVLHEAMGYIRFLHDQVQVLCSPYLQSLPSSYHQNQHGGGGNNEEEVNKDLRSKGLCLIPVGCTVHVAGSNGADFWSSAAIGNNVSFTISQAVKRNQDQ

SEQ ID NO: 59943 - protein, 216 aa, Glycine max
  peptide (1)..(216): Ceres Seq. ID no. 14314642
MLCFGNHQNEEGGVLLPETNVTPQKSVITSSDSSSASASSCNHTNTAFNSLPKSNNSLQKKRQEGVAKVGVGSQRQTKKNKAENPTSTGHAKRKEKLGERIATLQQLVSPFGKTDTASVLHEAMGYIRFLHDQVQVLCSPYLQSLPSSYHQNQHGGGGNNEEEVNKDLRSKGLCLIPVGCTVHVAGSNGADFWSSAAIGNNVSFTISQAVKRNQDQ

SEQ ID NO: 59944 - DNA, 1292 bp, Glycine max
  misc_feature (1)..(1292): Ceres Seq. ID no. 14314651
ccttttttaagactgagagagttatgttttgtccatgtcattgacacagtattaaatattacaaatattctgttcaaaaacaagttttaaaatgagctgtaaaatcaaccatataatcaaaagtgtgattaaaacaattaagtaatacaagctagtttatttctgcttccaacaagcatgcagtgcacttattaaaaaaagggttaggttagtcaattaggcaaaacatgttaaactgttagttcaacaatataaaaatgcatttaattacttgtcttgtagtttatttaacattaattggacaaaataaagctgaatcaatgcttgaaggcttctactgcggccgagacaattgttatgatgtgttgggtgttactcgggatacaagcagagctgacattgcaaaagcctacagaaaacttgcaaaaaaattccatccagatttatataggaatgaagatgagaaaatagaagcggaatctaattttaagagggtagccaatgcatatgaaatcctcaaagatgaagaatcacgaatggactatgattacatgcttgacaatccagagcaggtgtacagccattactaccgatattatcgtaggagagttgcgcctaaagtggatgttcgagtagtgatagccgtcagtattactatcatatccgctattcagtatgtcactgcttggcagagatacaactcggcaataaaatacttattgacagttccaaaatacagaaataaggcgctgcaaattgccaaagaaaaagggctgcttgaaaaagttagaaaaacacgaggaaaaagcaagtcagaagtgaaagaggaaactgaagatgtaatacgaaaagtgttagaagagaacatggatatcagaggagcatatgccaagccagtgataactgatattctgtggctgaaaataatacttttcccagttgatttagtaaaatacatgtactggtacacatgttggatttggaagcataatatcctccaacttccttatgatgatgaagaaaagctgtatcttatcaggaagtacatgaagaaaggacctaatcaatttgctgctattgaagaatctgaaaaacaagagtacttaaaacaagaactgtggatcagagagaaatttgatgtatggtttcaagaaaaagaagaagaacagaaaaagcttcttgctgaaaatgcgagatacaaagcataccgaagatacctcaagacacatggaactggaagaatgacatttgatgattcatgattttgtgatttattataattctcagttgtt

SEQ ID NO: 59945 - protein, 334 aa, Glycine max
  peptide (1)..(334): Ceres Seq. ID no. 14314652
MHLITCLVVYLTLIGQNKAESMLEGFYCGRDNCYDVLGVTRDTSRADIAKAYRKLAKKFHPDLYRNEDEKIEAESNFKRVANAYEILKDEESRMDYDYMLDNPEQVYSHYYRYYRRRVAPKVDVRVVIAVSITIISAIQYVTAWQRYNSAIKYLLTVPKYRNKALQIAKEKGLLEKVRKTRGKSKSEVKEETEDVIRKVLEENMDIRGAYAKPVITDILWLKIILFPVDLVKYMYWYTCWIWKHNILQLPYDDEEKLYLIRKYMKKGPNQFAAIEESEKQEYLKQELWIREKFDVWFQEKEEEQKKLLAENARYKAYRRYLKTHGTGRMTFDDS

SEQ ID NO: 59946 - protein, 313 aa, Glycine max
  peptide (1)..(313): Ceres Seq. ID no. 14314653
MLEGFYCGRDNCYDVLGVTRDTSRADIAKAYRKLAKKFHPDLYRNEDEKIEAESNFKRVANAYEILKDEESRMDYDYMLDNPEQVYSHYYRYYRRRVAPKVDVRVVIAVSITIISAIQYVTAWQRYNSAIKYLLTVPKYRNKALQIAKEKGLLEKVRKTRGKSKSEVKEETEDVIRKVLEENMDIRGAYAKPVITDILWLKIILFPVDLVKYMYWYTCWIWKHNILQLPYDDEEKLYLIRKYMKKGPNQFAAIEESEKQEYLKQELWIREKFDVWFQEKEEEQKKLLAENARYKAYRRYLKTHGTGRMTFDDS

SEQ ID NO: 59947 - protein, 241 aa, Glycine max
  peptide (1)..(241): Ceres Seq. ID no. 14314654
MDYDYMLDNPEQVYSHYYRYYRRRVAPKVDVRVVIAVSITIISAIQYVTAWQRYNSAIKYLLTVPKYRNKALQIAKEKGLLEKVRKTRGKSKSEVKEETEDVIRKVLEENMDIRGAYAKPVITDILWLKIILFPVDLVKYMYWYTCWIWKHNILQLPYDDEEKLYLIRKYMKKGPNQFAAIEESEKQEYLKQELWIREKFDVWFQEKEEEQKKLLAENARYKAYRRYLKTHGTGRMTFDDS

SEQ ID NO: 59948 - DNA, 1475 bp, Glycine max
  misc_feature (1)..(1475): Ceres Seq. ID no. 14314031
aggactagcatttgcaccaaatgtgagtcacgcagctcttcactttgaagactgaagacggtggcgtttagggtttcggaagagcatgcaattgaacccaaatggcgacggctgaagatgctccagtgctccctgaggacctcatagtggaaattctgtcatgggttgaagtgaagaatctcatgcgattcaggtgcgtttccaagtcctggaattccctcatcttcaatcccacattcattaaattgcaccttcaaaggtcctcccaaaacatccacatcctgttaacatttgaccaagattcatcgaacccctacccgtaccatgatgataactacatctccgtcgttgccgcaccctgctctatacagcgtttacttgagaacccatcatccactatttataatatagttcattttctcgaggctcagtcaacatcatcatcgtccactatttattttgatgtttgttaccgatttaagcacacttatttgttcttgggtgtatgcaatgggttggtttgcttgcttgattgtttgtatgaggatgaatttgaggaatactgggtccgattttggaacccggccactagggccatgtccgcagattcgccccacttgcgtgtccattcgagcaattataaacttggagacattgctgtgaagcatgcgtttgggtacgatgattcgagtgacacttacaaggtgttggcgatcctttttaacgttaaatcacaagattgggagctgagagttcactgcatgggtgatgacactggttggagaaatgttttgacttgttctgcttttcccattttgcaacaagtttatgggcagtttgtgagtggcactcttaactggctagcacttaacaattcgtcgggttctgatcattatcaatgggaaactgtcactgtcgatcagttagtcattttttcctatgatctgaagaacgagacatacagttatttgtcgatgcctgatggtctttctgaaatctctcttgacgagccttatcttggggttttgaatggctgcctttgtctttctcatgatcacaggcgaaccaatcttgttgtttggctaatgagagagtttggagctgaaaagtcttggactcagttgctgaatgtaagctatcatcatcttcaagttctagattttccaccttgtccagtggtacctttgtgcaagtctgaaaatgacgacgtcctgttgctggaagactatggaggtggtgcagaatttgttctggttgataagagagataatagtatagaccgcatggaaggtttcaacaatggattatcgtctttctctgcatttgtctctcatgattatgttcaaagtttggttttgccatatcgaaattaagctacctgcatttgcttatattatgtaagtggtttcagaaccgtggcatttaacatttggacaggagagatagcttgaataattttggtggttccttagttt

SEQ ID NO: 59949 - protein, 423 aa, Glycine max
  peptide (1)..(423): Ceres Seq. ID no. 14314032
MATAEDAPVLPEDLIVEILSWVEVKNLMRFRCVSKSWNSLIFNPTFIKLHLQRSSQNIHILLTFDQDSSNPYPYHDDNYISVVAAPCSIQRLLENPSSTIYNIVHFLEAQSTSSSSTIYFDVCYRFKHTYLFLGVCNGLVCLLDCLYEDEFEEYWVRFWNPATRAMSADSPHLRVHSSNYKLGDIAVKHAFGYDDSSDTYKVLAILFNVKSQDWELRVHCMGDDTGWRNVLTCSAFPILQQVYGQFVSGTLNWLALNNSSGSDHYQWETVTVDQLVIFSYDLKNETYSYLSMPDGLSEISLDEPYLGVLNGCLCLSHDHRRTNLVVWLMREFGAEKSWTQLLNVSYHHLQVLDFPPCPVVPLCKSENDDVLLLEDYGGGAEFVLVDKRDNSIDRMEGFNNGLSSFSAFVSHDYVQSLVLPYRN

SEQ ID NO: 59950 - protein, 396 aa, Glycine max
  peptide (1)..(396): Ceres Seq. ID no. 14314033
MRFRCVSKSWNSLIFNPTFIKLHLQRSSQNIHILLTFDQDSSNPYPYHDDNYISVVAAPCSIQRLLENPSSTIYNIVHFLEAQSTSSSSTIYFDVCYRFKHTYLFLGVCNGLVCLLDCLYEDEFEEYWVRFWNPATRAMSADSPHLRVHSSNYKLGDIAVKHAFGYDDSSDTYKVLAILFNVKSQDWELRVHCMGDDTGWRNVLTCSAFPILQQVYGQFVSGTLNWLALNNSSGSDHYQWETVTVDQLVIFSYDLKNETYSYLSMPDGLSEISLDEPYLGVLNGCLCLSHDHRRTNLVVWLMREFGAEKSWTQLLNVSYHHLQVLDFPPCPVVPLCKSENDDVLLLEDYGGGAEFVLVDKRDNSIDRMEGFNNGLSSFSAFVSHDYVQSLVLPYRN

SEQ ID NO: 59951 - protein, 258 aa, Glycine max
  peptide (1)..(258): Ceres Seq. ID no. 14314034
MSADSPHLRVHSSNYKLGDIAVKHAFGYDDSSDTYKVLAILFNVKSQDWELRVHCMGDDTGWRNVLTCSAFPILQQVYGQFVSGTLNWLALNNSSGSDHYQWETVTVDQLVIFSYDLKNETYSYLSMPDGLSEISLDEPYLGVLNGCLCLSHDHRRTNLVVWLMREFGAEKSWTQLLNVSYHHLQVLDFPPCPVVPLCKSENDDVLLLEDYGGGAEFVLVDKRDNSIDRMEGFNNGLSSFSAFVSHDYVQSLVLPYRN

SEQ ID NO: 59952 - DNA, 1296 bp, Glycine max
  misc_feature (1)..(1296): Ceres Seq. ID no. 14314050
atttatcatttcattcctataaagtgagtaatcgtgtcctgtcagtagatattccaaaaatgatttttcattaaaattaaaaacaattactttatcctcctccaaactccaaagtgagtaaccatatatagccaccctctctcctccgatcactctccactccagtgtggaaaatcaaaacaaggtgccatctttgtttgtcatacatgaccatggccatgcccctgtttctgatgttccttcttctgcacatagcttgggtggcatcgtcggatctccgacctgggttttactcaaaaacatgtccaaaagcggaactcatagtccgagatgtgatgaagaaggcccttatgagggaacccagaagtgttgcctctgttatgcgcttccagttccatgattgctttgtcaacgggtgtgatggttctatgctgcttgatgatacaccaacgatgctgggggagaaattggccctctcaaatataaattcgctgagatcgtatgaagttgtcgatcaagtgaaggaagcgctcgagaaggactgcccctgagtggtttcctgtgctgacatcataattatggcatctagagatgctgtctctctgacaggtggacctgagtgggaggtgaggttgggaagattggacagcttgagtgctaatcaagaagactcaaacaacatcatgccaagcccaagagccaacgcaagctctcttattgatctcttccagaaatataaccttactgtgaaagacctggtagcactctcaggatctcactctattggccaaggtcgttgtttctccatcatgtttaggctatacaatcaatctggaactggaaggcctgaccctgccattgaccctagctatagacaataccttaacaggctatgtccactggatgttgaccaaaatgtcacagggaaccttgattccacgcctctcgtctttgataaccaatatttcaaggacttggctgctgggaggggctttctcaattctgatcaaacactcttcacattcccccacacaagggagtttgtgaggttatttagtagacgcaaaactgagtttttcaaggcatttgtggaaggaatgttgaaaatgggtgacttgcagtctggtcgacctggggaagttaggactaactgcaggctcgtcaatgctcgcccgattaatttgctgcttcagtctccacacaacatggagagtaacgataaataaataaaaaataaatgcgtgtctcttcatattatatgttatccaaatatgaaacgaaatattttcacttccg

SEQ ID NO: 59953 - protein, 215 aa, Glycine max
  peptide (1)..(215): Ceres Seq. ID no. 14314051
MASRDAVSLTGGPEWEVRLGRLDSLSANQEDSNNIMPSPRANASSLIDLFQKYNLTVKDLVALSGSHSIGQGRCFSIMFRLYNQSGTGRPDPAIDPSYRQYLNRLCPLDVDQNVTGNLDSTPLVFDNQYFKDLAAGRGFLNSDQTLFTFPHTREFVRLFSRRKTEFFKAFVEGMLKMGDLQSGRPGEVRTNCRLVNARPINLLLQSPHNMESNDK

SEQ ID NO: 59954 - protein, 180 aa, Glycine max
  peptide (1)..(180): Ceres Seq. ID no. 14314052
MPSPRANASSLIDLFQKYNLTVKDLVALSGSHSIGQGRCFSIMFRLYNQSGTGRPDPAIDPSYRQYLNRLCPLDVDQNVTGNLDSTPLVFDNQYFKDLAAGRGFLNSDQTLFTFPHTREFVRLFSRRKTEFFKAFVEGMLKMGDLQSGRPGEVRTNCRLVNARPINLLLQSPHNMESNDK

SEQ ID NO: 59955 - protein, 138 aa, Glycine max
  peptide (1)..(138): Ceres Seq. ID no. 14314053
MFRLYNQSGTGRPDPAIDPSYRQYLNRLCPLDVDQNVTGNLDSTPLVFDNQYFKDLAAGRGFLNSDQTLFTFPHTREFVRLFSRRKTEFFKAFVEGMLKMGDLQSGRPGEVRTNCRLVNARPINLLLQSPHNMESNDK

SEQ ID NO: 59956 - DNA, 1103 bp, Glycine max
  misc_feature (1)..(1103): Ceres Seq. ID no. 14306201
atttgttccattccgtgcgcggtgaatggtgatcttattgtatttgagacttgagttggaagtcatggcgattggtaatgagaatcagccacaacaatctgaaggcaaagtgtggaatttgttcaagcttccctttcgccattcaacttcaactcctcacaatcacaatcaagtttccacctccaattctgtttcttcctttgccaaatcgctcctcccctcaccacgtcgtcttaagcttgatccttccaacaagctctacttcccttatgagccgggcaagcagggtaggagtgccatcaggattaaaaacaccagcaaatccaacgtagctttcaagtttcaaacaaatgcacccaagagttgtttcatgcgccctcctgggggcattctggcaccgggcgagagtataattgcaactgtgttcaagtttatagaacatccattgaataatgaaaagccagaaaaaactggactcaaattcaaaatcacgagcttgaaggtcaaaggaccaattgattatgtccctgaaatgtttgatgagctgaaggatcaagtaacagtggagcagattttgcaggttgtttttcttgatccagagcgtaactgtcctgctttggaaaaactgaagcttcagctggttgaggctgatgctgctgttgaggcacgtaagagagccccagaagatgcaggtcctaagattctcggagaagggctcgtcgtagatgaatggaaagagaggagggaaagatacctggccaaacagcagggtgaagtggtagtggactctatatagctaagttttgagtaggaaattgtgttactgcgggaaggtgactttagggaaacaattatatttaatcgcaacgtttggcttagcgaaaattaaagtggtgaatgactagcgtgaagtgttcttttgagaaacttatgattagatgagaacatcctctattatgtacataagtgtcagtgtcattgcatttgggtttcctggaatgatattttgatggattgatgtaaaatggtagtttttgtaagatggatgatttgctgtcatggcatggtttcatggtaaacttcaattgttgagattttcatcc

SEQ ID NO: 59957 - protein, 256 aa, Glycine max
  peptide (1)..(256): Ceres Seq. ID no. 14306202
MVILLYLRLELEVMAIGNENQPQQSEGKVWNLFKLPFRHSTSTPHNHNQVSTSNSVSSFAKSLLPSPRRLKLDPSNKLYFPYEPGKQGRSAIRIKNTSKSNVAFKFQTNAPKSCFMRPPGGILAPGESIIATVFKFIEHPLNNEKPEKTGLKFKITSLKVKGPIDYVPEMFDELKDQVTVEQILQVVFLDPERNCPALEKLKLQLVEADAAVEARKRAPEDAGPKILGEGLVVDEWKERRERYLAKQQGEVVVDSI

SEQ ID NO: 59958 - protein, 243 aa, Glycine max
  peptide (1)..(243): Ceres Seq. ID no. 14306203
MAIGNENQPQQSEGKVWNLFKLPFRHSTSTPHNHNQVSTSNSVSSFAKSLLPSPRRLKLDPSNKLYFPYEPGKQGRSAIRIKNTSKSNVAFKFQTNAPKSCFMRPPGGILAPGESIIATVFKFIEHPLNNEKPEKTGLKFKITSLKVKGPIDYVPEMFDELKDQVTVEQILQVVFLDPERNCPALEKLKLQLVEADAAVEARKRAPEDAGPKILGEGLVVDEWKERRERYLAKQQGEVVVDSI

SEQ ID NO: 59959 - protein, 141 aa, Glycine max
  peptide (1)..(141): Ceres Seq. ID no. 14306204
MRPPGGILAPGESIIATVFKFIEHPLNNEKPEKTGLKFKITSLKVKGPIDYVPEMFDELKDQVTVEQILQVVFLDPERNCPALEKLKLQLVEADAAVEARKRAPEDAGPKILGEGLVVDEWKERRERYLAKQQGEVVVDSI

SEQ ID NO: 59960 - DNA, 1460 bp, Glycine max
  misc_feature (1)..(1460): Ceres Seq. ID no. 14314789
gaaagtgttgtgcgtgctacgcgcggaacctgtcgtttcgagttctacttgtacgttctaccacctttgagtatcttaaacaatctaccatacgtggatcaaaacaccattgccattggctctctttctttgccgtaccatttgaattgaatgtgattgcaattgcaaatccccccttcaattcaattactactttcacgacctaatctaacccttcgctctgctctgctctcacttcaccatattcacacccagatggaaactgtttgtctccactgtggcgacagaggctttccagagacattggttttttgcaccgaatgtatggcttatgcgctgcataggtactgtttaaaggggcttgtgaattttactgatgctgttacatggttttgcgaggattgtgcaacaaagcttggggtgccacctgctcttgaccaatctacacctatcgcatctgtaacaagagaaaattgcatacagggagtgaaaaaacacaataaacagcaaaaaaagaagattacaaagaagcagattgaaggaaaagctaacgctggcttagttgctaaaacaaagggtgtgttatctgctagtcacagttcatctgagcctgagcatcctcattgtagtaacagaggcgaagaagaacatgaggtgaaaaatgactgtggaccagttccaagggatgtagctaattttgatgtaggtgaagaagaaagtgtggcaagggatttagctaattctgatgtaagtttcaaatctgttccagtttctcaaggagctaccaatagtgattcaggttgtgtagaagtagatggtcatgtttatgcacagcctactattgatccaatctggaggggaagtatgtacttttgcaatggaacaattcgtactgtcagtggacttctggctcatatctccaatttagcgtgctcccaagttgcggaggagacaggacatttcccagaagtgcttcatgcagaatttcttcccagagataaggtgtgggctgaaagtttcaagaggggggatccaactgatcaggacattgctctttttttctttcctgacagtgaaggatctgaaaaggacttcgatgtgctggttgaagatatcatgatctgtaaacatgtcataagatttgtgggtaaaaatgcagagcttttaatttttccttctactgagcttccagtccaaaattggagatatgaagccaagtattatttgtggggtgtcttcagaaagaaagcaaacttaagaagagacaaatgatgcagtgtgcagagtttgacaaggctcttaggttggcataaccatagacgtagtctccatctaaaaatttgagcaatagtggttgtgtagctatgactctagtgcatagtactcctgtgtttatagtcactgatatgttaattaaacatatatatactgtagtgcatagtaccctttttgtgaaaaat

SEQ ID NO: 59961 - protein, 338 aa, Glycine max
  peptide (1)..(338): Ceres Seq. ID no. 14314790
METVCLHCGDRGFPETLVFCTECMAYALHRYCLKGLVNFTDAVTWFCEDCATKLGVPPALDQSTPIASVTRENCIQGVKKHNKQQKKKITKKQIEGKANAGLVAKTKGVLSASHSSSEPEHPHCSNRGEEEHEVKNDCGPVPRDVANFDVGEEESVARDLANSDVSFKSVPVSQGATNSDSGCVEVDGHVYAQPTIDPIWRGSMYFCNGTIRTVSGLLAHISNLACSQVAEETGHFPEVLHAEFLPRDKVWAESFKRGDPTDQDIALFFFPDSEGSEKDFDVLVEDIMICKHVIRFVGKNAELLIFPSTELPVQNWRYEAKYYLWGVFRKKANLRRDK

SEQ ID NO: 59962 - protein, 315 aa, Glycine max
  peptide (1)..(315): Ceres Seq. ID no. 14314791
MAYALHRYCLKGLVNFTDAVTWFCEDCATKLGVPPALDQSTPIASVTRENCIQGVKKHNKQQKKKITKKQIEGKANAGLVAKTKGVLSASHSSSEPEHPHCSNRGEEEHEVKNDCGPVPRDVANFDVGEEESVARDLANSDVSFKSVPVSQGATNSDSGCVEVDGHVYAQPTIDPIWRGSMYFCNGTIRTVSGLLAHISNLACSQVAEETGHFPEVLHAEFLPRDKVWAESFKRGDPTDQDIALFFFPDSEGSEKDFDVLVEDIMICKHVIRFVGKNAELLIFPSTELPVQNWRYEAKYYLWGVFRKKANLRRDK

SEQ ID NO: 59963 - DNA, 634 bp, Glycine max
  misc_feature (1)..(634): Ceres Seq. ID no. 12608143
atatgaacacgcaaggtaagttaaggagaccaaaggaagaagaagaagtagtggagtgatcctggttgggtgtgaaaaatgtcgcacagcgataccataccccttcacccatcttcccaatccgacattgacgagatcgagaacctcatcaatgccagcgttcaccaatcagtcccttcggcgagacctcccagtcccccacgcgcctccatccccgtctccgtctccgccgccccttcccccttcatctcctccaacctccctccaccgccacccctccctaaatcctccgtctccgccgtccctccgccccctcccccgccgcgcgccgacatctcctcctccgggttcggctccgcccccaacacgctcactgagcccgtctgggacaccgtgaagcgcgatctctcgagaatcgtgagcaatctgaagctcgttgtgttccccaaccctttccgcgaggaccccggtaaggccctcagggattgggatctgtggggccctttcttcttcattgtcttcctcggcctcaccctctcttggtctgcctctgtcaaaaagtctgaggtttttgctgttgcatttgctttacttgctgctggcgctgtaattttgacattgaacgtacttcttc

SEQ ID NO: 59964 - protein, 185 aa, Glycine max
  peptide (1)..(185): Ceres Seq. ID no. 12608144
MSHSDTIPLHPSSQSDIDEIENLINASVHQSVPSARPPSPPRASIPVSVSAAPSPFISSNLPPPPPLPKSSVSAVPPPPPPPRADISSSGFGSAPNTLTEPVWDTVKRDLSRIVSNLKLVVFPNPFREDPGKALRDWDLWGPFFFIVFLGLTLSWSASVKKSEVFAVAFALLAAGAVILTLNVLL

SEQ ID NO: 59965 - DNA, 663 bp, Glycine max
  misc_feature (1)..(663): Ceres Seq. ID no. 13581656
atagtatatgatcctgatccaatccttgacagctaggaagcgtctgagtccgagggaagacatgttcccacaaaccctaatattgttctcagcactcataatcctcttccatggagatctcgtcttaagcacaacagcaccagatgatatccacgatgttctccctcagtacggtttcccaaagggtcttcttcccaacaacgcggtctcctacaccctctcccccgacgatggcttcttcaccgtccagctcgatgccccctgctacgtccactgggacgaccaattagtctactaccacagccaaatcagtggcactctcacctacggttccgtctcgcacgtgtcggggattcaggcccagaaactcttcctctggctccctgttaccggaattaaggtccaccaggattccggcatgttagagttcttcgttggagctttgtcccagacgctacccgccagcgacttccaggatgtgcctgggtgctcccgcagaggatcgctgctcgctacaaacctcattcttcctctctgaccgtattcatctctgtctattctctcctactcatcttgttcaacttcaaattaattgtttcatactcaaatactacctactagcctactaccatgttaatgttaattaaaattatagggattttc

SEQ ID NO: 59966 - protein, 176 aa, Glycine max
  peptide (1)..(176): Ceres Seq. ID no. 13581657
MILIQSLTARKRLSPREDMFPQTLILFSALIILFHGDLVLSTTAPDDIHDVLPQYGFPKGLLPNNAVSYTLSPDDGFFTVQLDAPCYVHWDDQLVYYHSQISGTLTYGSVSHVSGIQAQKLFLWLPVTGIKVHQDSGMLEFFVGALSQTLPASDFQDVPGCSRRGSLLATNLILPL

SEQ ID NO: 59967 - protein, 158 aa, Glycine max
  peptide (1)..(158): Ceres Seq. ID no. 13581658
MFPQTLILFSALIILFHGDLVLSTTAPDDIHDVLPQYGFPKGLLPNNAVSYTLSPDDGFFTVQLDAPCYVHWDDQLVYYHSQISGTLTYGSVSHVSGIQAQKLFLWLPVTGIKVHQDSGMLEFFVGALSQTLPASDFQDVPGCSRRGSLLATNLILPL

SEQ ID NO: 59968 - DNA, 1605 bp, Glycine max
  misc_feature (1)..(1605): Ceres Seq. ID no. 15171618
actcatttccacatctctgacagaaaatggagaactatcagtacccggcgtcgtaccctgactccggcgagtcgtcgccgcgctcccgcgagatcgacttcgagaacccgccgccgtgggacgagcagcagaaccaaaactacaaggccaagttcatgtgcagctacggcggcaagatccagccccgcacccacgacaaccagctctcctacgtcggcggcgacaccaagatcctcgccgtcgaccgctccgtcaagttccccgccttcctctccaagctcgccgccgtctgcgactccgccccgcaggacctcaccttcaagtaccagctccccggtgaggacctcgacgccctcatctccgtcaccaacgacgacgacctcgaacacatgatgcacgagtacgacagactctatcgccctaacctaaaacctgttagaatgagactcttcctcttcacgctctctagttcaaatcctaattcctctttctcctccgaacgcgaccatttcgtcgaggctcttaattcgggtccgattccttctcaacccgacccgatcaaaaccccgcccgttacgccttctaatgttgactatctcttcggtctcgataaagccgttgctcctcctccaaatcttcctccgaacttcgcagcggttaaattccacgatccggtgccggagcctgtcgcgccgccggtagagtatcaatcgagaggctccgatcgggttgttggatcggatccgaatgtgaatccgattgaaattcagagacagttgcagcaggagatggagcgattgcagattgcggagaatgaatatcgtagaaggagtgaggatggatttgcagccggttatgctgctgctgctgctgccggaggggattattatatgcagaaggtgcaggagaaggttccgccgcagaatgcggcggcgtactggtcggagaagcagttttccggggagggatatcagacgacggtgacgacggctccaggaggaggtgaccagccgatgtatgttatggcgccgccggggacgttctaccacgcgccagtggtgcggcctccggcggcggcgcaggggtactacgccgtgcagaggatgggttccgagggctaccgcgagcagcaggcggtttacggcggcgtggcgccgtcgaaagcggcgttttcttcggcggggatggctaaggggacggcgtattcggagggatatggtggcggcgtggtgaggcctgcgggggtgccggataatgcggcgtacgcgcaggtggcgtatgatagcgcgagtgggaggcaggtttactatactgcgcagggagggatggtgcacgcgccgccgccgccgcagtaccaaggggttccgcctcaggaatttaggccgggtggggtttcggtggggcaagatggtaaggtggttaacaaggttaaccaaggttctgcgtgattaagattgtgattatgttaattctgaaacaaataatacactaaatatgttttgcgtttttttttttttctcttcatggtttatatatatacactaaatattacgagtattgtttgctaataatttatgggtagtgcttaaacttccttctgtctgc

SEQ ID NO: 59969 - protein, 473 aa, Glycine max
  peptide (1)..(473): Ceres Seq. ID no. 15171619
MENYQYPASYPDSGESSPRSREIDFENPPPWDEQQNQNYKAKFMCSYGGKIQPRTHDNQLSYVGGDTKILAVDRSVKFPAFLSKLAAVCDSAPQDLTFKYQLPGEDLDALISVTNDDDLEHMMHEYDRLYRPNLKPVRMRLFLFTLSSSNPNSSFSSERDHFVEALNSGPIPSQPDPIKTPPVTPSNVDYLFGLDKAVAPPPNLPPNFAAVKFHDPVPEPVAPPVEYQSRGSDRVVGSDPNVNPIEIQRQLQQEMERLQIAENEYRRRSEDGFAAGYAAAAAAGGDYYMQKVQEKVPPQNAAAYWSEKQFSGEGYQTTVTTAPGGGDQPMYVMAPPGTFYHAPVVRPPAAAQGYYAVQRMGSEGYREQQAVYGGVAPSKAAFSSAGMAKGTAYSEGYGGGVVRPAGVPDNAAYAQVAYDSASGRQVYYTAQGGMVHAPPPPQYQGVPPQEFRPGGVSVGQDGKVVNKVNQGSA

SEQ ID NO: 59970 - protein, 430 aa, Glycine max
  peptide (1)..(430): Ceres Seq. ID no. 15171620
MCSYGGKIQPRTHDNQLSYVGGDTKILAVDRSVKFPAFLSKLAAVCDSAPQDLTFKYQLPGEDLDALISVTNDDDLEHMMHEYDRLYRPNLKPVRMRLFLFTLSSSNPNSSFSSERDHFVEALNSGPIPSQPDPIKTPPVTPSNVDYLFGLDKAVAPPPNLPPNFAAVKFHDPVPEPVAPPVEYQSRGSDRVVGSDPNVNPIEIQRQLQQEMERLQIAENEYRRRSEDGFAAGYAAAAAAGGDYYMQKVQEKVPPQNAAAYWSEKQFSGEGYQTTVTTAPGGGDQPMYVMAPPGTFYHAPVVRPPAAAQGYYAVQRMGSEGYREQQAVYGGVAPSKAAFSSAGMAKGTAYSEGYGGGVVRPAGVPDNAAYAQVAYDSASGRQVYYTAQGGMVHAPPPPQYQGVPPQEFRPGGVSVGQDGKVVNKVNQGSA

SEQ ID NO: 59971 - protein, 352 aa, Glycine max
  peptide (1)..(352): Ceres Seq. ID no. 15171621
MMHEYDRLYRPNLKPVRMRLFLFTLSSSNPNSSFSSERDHFVEALNSGPIPSQPDPIKTPPVTPSNVDYLFGLDKAVAPPPNLPPNFAAVKFHDPVPEPVAPPVEYQSRGSDRVVGSDPNVNPIEIQRQLQQEMERLQIAENEYRRRSEDGFAAGYAAAAAAGGDYYMQKVQEKVPPQNAAAYWSEKQFSGEGYQTTVTTAPGGGDQPMYVMAPPGTFYHAPVVRPPAAAQGYYAVQRMGSEGYREQQAVYGGVAPSKAAFSSAGMAKGTAYSEGYGGGVVRPAGVPDNAAYAQVAYDSASGRQVYYTAQGGMVHAPPPPQYQGVPPQEFRPGGVSVGQDGKVVNKVNQGSA

SEQ ID NO: 59972 - DNA, 1112 bp, Glycine max
  misc_feature (1)..(1112): Ceres Seq. ID no. 15173696
atcgttattccttccaccctgcccggtggaaccaaacgaagaagacgttccgttttccctctgcttttccaagttttcatcgactcaaccatgctattcttacataactagggttaggagttagggcgttcttatcgttttcgctccgttaattacaacaacgggcaacatggttgttctttcgctttcacctcccagcctctctaccgctttcctcgcaaagaaactgtctccccaagaacacgcggtgaagctagcgacctttcgcaactattcatttcgcattagatgcgcggtggatacgccctatggagggaatgttcaaaaattccctcgaaccaatgtttgggatccttaccgacgccttggtattagccctgatgcctctgaagaagaaatctggggatcaagaaattttctgttgcaacaatactctgggcatgagaggagtgaagaatcaatagaagcagcttttgaaaaaatattgatggcaagtttcgtacagaggaggaaaacaaaaattaatttgaaaagcaagttgaaaaaaaaagtagaagagtctccaccatgggtgaagaacttgctaagctttgttgaacttccaccgactgaagttatccttagaagattgtttctctttggcttcatgggtggctggagtattatgaattctgctgaaactggacctgcttttcaggtggcaatctctttggctgcatgcatatattttcttaacgaaaagacaaagagcttggctagagcattcattattgggtttggagctctagtggctggatgggtctctggttcattgctggtacctaatattccatctatgttgctgcgcccaacttggacacttgaactcttaacgtcattggtagtttatttgttcttgttcgttgcctgtactttcctcaagtgaagtggagcctattctttcaacgttatagtcggtgatgagcttataggtgatcaaacaattttttttaagcgagccaaattgtttactgtcatctttttttatgaaacaaattgtttaagttggcaatgttcagctgagatattactgagccttaactccttgtctaaatttccgttggttacgaggc

SEQ ID NO: 59973 - protein, 251 aa, Glycine max
  peptide (1)..(251): Ceres Seq. ID no. 15173697
MVVLSLSPPSLSTAFLAKKLSPQEHAVKLATFRNYSFRIRCAVDTPYGGNVQKFPRTNVWDPYRRLGISPDASEEEIWGSRNFLLQQYSGHERSEESIEAAFEKILMASFVQRRKTKINLKSKLKKKVEESPPWVKNLLSFVELPPTEVILRRLFLFGFMGGWSIMNSAETGPAFQVAISLAACIYFLNEKTKSLARAFIIGFGALVAGWVSGSLLVPNIPSMLLRPTWTLELLTSLVVYLFLFVACTFLK

SEQ ID NO: 59974 - protein, 145 aa, Glycine max
  peptide (1)..(145): Ceres Seq. ID no. 15173698
MASFVQRRKTKINLKSKLKKKVEESPPWVKNLLSFVELPPTEVILRRLFLFGFMGGWSIMNSAETGPAFQVAISLAACIYFLNEKTKSLARAFIIGFGALVAGWVSGSLLVPNIPSMLLRPTWTLELLTSLVVYLFLFVACTFLK

SEQ ID NO: 59975 - DNA, 1201 bp, Glycine max
  misc_feature (1)..(1201): Ceres Seq. ID no. 15175048
catgttatctacaataataaaccaagtgaagtcgtgcaagttccttcttcactttcacgacactcactcacacaccatggatttgctctcaatctctccctctcaccctttaccttcttccattcgaaccctttcctcaaaccctaagccacccatttcctcctccttcttcttcatccccaaaccccattcacgcttctccaaaaccccaccaaggtgcgtcttcacgccggcctcgccaatcccctccaaaaacacaaactttgggtcccagtttcggaaccctacgagcctcaccttcgagctctcctcgccccagactccctcgacggcggcgagaggcgcggagggcgacgtgatggggctgttgctgagagagaggattgtgttcctcgggagcagcatcgatgactttgtggccgatgctatcatgagccagttgctgctgttggatgcccaagaccccactaaggatatcaggctcttcattaattccactggtggctctctcagtgctacaatggctatctatgatgccgtacagcttgtgagggccgatgtttccacagttgcactcggcattgcagcatcaacagcttctgttatccttggtggtggcaccaaaggcaagcgctttgctatgccaaatacacgaattatgattcatcaacctctaggaggtgctagtggacaagctatagatgtagaaattcaggctaaagaagttatgcacaacaagaataatatcacaagaattatatcaagtttcactggacgctcatttgaacaagtgcaaaaagatattgatagggataaatatatgtctccaattgaagcagtggaatacggaattattgatggtgtaatcgatagagatagcattattcctctcatgccagtgccagaaagggtgaaatcaaccctaaactatgaagaaataagtaaagatcccaggaaattcctaaccccagatattcctgatgatgagatatactagctttaaatggttgatagggttataattaaccttgaatttaatgttacggtgataacagaacattttgggtaaagcttgaggatgctgtaacaaaccctgaaagatttaagattgtcttatatttttgtcttgcaattttaattttatttcgtgtgggtgagtgaaaaattatggttcagctattgagaattttgttggttatct

SEQ ID NO: 59976 - protein, 331 aa, Glycine max
  peptide (1)..(331): Ceres Seq. ID no. 15175049
MLSTIINQVKSCKFLLHFHDTHSHTMDLLSISPSHPLPSSIRTLSSNPKPPISSSFFFIPKPHSRFSKTPPRCVFTPASPIPSKNTNFGSQFRNPTSLTFELSSPQTPSTAARGAEGDVMGLLLRERIVFLGSSIDDFVADAIMSQLLLLDAQDPTKDIRLFINSTGGSLSATMAIYDAVQLVRADVSTVALGIAASTASVILGGGTKGKRFAMPNTRIMIHQPLGGASGQAIDVEIQAKEVMHNKNNITRIISSFTGRSFEQVQKDIDRDKYMSPIEAVEYGIIDGVIDRDSIIPLMPVPERVKSTLNYEEISKDPRKFLTPDIPDDEIY

SEQ ID NO: 59977 - protein, 306 aa, Glycine max
  peptide (1)..(306): Ceres Seq. ID no. 15175050
MDLLSISPSHPLPSSIRTLSSNPKPPISSSFFFIPKPHSRFSKTPPRCVFTPASPIPSKNTNFGSQFRNPTSLTFELSSPQTPSTAARGAEGDVMGLLLRERIVFLGSSIDDFVADAIMSQLLLLDAQDPTKDIRLFINSTGGSLSATMAIYDAVQLVRADVSTVALGIAASTASVILGGGTKGKRFAMPNTRIMIHQPLGGASGQAIDVEIQAKEVMHNKNNITRIISSFTGRSFEQVQKDIDRDKYMSPIEAVEYGIIDGVIDRDSIIPLMPVPERVKSTLNYEEISKDPRKFLTPDIPDDEIY

SEQ ID NO: 59978 - protein, 212 aa, Glycine max
  peptide (1)..(212): Ceres Seq. ID no. 15175051
MGLLLRERIVFLGSSIDDFVADAIMSQLLLLDAQDPTKDIRLFINSTGGSLSATMAIYDAVQLVRADVSTVALGIAASTASVILGGGTKGKRFAMPNTRIMIHQPLGGASGQAIDVEIQAKEVMHNKNNITRIISSFTGRSFEQVQKDIDRDKYMSPIEAVEYGIIDGVIDRDSIIPLMPVPERVKSTLNYEEISKDPRKFLTPDIPDDEIY

SEQ ID NO: 59979 - DNA, 1479 bp, Glycine max
  misc_feature (1)..(1479): Ceres Seq. ID no. 14315958
attgccttcactttcaacccgtactttctctgtttctaaacaccccccacaaaattttctcactcgagaattttcccggaaaatctcacctttttcgatttctcagtcaagacaaacaacaacaaaaactctaaattctttcttaattcttgccaaattcgaaggagagagaaagagaaaaagaaaaggaaaaaaggttaatggcatcactgggatctccgtcttctttctggtgctaccgctgcaaccgcatagttagggttccacaaaaccacgccgttctcctctgccccgattgcaactccggcttcctcgaagagctccaaacccctccccactcgcgccgatccacgcgcggcggcggtgggtcccccttcaacccggtaatcgtcctgcgcaacgcaaacgacgtcgtctcgcccgaaacgcggaacttcgaactctactacaacgacgccgtttcaggttcctccggcccaagcagtctccgtcctttaccacagggagtatccgagttcctcatgggctccggcttcgacaatgtactcgaccatctcgacgccgccgcggggggcgccggagcactgccccccacggcagcgtcgaaagcggcgatcgagtcgatgccggtggttaagatcctcgcgagccacacctacgcggaatcgcactgcgcggtctgcatggagaatttcgagatcaactgcgacgcacgtgagatgccgtgcggtcacgtgtaccattccgagtgcatcgtgccgtggctctcggtgagaaactcgtgccccgtgtgccgccacgaggttccttcggatgaagttgaagaaagtaataacaatactgtggggttgactatttggagacttcctgggggaggattcgctgtgggcaggttcatcggagggagggagctcccactggtgtatacggagatggacggcgggtttaacggcgctaacggcgttccaaggagagtcgcttgggatagctccgttgggaggtctagggagaatagaggcttcggtgctgctttcaggaatgttttttcgtatatcgggagggttaggagctcgttttctcgccgaacgagaaattcgcgtgccaacggaagatctcgttcttaaacaacggtctgcaattgcaatttcgatcgtaacgtcaaggttattagagctcactgactgtgacgcggtcgcaattgatgctgcgctgtcctcaacatttttctgcaattttctacgatatcaaaggctgcggtgatgagaccgcaatcgcagattcgcagtaaggttttaagaaaaaacgtgattgcaattgacgtcacatcagctgcatttgtctgcaatttttctgttgtattcggaaacaatgacgagactgcaacttttttttaccacagtgggatttttcgatttttgtgatgtttttagtttgctaagtattcgtttgaatttttagaggaaatgcatttttttttat

SEQ ID NO: 59980 - protein, 307 aa, Glycine max
  peptide (1)..(307): Ceres Seq. ID no. 14315959
MASLGSPSSFWCYRCNRIVRVPQNHAVLLCPDCNSGFLEELQTPPHSRRSTRGGGGSPFNPVIVLRNANDVVSPETRNFELYYNDAVSGSSGPSSLRPLPQGVSEFLMGSGFDNVLDHLDAAAGGAGALPPTAASKAAIESMPVVKILASHTYAESHCAVCMENFEINCDAREMPCGHVYHSECIVPWLSVRNSCPVCRHEVPSDEVEESNNNTVGLTIWRLPGGGFAVGRFIGGRELPLVYTEMDGGFNGANGVPRRVAWDSSVGRSRENRGFGAAFRNVFSYIGRVRSSFSRRTRNSRANGRSRS

SEQ ID NO: 59981 - protein, 200 aa, Glycine max
  peptide (1)..(200): Ceres Seq. ID no. 14315960
MGSGFDNVLDHLDAAAGGAGALPPTAASKAAIESMPVVKILASHTYAESHCAVCMENFEINCDAREMPCGHVYHSECIVPWLSVRNSCPVCRHEVPSDEVEESNNNTVGLTIWRLPGGGFAVGRFIGGRELPLVYTEMDGGFNGANGVPRRVAWDSSVGRSRENRGFGAAFRNVFSYIGRVRSSFSRRTRNSRANGRSRS

SEQ ID NO: 59982 - protein, 166 aa, Glycine max
  peptide (1)..(166): Ceres Seq. ID no. 14315961
MPVVKILASHTYAESHCAVCMENFEINCDAREMPCGHVYHSECIVPWLSVRNSCPVCRHEVPSDEVEESNNNTVGLTIWRLPGGGFAVGRFIGGRELPLVYTEMDGGFNGANGVPRRVAWDSSVGRSRENRGFGAAFRNVFSYIGRVRSSFSRRTRNSRANGRSRS

SEQ ID NO: 59983 - DNA, 1531 bp, Glycine max
  misc_feature (1)..(1531): Ceres Seq. ID no. 14315874
atcatatcatatattcatattcatctccccacgagattctggttctgtttaggccacccacacacctccatttccccaactcgctccgagtttactcactcctttccctttcgagatcaaccgccaccgctacgcctccgcgctccgccgccactgcaatccccgcctcccttctccgtcaatgcaaaattcggcgtcgattctcgccggaaccttctcccgctcttccttcccctccgggctttgacttttgctttcttgcgattgcgatgagtccctttcgccctttgttgctcttcgccgccgtattcttcctcctccgtcccctcgccgccaccgacggcgacgccgatccgctttacataggttgtgtggagcagtgtaagaaaactggatgtgtaggggatagatactttcaacattgtaaattttcatcagatggaaaaccaattgatggtccatggtatatgcatgaacccctctatctgaggtggaaacaatgggactgttgcactgactgtaggtattactgtatgctagctagagaggaagaacgaacaaaacttggcgacaagcctgtcaagtatcatggaaaatggccattccgtcgcgtttatggaattcaggaacctgtggctgttgctctgtctgccgtcaatcttgctatgcagtttcatggttgggtatcctttttcattcttgtgtactataagttgactttgaggccagataagaagacttactatgagtacactggattgtggcatatttatgggattttatccatgaacgcatggctgtggagtgctgttttccatagtagagccgtggaattaacagagaagctggatttttcttctgctgtggcattacttggattcagcctcattctagcaatattgcgagcttttaacgtgagggatgaggctacgcgagtcatgatttctgctcccttgattgcttttgtgacaactcatatcatgtatctgaatttctatgaacttgcttatggtttgaacagaatagtttgcacgggaatggttgttgtccagcttcttatttgggccatttgggctggtgcttcgaaccacccggcgcgatggaaattatgggcagtagtggttggaggaggcttagctatggtgttggagacatatgactttccaccttacatgggatatgtggatgctcatgctctatggcatgcaacaagcattcctctcacatttttttggtggggttttataagggatgatgctgagtttagaaccacagctatgctcaagaaggtaaaatagtgctgcagacacaatttggcagaggttggatctgatgaagaacatgtcatatatgttgctgcttactttgtttttgtacatcagaactttttttttttttttaatttgttttcctcgtgtaggcgtttatttgaaatgcttaacacgatggtttctgtgcttttgattttgtaactttttgttttcctcatgtatgaagcatactttcttagtggaattaattgcaatgcttt

SEQ ID NO: 59984 - protein, 431 aa, Glycine max
  peptide (1)..(431): Ceres Seq. ID no. 14315875
HIIYSYSSPHEILVLFRPPTHLHFPNSLRVYSLLSLSRSTATATPPRSAATAIPASLLRQCKIRRRFSPEPSPALPSPPGFDFCFLAIAMSPFRPLLLFAAVFFLLRPLAATDGDADPLYIGCVEQCKKTGCVGDRYFQHCKFSSDGKPIDGPWYMHEPLYLRWKQWDCCTDCRYYCMLAREEERTKLGDKPVKYHGKWPFRRVYGIQEPVAVALSAVNLAMQFHGWVSFFILVYYKLTLRPDKKTYYEYTGLWHIYGILSMNAWLWSAVFHSRAVELTEKLDFSSAVALLGFSLILAILRAFNVRDEATRVMISAPLIAFVTTHIMYLNFYELAYGLNRIVCTGMVVVQLLIWAIWAGASNHPARWKLWAVVVGGGLAMVLETYDFPPYMGYVDAHALWHATSIPLTFFWWGFIRDDAEFRTTAMLKKVK

SEQ ID NO: 59985 - protein, 342 aa, Glycine max
  peptide (1)..(342): Ceres Seq. ID no. 14315876
MSPFRPLLLFAAVFFLLRPLAATDGDADPLYIGCVEQCKKTGCVGDRYFQHCKFSSDGKPIDGPWYMHEPLYLRWKQWDCCTDCRYYCMLAREEERTKLGDKPVKYHGKWPFRRVYGIQEPVAVALSAVNLAMQFHGWVSFFILVYYKLTLRPDKKTYYEYTGLWHIYGILSMNAWLWSAVFHSRAVELTEKLDFSSAVALLGFSLILAILRAFNVRDEATRVMISAPLIAFVTTHIMYLNFYELAYGLNRIVCTGMVVVQLLIWAIWAGASNHPARWKLWAVVVGGGLAMVLETYDFPPYMGYVDAHALWHATSIPLTFFWWGFIRDDAEFRTTAMLKKVK

SEQ ID NO: 59986 - protein, 276 aa, Glycine max
  peptide (1)..(276): Ceres Seq. ID no. 14315877
MHEPLYLRWKQWDCCTDCRYYCMLAREEERTKLGDKPVKYHGKWPFRRVYGIQEPVAVALSAVNLAMQFHGWVSFFILVYYKLTLRPDKKTYYEYTGLWHIYGILSMNAWLWSAVFHSRAVELTEKLDFSSAVALLGFSLILAILRAFNVRDEATRVMISAPLIAFVTTHIMYLNFYELAYGLNRIVCTGMVVVQLLIWAIWAGASNHPARWKLWAVVVGGGLAMVLETYDFPPYMGYVDAHALWHATSIPLTFFWWGFIRDDAEFRTTAMLKKVK

SEQ ID NO: 59987 - DNA, 631 bp, Glycine max
  misc_feature (1)..(631): Ceres Seq. ID no. 13594289
agttcagttcaccctaaatttcttccactatcatcttctctcagttcgacgtcagcgaagccttcattgtttgttgggggcaattcgattcgatttcgcagagtagaatgtttgggacggcgattcgatgtttggcgaagaaaccgaagccgaagatgggacccgtgatcctgaaaacgccgccggagcagaggcagacaatcacaagaaccctcttcgatataattaaggagcatggtcccatcactgttgctaacacctgggaacgtgtccaggaagttggattgaaagatttgacaagcaagaatcacatgaaaatagtgctgaaatggatgagagagaggcagaagattcggctcctttgcaaccacgttggagcacacaaacagtttctctacaccacttggtttaccaagccggttacccctcccaagaattcctcttgaaagttgaaacttcatcatcagttcgttgctgctgttttgtaccatgtcttgtcaagagtaataatttcattttagaaccgttaatcaatagagatcgaaatgttttgcccaaaaaaaaaaaaaaaaaagcttatcgataccgtcgacctcgagggggggcccggtacccaattcgccctatagtg

SEQ ID NO: 59988 - protein, 112 aa, Glycine max
  peptide (1)..(112): Ceres Seq. ID no. 13594290
MFGTAIRCLAKKPKPKMGPVILKTPPEQRQTITRTLFDIIKEHGPITVANTWERVQEVGLKDLTSKNHMKIVLKWMRERQKIRLLCNHVGAHKQFLYTTWFTKPVTPPKNSS

SEQ ID NO: 59989 - protein, 101 aa, Glycine max
  peptide (1)..(101): Ceres Seq. ID no. 13594291
MDEREAEDSAPLQPRWSTQTVSLHHLVYQAGYPSQEFLLKVETSSSVRCCCFVPCLVKSNNFILEPLINRDRNVLPKKKKKKAYRYRRPRGGARYPIRPIV

SEQ ID NO: 59990 - protein, 96 aa, Glycine max
  peptide (1)..(96): Ceres Seq. ID no. 13594292
MGPVILKTPPEQRQTITRTLFDIIKEHGPITVANTWERVQEVGLKDLTSKNHMKIVLKWMRERQKIRLLCNHVGAHKQFLYTTWFTKPVTPPKNSS

SEQ ID NO: 59991 - DNA, 1036 bp, Glycine max
  misc_feature (1)..(1036): Ceres Seq. ID no. 15175072
ctctctctttctcaaaggtcctgtgtcagggactctgaagagagagatcacaaacatcaagtacttactacttagcacaaaattcacacaactcgtgccggggttcagaaagactgaaactttctcctttaaaacttgctgggtattaatgatctttgcctccctgagtcattacatgaagattctcaacttgggtgttcaaaatgttggttactgaggacaagtctcatgttgctgttgctatagacaatgatggctgttgtcaccggagctctgccggcggtgaggggtgctccgacgctagcgaccggacagataaggagcaaaggaggtcctcccatgtttctggcactgagattgtgggagtgtgtgaggagagaggatcagagtgttcagtggaggtggatctggttcctgaggttaaggtgcatttggccaatgaggagagggattgtaggatttgccatctcagcatggatatgaccaaccatgaatctgggactcccattgagttgggatgttcttgcaaggatgatttggctgctgctcacaagcagtgtgccgaggcttggttcaagatcaagggaaacaaaacttgtgaaatctgtggatcagttgcacgcaatgtagccggagctattgaaattcaaatgacagaacagtggaatgaggcaaatgatgcttccacggcaccatcatctggaccggcaccacttgcagaaactcaaaatttctggcagggtcaccgttttttgaattttctgctagcctgtatggtgtttgcctttgtcatatcctggctttttcactttaatgtgccctcttgaattcccgtgtaacttgaggatgaagcaggttaagatgatggggggttaatgggttattagaccaatctatggctcttaacgcaggtatcaaactcaatacctgtgcctgcttagttagttggttgggatctgtgtatttctttccatatgatatgatgttcacagtgtatttgtatttgttgtattatatggttgttcttattttgctc

SEQ ID NO: 59992 - protein, 207 aa, Glycine max
  peptide (1)..(207): Ceres Seq. ID no. 15175073
MLVTEDKSHVAVAIDNDGCCHRSSAGGEGCSDASDRTDKEQRRSSHVSGTEIVGVCEERGSECSVEVDLVPEVKVHLANEERDCRICHLSMDMTNHESGTPIELGCSCKDDLAAAHKQCAEAWFKIKGNKTCEICGSVARNVAGAIEIQMTEQWNEANDASTAPSSGPAPLAETQNFWQGHRFLNFLLACMVFAFVISWLFHFNVPS

SEQ ID NO: 59993 - protein, 117 aa, Glycine max
  peptide (1)..(117): Ceres Seq. ID no. 15175074
MDMTNHESGTPIELGCSCKDDLAAAHKQCAEAWFKIKGNKTCEICGSVARNVAGAIEIQMTEQWNEANDASTAPSSGPAPLAETQNFWQGHRFLNFLLACMVFAFVISWLFHFNVPS

SEQ ID NO: 59994 - protein, 115 aa, Glycine max
  peptide (1)..(115): Ceres Seq. ID no. 15175075
MTNHESGTPIELGCSCKDDLAAAHKQCAEAWFKIKGNKTCEICGSVARNVAGAIEIQMTEQWNEANDASTAPSSGPAPLAETQNFWQGHRFLNFLLACMVFAFVISWLFHFNVPS

SEQ ID NO: 59995 - DNA, 1108 bp, Glycine max
  misc_feature (1)..(1108): Ceres Seq. ID no. 14316300
attcggcctccagccctttaaaccccacaaaaccctagacttcgcagcgagcagccgtcgtccgatccccacagaaacaccaaagcccgagccatgtcgtcggcgtccctcgccgccaggctcctccgccgcgccgcctcttcgtcgcgggcctccaccctatcccgacgctgcgcccactcctccgcgacgtcccgcgcgcccgtttcgcttgcccgtttccaccccgccgccgcctccccttcagggaccactgcccgccgcttcctgtcgtcgcagtccccggcgtcttcctccaagatctccccggacgagaacctgaggcgggtcatcgactccgagatcgagtgcgtcgtcgaatcggaggagggctccgcgcagcaaattgatccaccagaagacttcccctttgagataattgataaccctggtgatcagtccatcgttctcaaaagagagcttgcaggagagactattaaagctactgtctacacaaattttgatactgaggaagatttgaacaatgaggactctggtgctgagaatgatgatgactcatttaagccagcacttcagatggttgtcactgttgagaaaccaggaggctcaatcctggaatttgagtgcaactttaatgatgatgaactggcaattgaaaatatgaggttgctgaatcgcgatgccaagtttactgagaatgcatatgaggggccacaattctctgatctggacgagagcttgcagaagtcctttcacaggtatcttgaggtgagggggatcaagcactcgctgcatgactggctgcacgagtacatgatgagcaaggatgagaaggagtacgtggtttggttgaagaacatgagagagttcatcgagaaatgagtgccactgcccgtcattctcttttaatagaaagaacatgcctggtgctctatgtcaaacctgtctgatcataattgtgccttgctttctggcacaccaagtctcggtggacgctgagctggatttatattttgctggacctgtttagctgtagaaaagtttcggcatcttatctttcgatgtttaacctgtgatccgttcagatatgatcagttcatgtattttc

SEQ ID NO: 59996 - protein, 262 aa, Glycine max
  peptide (1)..(262): Ceres Seq. ID no. 14316301
MSSASLAARLLRRAASSSRASTLSRRCAHSSATSRAPVSLARFHPAAASPSGTTARRFLSSQSPASSSKISPDENLRRVIDSEIECVVESEEGSAQQIDPPEDFPFEIIDNPGDQSIVLKRELAGETIKATVYTNFDTEEDLNNEDSGAENDDDSFKPALQMVVTVEKPGGSILEFECNFNDDELAIENMRLLNRDAKFTENAYEGPQFSDLDESLQKSFHRYLEVRGIKHSLHDWLHEYMMSKDEKEYVVWLKNMREFIEK

SEQ ID NO: 59997 - DNA, 1766 bp, Glycine max
  misc_feature (1)..(1766): Ceres Seq. ID no. 15171696
aaagcagaaaaaaaagtgggtcactttagcaacaaaaccttcacatcccatctctcatcaatggtgtttccaattgctgggtggagctttacgcaatcccattacactctctttctctccatttccttctattctctattattatatccttttctatttttatttttctcattgcattctctaatctttaatctctattctctacccattcatattcatccccgtttttctctgtcactgtcgcataacactctttgaaccaccgcaactaaagtaacaaccccatgtcctgaacctcacttttcttctcgccaaagcttccaattttcgatttttcccttgttttcagagaaatatcaacaccccagaaaataaaattgagagaatagaagaaaaccttttctgggttaatttggtaatttcctttttcttctttcatgggtaacataggaagcagcggctccaacagccgccggagacacggcggcggcggcggcagcggtaggcggattcacccgcctccgccgcaggtgatgccgccgccggaggtcacggccaaccaattcgtgtatcctccggccgccacgccgtatcacaactaccccgggtactacccggcgccgaccaccatgccggcgccgttgccggcgccgtacgaccaccaccaccgtacggcggtagacccgatgtgggggcggtatccggtggcggcaccgccggcaccggcgccgtacgtggaacaccagaaggcggttactattaagaacgatgtcaacatcaagaaggagacgcttaggattgagcctgatgacgagaatcctggccgtttccttgtgtcatttacgtttgatgccaccgtttcggggagcatcaccatacttttctttgcaaaagaaggggaaggttgcacactaactccaatgaaagaaaatgttcttccacccgtgactgtaaatttccagcaaggacttggccagaagtttaaacagccagctggaactggtattgatttttcaacatttgaggagtctgagttattgaaagtaggggacatggatgtctatcctgttgcaattaaagcagatgcatcctccagcgaccatgatgaatcaaaatcaaatgaaactccatcatccggtagctcaaactctcagataactcaagcagtgtttgagaaggagaaaggagaattccaggtgaaggttgtgaagcagatcttatgggtaaatggaatgaggtatgaactgcaggagatatatggtattggaaattcagtggagagtgatgtggatgggaatgacccaggaaaagagtgtgttatatgcttgtcagagcctcgggacacaactgtccttccatgccgccacatgtgtatgtgtagcggatgtgcgaaggttttgaggttccagacaaatagatgtccaatctgcagacaaccagttgagaggctattggagatcaaagtcgggcctgagcctgaggaatgaagattcaatgttagtgacacaacaagcttcctgtacagtccaactgttatagctaatacttttctcttactttatcaggtttttccaataatcccacaaaatagaaattggaatttatgtatgacattatgtttgacatgtacagcaggctggcattgcacctgacttgtattattgtataagccaatgcctccgccatgcttgtttggttttacttctaatttttatgtggctttcccttctgaatcatatttagatgtgtttctcaccttcgcttcg

SEQ ID NO: 59998 - protein, 349 aa, Glycine max
  peptide (1)..(349): Ceres Seq. ID no. 15171697
MGNIGSSGSNSRRRHGGGGGSGRRIHPPPPQVMPPPEVTANQFVYPPAATPYHNYPGYYPAPTTMPAPLPAPYDHHHRTAVDPMWGRYPVAAPPAPAPYVEHQKAVTIKNDVNIKKETLRIEPDDENPGRFLVSFTFDATVSGSITILFFAKEGEGCTLTPMKENVLPPVTVNFQQGLGQKFKQPAGTGIDFSTFEESELLKVGDMDVYPVAIKADASSSDHDESKSNETPSSGSSNSQITQAVFEKEKGEFQVKVVKQILWVNGMRYELQEIYGIGNSVESDVDGNDPGKECVICLSEPRDTTVLPCRHMCMCSGCAKVLRFQTNRCPICRQPVERLLEIKVGPEPEE

SEQ ID NO: 59999 - protein, 317 aa, Glycine max
  peptide (1)..(317): Ceres Seq. ID no. 15171698
MPPPEVTANQFVYPPAATPYHNYPGYYPAPTTMPAPLPAPYDHHHRTAVDPMWGRYPVAAPPAPAPYVEHQKAVTIKNDVNIKKETLRIEPDDENPGRFLVSFTFDATVSGSITILFFAKEGEGCTLTPMKENVLPPVTVNFQQGLGQKFKQPAGTGIDFSTFEESELLKVGDMDVYPVAIKADASSSDHDESKSNETPSSGSSNSQITQAVFEKEKGEFQVKVVKQILWVNGMRYELQEIYGIGNSVESDVDGNDPGKECVICLSEPRDTTVLPCRHMCMCSGCAKVLRFQTNRCPICRQPVERLLEIKVGPEPEE

SEQ ID NO: 60000 - protein, 285 aa, Glycine max
  peptide (1)..(285): Ceres Seq. ID no. 15171699
MPAPLPAPYDHHHRTAVDPMWGRYPVAAPPAPAPYVEHQKAVTIKNDVNIKKETLRIEPDDENPGRFLVSFTFDATVSGSITILFFAKEGEGCTLTPMKENVLPPVTVNFQQGLGQKFKQPAGTGIDFSTFEESELLKVGDMDVYPVAIKADASSSDHDESKSNETPSSGSSNSQITQAVFEKEKGEFQVKVVKQILWVNGMRYELQEIYGIGNSVESDVDGNDPGKECVICLSEPRDTTVLPCRHMCMCSGCAKVLRFQTNRCPICRQPVERLLEIKVGPEPEE

SEQ ID NO: 60001 - DNA, 1656 bp, Glycine max
  misc_feature (1)..(1656): Ceres Seq. ID no. 14316111
aaaagactatccctggttttcaatctggctccttcctctctgtccatgacgacgtcgtccggttccctaaagaacacgattcccccaggcctccaagaagtgcttctcaacagaaaacgcccccaacaagaacccaacaacaatgccggaccctcttcctccaccgaggacgctgccatcgccgacgattgctccagctccaactccaagctcatcgtgctggtcaccaacagtgacagcattgagtcaccgggccttacattcctcgtcgaagccctcgtgcgtcagggcctctacgacgtccatgtctgcgttcctcaatcggacaaatcggcttcgggccactctgtcactcgcggagaaaccgtcgaagcttgttcggtacaaattaatggcgccaccgcctttgaagtttcaggaactcctgtggattgcgtttcactagcgttatctggggccttgttttcatggtcaaagcctgtgctggttattagcggaattaaccagggatcaagctgtggtcatcacatgttttactcaggtgctgttgctggagctagagaggcgttattatgtggtgtaccttcattgtcaatatcattaaatcggaagaaggatgaaagtcaagagactgatttcaaggatgcagtagtactctgtttacctttaataaatgctgctatcagggatgttgtaaacggaactttcctcaaaaactgctttctgaatatagaaattcctaaatcacctttaaccagcaagggcttcaaattgaccaagcaaagtatgtggagatccactccaaactggcaggcagtttcaactagccggtatcctcctggtcatttcttggccagtaaacaaggctttggtcttcagtttgcacagattggccgagatgcctctgctgctggtgcagctcggagattaactacacagaaaaagaatttggagattgttgaatcaattggagctgccggaaaagctgattccaacagggtgaagaagtacttcaggctagagtttttggataaacagcaggaagatatagatgatgatctagattacatggcacttgaaaatggatttgttgcagttactccactctctctttctcttcatactgagaccgatattcaaatggcagcttctgattggatttcatctgtgctttctggtgaacaatagcctcaagcagagttcagcttcagcgtaattatgtacatttgagatttctgatgattctttcttttctatgttcttgaaagcaaaggtcgagcagaagcggcagtcacacctattctatagttgatatcatcaatctgcactctttttttttttgtatgcgtgtaagatattttgtattcctctcttcattgtttcatttcttttggtcgctagttatttctgatgtgtgcttcctgtaatctcctaggcatattttaaaaatgccatttcgtctgtttgtaacttaaaaaactactagcaaaacgctggtgcacgtgtcattgtaatttttcgctaaattgttgtttgaaagatagttttaagcttggtttgatggtttgtagcctctggtcagatatctagcagccttgtatggattttgacctttcaaaatatttttttttcaatgttaaaatgtttaacgaaaac

SEQ ID NO: 60002 - protein, 395 aa, Glycine max
  peptide (1)..(395): Ceres Seq. ID no. 14316112
KRLSLVFNLAPSSLSMTTSSGSLKNTIPPGLQEVLLNRKRPQQEPNNNAGPSSSTEDAAIADDCSSSNSKLIVLVTNSDSIESPGLTFLVEALVRQGLYDVHVCVPQSDKSASGHSVTRGETVEACSVQINGATAFEVSGTPVDCVSLALSGALFSWSKPVLVISGINQGSSCGHHMFYSGAVAGAREALLCGVPSLSISLNRKKDESQETDFKDAVVLCLPLINAAIRDVVNGTFLKNCFLNIEIPKSPLTSKGFKLTKQSMWRSTPNWQAVSTSRYPPGHFLASKQGFGLQFAQIGRDASAAGAARRLTTQKKNLEIVESIGAAGKADSNRVKKYFRLEFLDKQQEDIDDDLDYMALENGFVAVTPLSLSLHTETDIQMAASDWISSVLSGEQ

SEQ ID NO: 60003 - protein, 380 aa, Glycine max
  peptide (1)..(380): Ceres Seq. ID no. 14316113
MTTSSGSLKNTIPPGLQEVLLNRKRPQQEPNNNAGPSSSTEDAAIADDCSSSNSKLIVLVTNSDSIESPGLTFLVEALVRQGLYDVHVCVPQSDKSASGHSVTRGETVEACSVQINGATAFEVSGTPVDCVSLALSGALFSWSKPVLVISGINQGSSCGHHMFYSGAVAGAREALLCGVPSLSISLNRKKDESQETDFKDAVVLCLPLINAAIRDVVNGTFLKNCFLNIEIPKSPLTSKGFKLTKQSMWRSTPNWQAVSTSRYPPGHFLASKQGFGLQFAQIGRDASAAGAARRLTTQKKNLEIVESIGAAGKADSNRVKKYFRLEFLDKQQEDIDDDLDYMALENGFVAVTPLSLSLHTETDIQMAASDWISSVLSGEQ

SEQ ID NO: 60004 - protein, 219 aa, Glycine max
  peptide (1)..(219): Ceres Seq. ID no. 14316114
MFYSGAVAGAREALLCGVPSLSISLNRKKDESQETDFKDAVVLCLPLINAAIRDVVNGTFLKNCFLNIEIPKSPLTSKGFKLTKQSMWRSTPNWQAVSTSRYPPGHFLASKQGFGLQFAQIGRDASAAGAARRLTTQKKNLEIVESIGAAGKADSNRVKKYFRLEFLDKQQEDIDDDLDYMALENGFVAVTPLSLSLHTETDIQMAASDWISSVLSGEQ

SEQ ID NO: 60005 - DNA, 1648 bp, Glycine max
  misc_feature (1)..(1648): Ceres Seq. ID no. 14315162
atgtcaatcatagtgataattggagagagagagagaacacacggtgtgagagaaagaaagtttttggttagggaggaacccacctacattctagttagggagaaagtgtgagagagaaagaaagggatcggaagaatgaagctctagttttctctgagagtaagtgaagaaaaactcaaaatagaagatgtttatcatgctgatggtgatgagagagaaagggtcagcaacaagaacagaagaaaagagattcatcacactaatatagattgtacttgattggagcaggattgtccataaaaatacaagccttcagttgtggctactacaaggtggttcccttcggattccggtgcctttgcggactggtcggcccctccgtctgctgtctccggccgcggcgacgatctctccctcggcttcaatgcttcatccgccaccacacatggtggcggtgcagccatgtggccgggggcatccaggtcatttaactacaacatggcgcctcaccacgacatcttcgtggtagcgcccgcttcctctttccaccaccaccacgaccacaacgacgccgtattgtccgatccaaataacggttctaacaattcgaacaacaatcctggaactgcactcggtgtgaatgttttccctctcctaaccgccacgccatgcctcgagagcgagggcataatgggaaacatcagccaccaccgtaacagaattcagttatgggaagatcacgagtcttctccaccgcagcagcaacagggtcacgtggagcgtgacacgtgtggggatgggggtttgggtgggagtgggactaacacgtgccaggactgtgggaaccaggcgaagaaggactgtagtcaccggaggtgcaggacgtgttgcaagagtaggggttttgattgcgccacgcacgtgaagagcacgtgggtgccggcgtcgcggcggagggagaggcagctcatgacggttgcggcggccaggtccagtggggacacttctggtgccaagaaacctaggcttgttgcttcccagactacttcgcatacttcaacgtctaataatactaataccactcctccgaggagttttgacactggttctagccaccaagatgtgggtttcaaggagtcactaccttgccaagtgcgtgcaccggcggtgttcaagtgtgttcgtgtaacagcagtggatgatggtggggaagatgagtatgcttatcaagcagttgtgaagattggtggccatgtgttcaaagggtttctctatgatcaaggggttgaggacaaagaagggtatcctaatttatcagaattgcatttgggtggtggaaatggggtttcctcttcatctccaatggtggatccttctcatgatgtctatgcagcttcaggtggtgggttacttcttggaggttcatcaaactatggtaatcatccaataaattaaaaaccattctttccaagtgcaacatagatgatgatgatgggcttggaaagcctgacttattaattattgtagggtaatttttctaattttgccaaatattgggggttgggggtggggggtatagattaattaatattaatattcttctgagtttgtatcttatcttataaccatatgtcactctgcatttttc

SEQ ID NO: 60006 - protein, 330 aa, Glycine max
  peptide (1)..(330): Ceres Seq. ID no. 14315163
MWPGASRSFNYNMAPHHDIFVVAPASSFHHHHDHNDAVLSDPNNGSNNSNNNPGTALGVNVFPLLTATPCLESEGIMGNISHHRNRIQLWEDHESSPPQQQQGHVERDTCGDGGLGGSGTNTCQDCGNQAKKDCSHRRCRTCCKSRGFDCATHVKSTWVPASRRRERQLMTVAAARSSGDTSGAKKPRLVASQTTSHTSTSNNTNTTPPRSFDTGSSHQDVGFKESLPCQVRAPAVFKCVRVTAVDDGGEDEYAYQAVVKIGGHVFKGFLYDQGVEDKEGYPNLSELHLGGGNGVSSSSPMVDPSHDVYAASGGGLLLGGSSNYGNHPIN

SEQ ID NO: 60007 - protein, 318 aa, Glycine max
  peptide (1)..(318): Ceres Seq. ID no. 14315164
MAPHHDIFVVAPASSFHHHHDHNDAVLSDPNNGSNNSNNNPGTALGVNVFPLLTATPCLESEGIMGNISHHRNRIQLWEDHESSPPQQQQGHVERDTCGDGGLGGSGTNTCQDCGNQAKKDCSHRRCRTCCKSRGFDCATHVKSTWVPASRRRERQLMTVAAARSSGDTSGAKKPRLVASQTTSHTSTSNNTNTTPPRSFDTGSSHQDVGFKESLPCQVRAPAVFKCVRVTAVDDGGEDEYAYQAVVKIGGHVFKGFLYDQGVEDKEGYPNLSELHLGGGNGVSSSSPMVDPSHDVYAASGGGLLLGGSSNYGNHPIN

SEQ ID NO: 60008 - protein, 254 aa, Glycine max
  peptide (1)..(254): Ceres Seq. ID no. 14315165
MGNISHHRNRIQLWEDHESSPPQQQQGHVERDTCGDGGLGGSGTNTCQDCGNQAKKDCSHRRCRTCCKSRGFDCATHVKSTWVPASRRRERQLMTVAAARSSGDTSGAKKPRLVASQTTSHTSTSNNTNTTPPRSFDTGSSHQDVGFKESLPCQVRAPAVFKCVRVTAVDDGGEDEYAYQAVVKIGGHVFKGFLYDQGVEDKEGYPNLSELHLGGGNGVSSSSPMVDPSHDVYAASGGGLLLGGSSNYGNHPIN

SEQ ID NO: 60009 - DNA, 1341 bp, Glycine max
  misc_feature (1)..(1341): Ceres Seq. ID no. 14315170
agatttaattcctttcaaccaaacacaccaaaataagccgggcgccaaaacaaataagccggaatcaaagagtaccctttccagccttccgtaccaaacaaaattgaatctctcttccgcacaaacaacctctcacgccccaaagccacacacaaaacatttaccttttccaacccttcaattccctaaacatttttcttttccttcgaactccaattccctcaccagaacacggtcaccattgttttccctttcaacaacattcgccatcctttcgcgacgaagagaaaaaaaaaaggggtgttagggtttcgattctctgcgacgctctccgcattgcgctaccctgcaccttcctcaccatatcgcgcgcctctctcactcccctactgtttttccgctccccaccccctctctctgtgttgcgaaaattagggttcataggtttggggctaattcttcttccgatttcgaaccgagcgcaatcgtaaagagagaaaatgtacgctgatcgcgtggagggtggagcaaggaggccagtgaaggaacgccttaatgatgtgaatggtgtcagtggctctactcgcccgcagcagcagcgtcaaatcactggcaagaggtcaaggcaagatgacaagtgggaacatgatctctttgacaatgacgaaccccggatcactaatcgcaaagttagtgctcaagatcttcgcctcaagcttcaaaggaagggtcttcaacctgcatctcagagtggaaagagttctgccccaaacgtgctggatctccgtgaaaggctatcagggacaatggcaccacaacctacaaattatgatctgcctaagacaaaagttattaaaccaagcagtaaaagtgttggtgttgaggctcctgcagtgcagatcaaaaggccagctgacccagctcctaaaaagtcatggaaggctggtccttcagttgatgaatttttgcggtccttgggtctcgaaaagtatctcataacttttcaggctgaagaagttgatatgacagctctcaatcatatgactgatgaagatctcaaggctatgggcataccaatgggaccaagaaagaagatacttttagcactggagtcgaaagtctaacatttagttatggaattgattttctaagctggatggtggtgggaggagatcaggatctaaaaaccaagtgtaatagcatagttctttgattattttcgtttttaatattttcccttactttttagacattaatcaagttaattttggtgtttattttgctaaaccccgtcaatctcctgaaactctcttataatgcaattaatggatttgagagttt

SEQ ID NO: 60010 - protein, 207 aa, Glycine max
  peptide (1)..(207): Ceres Seq. ID no. 14315171
MYADRVEGGARRPVKERLNDVNGVSGSTRPQQQRQITGKRSRQDDKWEHDLFDNDEPRITNRKVSAQDLRLKLQRKGLQPASQSGKSSAPNVLDLRERLSGTMAPQPTNYDLPKTKVIKPSSKSVGVEAPAVQIKRPADPAPKKSWKAGPSVDEFLRSLGLEKYLITFQAEEVDMTALNHMTDEDLKAMGIPMGPRKKILLALESKV

SEQ ID NO: 60011 - protein, 144 aa, Glycine max
  peptide (1)..(144): Ceres Seq. ID no. 14315172
MVSVALLARSSSVKSLARGQGKMTSGNMISLTMTNPGSLIAKLVLKIFASSFKGRVFNLHLRVERVLPQTCWISVKGYQGQWHHNLQIMICLRQKLLNQAVKVLVLRLLQCRSKGQLTQLLKSHGRLVLQLMNFCGPWVSKSIS

SEQ ID NO: 60012 - protein, 122 aa, Glycine max
  peptide (1)..(122): Ceres Seq. ID no. 14315173
MTSGNMISLTMTNPGSLIAKLVLKIFASSFKGRVFNLHLRVERVLPQTCWISVKGYQGQWHHNLQIMICLRQKLLNQAVKVLVLRLLQCRSKGQLTQLLKSHGRLVLQLMNFCGPWVSKSIS

SEQ ID NO: 60013 - DNA, 663 bp, Glycine max
  misc_feature (1)..(663): Ceres Seq. ID no. 13594273
atattcaaaagccgaacccaaataacacaacacaaaacgatcttttatttctctgtctagagaagaatctagcaagccttgctcgtcacaaaatcaaaggttgcaactgagaactcactccttcgaatcaaaatcaaaaaatgtcggtgactctgcacacaaacctaggcgacatcaagtgtgaaatcttctgcgacgaggtccctaaaacctccgagaattttttagcgctatgtgcaagtggttactatgatgggactatatttcaccgcaacattaagggttttatgattcaaggtggagatccaactggaactggcaaagggggaaccagtatatggggcaagaaatttaacgatgagataagagaatctctgaagcacaatgcaagaggaatattagcaatggccaatagtggtccaaatactaatggaagccaatttttcttgacttatgcaaagctttatccaatcactgtgtgtggtgtgtgcttaagttaaaaacttgccttccaattaatgtaacgagtgtttcctttctcatttccttttgccacagaattgtgagagtcagttgatatctttgtatgtgacttcaataaattttaataaaagaaagcatcatttaaaaaaaaaaaaaaaaaagcttatcgataccgtcgac

SEQ ID NO: 60014 - protein, 119 aa, Glycine max
  peptide (1)..(119): Ceres Seq. ID no. 13594274
MSVTLHTNLGDIKCEIFCDEVPKTSENFLALCASGYYDGTIFHRNIKGFMIQGGDPTGTGKGGTSIWGKKFNDEIRESLKHNARGILAMANSGPNTNGSQFFLTYAKLYPITVCGVCLS

SEQ ID NO: 60015 - protein, 70 aa, Glycine max
  peptide (1)..(70): Ceres Seq. ID no. 13594275
MIQGGDPTGTGKGGTSIWGKKFNDEIRESLKHNARGILAMANSGPNTNGSQFFLTYAKLYPITVCGVCLS

SEQ ID NO: 60016 - DNA, 1062 bp, Glycine max
  misc_feature (1)..(1062): Ceres Seq. ID no. 15225932
ggttacttttcgcatcttttcgttttgagctcaccgtggctcttctccattgtcgttttgcttctcccttcttccttcccattcaaaccctaatctgtccctcggatcccaaaattgccccaaattgagaacacgccatggcggcaacgttcgatttggttcgttccctcgcacttctcactcttgcatttgtgtgtagcgtcgcgaattcgatgcggttcgagcttcaatcgggtaacaccaagtgcatttcagaagacattaagaccaacgcgatgagtgtgggaaagtacagtgttgttaatccccgagaagggtacccacttcccgattcccacaggatcgttgtcaaggtgacgtcgcctcatgcgaacatgtatcactttggagatcatgtggattctggtaattttgcatttacggcatctgagtctggtgactactcagcttgcttttgggttcaggataccagagataccccgtcggtggtgactattgaatttgagtggagaactggggttgctgccaaagactggtccaaggttgccaagaaagggcagattgaagtaatggaatttgagttgaagaagctatatgatactatcctatccatccatgacgagatgttttatcttcgagaaagggaggaagagatgcaagatcttaacaaagcaacaaacagcaagatgtttaccttcagtttcctttcgattgtggtttgcttgtctgtggctggtttgcaactatggcatttgaagacattctttgagaggaagaagctcctctaagttcatcacacgaattttgttcatttttgcttcagaattttttttattttctgttcctggttgttccttatgtatccaaatgtatgattagttcatctttcacttttacattttatggcaactagaaattgctgctgatcgcaagtcatgttaaatgtatgttacaattatgaaccggtattaactttagaaactatagttaaatttcttaacaggcccttaaaaaaaaaaaaaaaaaaaaaaaaaaaaaaaaaaaaaaaaaaaaaaaaaaaag

SEQ ID NO: 60017 - protein, 216 aa, Glycine max
  peptide (1)..(216): Ceres Seq. ID no. 15225933
MAATFDLVRSLALLTLAFVCSVANSMRFELQSGNTKCISEDIKTNAMSVGKYSVVNPREGYPLPDSHRIVVKVTSPHANMYHFGDHVDSGNFAFTASESGDYSACFWVQDTRDTPSVVTIEFEWRTGVAAKDWSKVAKKGQIEVMEFELKKLYDTILSIHDEMFYLREREEEMQDLNKATNSKMFTFSFLSIVVCLSVAGLQLWHLKTFFERKKLL

SEQ ID NO: 60018 - protein, 191 aa, Glycine max
  peptide (1)..(191): Ceres Seq. ID no. 15225934
MRFELQSGNTKCISEDIKTNAMSVGKYSVVNPREGYPLPDSHRIVVKVTSPHANMYHFGDHVDSGNFAFTASESGDYSACFWVQDTRDTPSVVTIEFEWRTGVAAKDWSKVAKKGQIEVMEFELKKLYDTILSIHDEMFYLREREEEMQDLNKATNSKMFTFSFLSIVVCLSVAGLQLWHLKTFFERKKLL

SEQ ID NO: 60019 - protein, 170 aa, Glycine max
  peptide (1)..(170): Ceres Seq. ID no. 15225935
MSVGKYSVVNPREGYPLPDSHRIVVKVTSPHANMYHFGDHVDSGNFAFTASESGDYSACFWVQDTRDTPSVVTIEFEWRTGVAAKDWSKVAKKGQIEVMEFELKKLYDTILSIHDEMFYLREREEEMQDLNKATNSKMFTFSFLSIVVCLSVAGLQLWHLKTFFERKKLL

SEQ ID NO: 60020 - DNA, 1305 bp, Glycine max
  misc_feature (1)..(1305): Ceres Seq. ID no. 14316546
tgctcaattcttatcctccttttcagcttcatcagggcaaatggcaccacagtctttttttacacagtctggtcaacacgtgcagcaagatttctcagctgtaaccagtcaacctgcagcacaatccttttcagctcctggtggccaacctctacaacccccaccatcagttcccactagtcaacatgcacagcaaccctttccatctcacactgatcaatctgcacagtcagttagtcatatatatggtggatttccttccctggctgctggctctatgactcaagaagcttcttcagccatgttccctcaatctcaaggtggacatatgaaccagacctatgaacaaggatctatgccacttatccctttacacacggctccccaagcttcaacaggacagagtgcaaactatttgtcttctcaatcccccattgatcaagcatcacagtttaacagtgggaacttgtcgggacagtcatttaaccatcaaccacttggtcaaggagtacatgcttcacagaatgctgtttctcagccacccaaggacaagtttgagacaaaatcgacagtttgggcagacacacttagcagggggttggttaatttgaatatatctggacctaaaataaaccctttagcagatattggagttgactttgatgccattaataggagggaaaagaggatggagaagcccaccacgacaacggtaacgtcaactgtaacaatgggtaaagctatgggatctggttcaggtatgggccgggctggtgtgggtgctcttagacctccaccaaacccgatgatgggtcctggtgttggtatggcacatatgggtatgggaggctatggaggcatgaacgtgcctatgggtatggtgcagatgcagccaccaccttttggatttccgcctgggtccaacatgcctggaaattataactccatgatgagaagaggtggttatcctcaacatccgtacagtggtggtggctaccgatgagatttatagcaatgtcaaagtgtataagattgagcactatacctagataagatcatagcaaggtaaagtagtattagtttatgacgcaattgttttgctacacagtttagagaacggcacggcaatacatctggtctacatcttgcaatcgtatttctaacaatagatgttatccttatacttgtttttttattatgctttccactcatttttataggtgttttgctgtgtaccagtcaccccatcaaataaccttacttgggttattggtttttttttttatagttaatacccccaacgcc

SEQ ID NO: 60021 - protein, 333 aa, Glycine max
  peptide (1)..(333): Ceres Seq. ID no. 14316547
AQFLSSFSASSGQMAPQSFFTQSGQHVQQDFSAVTSQPAAQSFSAPGGQPLQPPPSVPTSQHAQQPFPSHTDQSAQSVSHIYGGFPSLAAGSMTQEASSAMFPQSQGGHMNQTYEQGSMPLIPLHTAPQASTGQSANYLSSQSPIDQASQFNSGNLSGQSFNHQPLGQGVHASQNAVSQPPKDKFETKSTVWADTLSRGLVNLNISGPKINPLADIGVDFDAINRREKRMEKPTTTTVTSTVTMGKAMGSGSGMGRAGVGALRPPPNPMMGPGVGMAHMGMGGYGGMNVPMGMVQMQPPPFGFPPGSNMPGNYNSMMRRGGYPQHPYSGGGYR

SEQ ID NO: 60022 - protein, 320 aa, Glycine max
  peptide (1)..(320): Ceres Seq. ID no. 14316548
MAPQSFFTQSGQHVQQDFSAVTSQPAAQSFSAPGGQPLQPPPSVPTSQHAQQPFPSHTDQSAQSVSHIYGGFPSLAAGSMTQEASSAMFPQSQGGHMNQTYEQGSMPLIPLHTAPQASTGQSANYLSSQSPIDQASQFNSGNLSGQSFNHQPLGQGVHASQNAVSQPPKDKFETKSTVWADTLSRGLVNLNISGPKINPLADIGVDFDAINRREKRMEKPTTTTVTSTVTMGKAMGSGSGMGRAGVGALRPPPNPMMGPGVGMAHMGMGGYGGMNVPMGMVQMQPPPFGFPPGSNMPGNYNSMMRRGGYPQHPYSGGGYR

SEQ ID NO: 60023 - protein, 241 aa, Glycine max
  peptide (1)..(241): Ceres Seq. ID no. 14316549
MTQEASSAMFPQSQGGHMNQTYEQGSMPLIPLHTAPQASTGQSANYLSSQSPIDQASQFNSGNLSGQSFNHQPLGQGVHASQNAVSQPPKDKFETKSTVWADTLSRGLVNLNISGPKINPLADIGVDFDAINRREKRMEKPTTTTVTSTVTMGKAMGSGSGMGRAGVGALRPPPNPMMGPGVGMAHMGMGGYGGMNVPMGMVQMQPPPFGFPPGSNMPGNYNSMMRRGGYPQHPYSGGGYR

SEQ ID NO: 60024 - DNA, 1071 bp, Glycine max
  misc_feature (1)..(1071): Ceres Seq. ID no. 15177034
atatatcatttcaagaccttaaagtaccaaacttccaactcttctctcttctctcttcactcttcactcttgtcgtcatttcctcacaaaaccagtgtccgtaacatctccaccttaacgatgtcggtaaaggagtgtcaccaccacaagggaaagaagcacaaactctggagacgcatcttctggggcatagtgatcttcgccttcatcgtgttgctaacagttcttataatctgggcaatcctaaagccttcaaagccaaccttcatcctccaagacgtgaccgtctacggcttcaacgccaccatccccaacttcctcacctcaagctttcaggtcacgctttcctcgcgcaaccccaacgacaaaatcggagtctactacgaccgtctcgacacctacgtcacttaccggaaccaggtcacgtaccgaacctcaatcccaccctcataccaaggtcacaaggaagaggatgtgtggtccccattcgtcttcggcactaacgtccccgtcgcacccttcaacttcgttggtctcagtcaagaccagaccaacggcaacgtcctcgtcctcgttaagattgacggtaaggtacgatggaaagttggtaccttcgtctctggtcactacaacctctatgtaaggtgccctgctttcataacttttggcccccaaagcaccgggattgcccttggcaagaacgccgttaagtatcaattggttcaacgctgcaccgtcggggtttgatgtaaccgccgtccaacatatattcattctgtctttgctctgctccttgctatatttagtgtctatctatatacggtcttttctcatttctttttttttatatacgtattcttgttatcttccactacgtatttcttctgtattgacggatcactttgttgttaggcatacgtgcgtgtctttgttacagcatttggaattgtacattttgctacagaataaactgcacttggaaaaaaaagtatgtaatagagatgaaagcgaaattacaatttgtaacaaagagccaattgaaataaattaaaacgttgtttcaatttggac

SEQ ID NO: 60025 - protein, 248 aa, Glycine max
  peptide (1)..(248): Ceres Seq. ID no. 15177035
IYHFKTLKYQTSNSSLFSLHSSLLSSFPHKTSVRNISTLTMSVKECHHHKGKKHKLWRRIFWGIVIFAFIVLLTVLIIWAILKPSKPTFILQDVTVYGFNATIPNFLTSSFQVTLSSRNPNDKIGVYYDRLDTYVTYRNQVTYRTSIPPSYQGHKEEDVWSPFVFGTNVPVAPFNFVGLSQDQTNGNVLVLVKIDGKVRWKVGTFVSGHYNLYVRCPAFITFGPQSTGIALGKNAVKYQLVQRCTVGV

SEQ ID NO: 60026 - protein, 208 aa, Glycine max
  peptide (1)..(208): Ceres Seq. ID no. 15177036
MSVKECHHHKGKKHKLWRRIFWGIVIFAFIVLLTVLIIWAILKPSKPTFILQDVTVYGFNATIPNFLTSSFQVTLSSRNPNDKIGVYYDRLDTYVTYRNQVTYRTSIPPSYQGHKEEDVWSPFVFGTNVPVAPFNFVGLSQDQTNGNVLVLVKIDGKVRWKVGTFVSGHYNLYVRCPAFITFGPQSTGIALGKNAVKYQLVQRCTVGV

SEQ ID NO: 60027 - DNA, 803 bp, Glycine max
  misc_feature (1)..(803): Ceres Seq. ID no. 14316320
agttggcgaatgacaatgcaatgctcgtgtcgttttggtgtcactgagtcagtctgagtaggaagaggaagccatgggcaacacatcctccatgctcacccaatacgacatcgaagaggttcagcaacattgcaaaaacgcttttacgcaacaggagatagtttctctgtaccaacgcttctgtcagctggatcgcaacaactgcggtttcatcccttccgatgaattcctctccattcccgaattcgccgtcaatcctctctctcagagtttgttgaggatgctggatgggttgaacttcaaggaatttgtggccttcttgtccgccttcagtccccgtgccactctccaccacaaaattgaattcattttcaaggtctatgacaccgattgcaatggaaaagttaccttccatgacatgttgagggctttaaggaatttgagtggacccttcatgtctgagcaacagagagaggacgttctgacacaggtccttgaggaagctggctatgcaaaggattcttcattagtcttgtctgacttcatgaagattcttggcaattcgggtttgaagatggaagtagaggttccggtggattagagtgaggataatacaattccctttttgagttttcttttttcttttttttgaggataactttccctttcagtttgatgacggaggttcttggttctggtatttagttcttcctcttaatgggtaaaagattatttgttcagtgattaattactgcaaacaaagttatggattatataatgtttaacaaatgctttcaaaactg

SEQ ID NO: 60028 - protein, 175 aa, Glycine max
  peptide (1)..(175): Ceres Seq. ID no. 14316321
MGNTSSMLTQYDIEEVQQHCKNAFTQQEIVSLYQRFCQLDRNNCGFIPSDEFLSIPEFAVNPLSQSLLRMLDGLNFKEFVAFLSAFSPRATLHHKIEFIFKVYDTDCNGKVTFHDMLRALRNLSGPFMSEQQREDVLTQVLEEAGYAKDSSLVLSDFMKILGNSGLKMEVEVPVD

SEQ ID NO: 60029 - protein, 169 aa, Glycine max
  peptide (1)..(169): Ceres Seq. ID no. 14316322
MLTQYDIEEVQQHCKNAFTQQEIVSLYQRFCQLDRNNCGFIPSDEFLSIPEFAVNPLSQSLLRMLDGLNFKEFVAFLSAFSPRATLHHKIEFIFKVYDTDCNGKVTFHDMLRALRNLSGPFMSEQQREDVLTQVLEEAGYAKDSSLVLSDFMKILGNSGLKMEVEVPVD

SEQ ID NO: 60030 - protein, 106 aa, Glycine max
  peptide (1)..(106): Ceres Seq. ID no. 14316323
MLDGLNFKEFVAFLSAFSPRATLHHKIEFIFKVYDTDCNGKVTFHDMLRALRNLSGPFMSEQQREDVLTQVLEEAGYAKDSSLVLSDFMKILGNSGLKMEVEVPVD

SEQ ID NO: 60031 - DNA, 1109 bp, Glycine max
  misc_feature (1)..(1109): Ceres Seq. ID no. 15173557
agtttagataaacctccgactctgttctcaaggcgtcgtaacatcctcgtcactctcacacatcacacaacaatggcttctcttcattcttctttcctccttacatcaaattttctttccctcacaaccccatcaagttcttccactcacgttctctttcccatgagactctccacgacccacttgcgaccccttcttctcaccacacgacacggtttcgggagaccaccctttgccgcggtggcggaacaggcggccaccgcgaccgaggcgtccgcgaggaggctctacgttggcaacattccccgcaccgtcaccaacgaagagcttgccaagattgttcaagaacatggtgctgttgagaaagctgaggttatgtatgataaatactctggaaggagccgccgctttgcatttgttacgatgaaaactgttgaggatgcaactgctgtgattgagaaacttaacggcactgaaattggaggacgtgaggtcaaagtaaacgtaacggaaaaacctttatcaacaccagatttgcctttactccaagctgaggaatctgaatttattgacagtccccacaaggtgtatgtgggaaatctggccaaaacagtaacaactgatactcttaaaaactttttttctgagaagggaaaagttcttagtgccaaggtttcacgggtccctggtacctcaaaatccagtggatatgggtttgttactttttcgtcagaagaggatgtagaagctgcaatctcatctttcaacaattctttgttagaaggccaaacaatccgtgtaaacaaggcatagagaattagcaatgttggagagcatgtttgaccacgtgtcatctagccggaacaatgtatactttgtgtgaggctgaaaccactagcaaatttccttgtctcttgtatagcataaacctaatcattttcagttgataaggttctacgaaaaaatagtgcttcatgcttctgttgcaggcattgctcctttagtccaggatattgagacctcactttttcttcatgatcatgttgttgcacctttctactctgcttcagtgttgcaactcttgttgatatatgcatgtattcaattcc

SEQ ID NO: 60032 - protein, 270 aa, Glycine max
  peptide (1)..(270): Ceres Seq. ID no. 15173558
SLDKPPTLFSRRRNILVTLTHHTTMASLHSSFLLTSNFLSLTTPSSSSTHVLFPMRLSTTHLRPLLLTTRHGFGRPPFAAVAEQAATATEASARRLYVGNIPRTVTNEELAKIVQEHGAVEKAEVMYDKYSGRSRRFAFVTMKTVEDATAVIEKLNGTEIGGREVKVNVTEKPLSTPDLPLLQAEESEFIDSPHKVYVGNLAKTVTTDTLKNFFSEKGKVLSAKVSRVPGTSKSSGYGFVTFSSEEDVEAAISSFNNSLLEGQTIRVNKA

SEQ ID NO: 60033 - protein, 246 aa, Glycine max
  peptide (1)..(246): Ceres Seq. ID no. 15173559
MASLHSSFLLTSNFLSLTTPSSSSTHVLFPMRLSTTHLRPLLLTTRHGFGRPPFAAVAEQAATATEASARRLYVGNIPRTVTNEELAKIVQEHGAVEKAEVMYDKYSGRSRRFAFVTMKTVEDATAVIEKLNGTEIGGREVKVNVTEKPLSTPDLPLLQAEESEFIDSPHKVYVGNLAKTVTTDTLKNFFSEKGKVLSAKVSRVPGTSKSSGYGFVTFSSEEDVEAAISSFNNSLLEGQTIRVNKA

SEQ ID NO: 60034 - protein, 216 aa, Glycine max
  peptide (1)..(216): Ceres Seq. ID no. 15173560
MRLSTTHLRPLLLTTRHGFGRPPFAAVAEQAATATEASARRLYVGNIPRTVTNEELAKIVQEHGAVEKAEVMYDKYSGRSRRFAFVTMKTVEDATAVIEKLNGTEIGGREVKVNVTEKPLSTPDLPLLQAEESEFIDSPHKVYVGNLAKTVTTDTLKNFFSEKGKVLSAKVSRVPGTSKSSGYGFVTFSSEEDVEAAISSFNNSLLEGQTIRVNKA

SEQ ID NO: 60035 - DNA, 1775 bp, Glycine max
  misc_feature (1)..(1775): Ceres Seq. ID no. 14306857
aatcctcataactgcactatcacacacatagttctcttatctggtgcaagtgcaacaatcaagtactcatcagcatgggaatgttgttgttgttgttgtcttattctctccttttcctggttctattccttacactgaaatcccttttccaaagcagaaaattgagaaacctaccaccaggtcctcctcctcttcccataataggtaaccttaacctcctcgaacaacctattcaccgtttcttccaacgcatgtccaaagaatatggaaacatcgtttccctttggttcggttcacgtctcgccgttgtcatttcctcaccaactgcataccaagaatgcttcaccaaacacgacgttgccttggccaaccggctaccttctctctcgggaaaatacatattctacaacaacaccaccgtagggtcctgctcccacggccagcactggcggaacctccgccgaatcaccgccctggacgtcctctccacgcagcgagtccactctttctccggaatccgaagcgacgagacgaaaaggttggtacagaggttgctggccaagaactccaaggagggttttgctcgcgtggagataagctccatgttcaatgacttgacctacaacaacatcatgaggatgatatcagggaagaggttttacggagaggagagtgagttgaagaacgttgagaaagcgagggagttcagagagacagtgacagagatgctagaactcatgggggtggctaataagggagatcacttacctttcctaagatggttcgattttcagaatgtggagaagcgtttgaagagtattagtaaaaggtatgataccatcttgaatgagatcattgatgagaaccgtagcaagaaggaccgcgagaattccatgattgatcatcttctcaaactgcaagagactcagcctgagtactacactgaccaaatcatcaaaggccttgctttggccatgctttttggcggaactgactcatcaacgggaaccttagagtggtcgctatctaatttattgaatcacccagaggtgttgaagaaagcaaaagaagaattggacactcaagtaggacaagaccgcttgttaaatgagtcagaccttccaaaacttccttatcttagaaagatcattcttgagacacttaggttgtatcctccagctccaattctaatacctcatgtgtcttcagaagatatcactattgaaggattcaatgtcccacgagacacaattgtgatcattaatggttggggcatgcagagagatcctcatttgtggaatgatgccacatgctttaaacctgagaggtttgatgtggaaggagaggagaaaaagttggtagcatttggaatgggaagaagggcttgcccaggagaacccatggctatgcaaagtgtcagctttactttgggattattgattcaatgttttgactggaaacgagtaagtgaggaaaagcttgatatgacagagaataattggattaccttgtcaaggttaattccattggaagccatgtgcaaggctcgtccactcgccactaaaattggagtttaattattaatagtttttttatttggtaaagttgggtcaacatctaatacttataatttcagtgtgcatgtggtggttatacatgttaaacataatagtatttgtttgtatgtttacaaggccagttgtagaattggtgtgcattaggatatattaatattgtatgcatccccaacttctcaaataaattttttacttttt

SEQ ID NO: 60036 - protein, 500 aa, Glycine max
  peptide (1)..(500): Ceres Seq. ID no. 14306858
MGMLLLLLSYSLLFLVLFLTLKSLFQSRKLRNLPPGPPPLPIIGNLNLLEQPIHRFFQRMSKEYGNIVSLWFGSRLAVVISSPTAYQECFTKHDVALANRLPSLSGKYIFYNNTTVGSCSHGQHWRNLRRITALDVLSTQRVHSFSGIRSDETKRLVQRLLAKNSKEGFARVEISSMFNDLTYNNIMRMISGKRFYGEESELKNVEKAREFRETVTEMLELMGVANKGDHLPFLRWFDFQNVEKRLKSISKRYDTILNEIIDENRSKKDRENSMIDHLLKLQETQPEYYTDQIIKGLALAMLFGGTDSSTGTLEWSLSNLLNHPEVLKKAKEELDTQVGQDRLLNESDLPKLPYLRKIILETLRLYPPAPILIPHVSSEDITIEGFNVPRDTIVIINGWGMQRDPHLWNDATCFKPERFDVEGEEKKLVAFGMGRRACPGEPMAMQSVSFTLGLLIQCFDWKRVSEEKLDMTENNWITLSRLIPLEAMCKARPLATKIGV

SEQ ID NO: 60037 - protein, 498 aa, Glycine max
  peptide (1)..(498): Ceres Seq. ID no. 14306859
MLLLLLSYSLLFLVLFLTLKSLFQSRKLRNLPPGPPPLPIIGNLNLLEQPIHRFFQRMSKEYGNIVSLWFGSRLAVVISSPTAYQECFTKHDVALANRLPSLSGKYIFYNNTTVGSCSHGQHWRNLRRITALDVLSTQRVHSFSGIRSDETKRLVQRLLAKNSKEGFARVEISSMFNDLTYNNIMRMISGKRFYGEESELKNVEKAREFRETVTEMLELMGVANKGDHLPFLRWFDFQNVEKRLKSISKRYDTILNEIIDENRSKKDRENSMIDHLLKLQETQPEYYTDQIIKGLALAMLFGGTDSSTGTLEWSLSNLLNHPEVLKKAKEELDTQVGQDRLLNESDLPKLPYLRKIILETLRLYPPAPILIPHVSSEDITIEGFNVPRDTIVIINGWGMQRDPHLWNDATCFKPERFDVEGEEKKLVAFGMGRRACPGEPMAMQSVSFTLGLLIQCFDWKRVSEEKLDMTENNWITLSRLIPLEAMCKARPLATKIGV

SEQ ID NO: 60038 - protein, 441 aa, Glycine max
  peptide (1)..(441): Ceres Seq. ID no. 14306860
MSKEYGNIVSLWFGSRLAVVISSPTAYQECFTKHDVALANRLPSLSGKYIFYNNTTVGSCSHGQHWRNLRRITALDVLSTQRVHSFSGIRSDETKRLVQRLLAKNSKEGFARVEISSMFNDLTYNNIMRMISGKRFYGEESELKNVEKAREFRETVTEMLELMGVANKGDHLPFLRWFDFQNVEKRLKSISKRYDTILNEIIDENRSKKDRENSMIDHLLKLQETQPEYYTDQIIKGLALAMLFGGTDSSTGTLEWSLSNLLNHPEVLKKAKEELDTQVGQDRLLNESDLPKLPYLRKIILETLRLYPPAPILIPHVSSEDITIEGFNVPRDTIVIINGWGMQRDPHLWNDATCFKPERFDVEGEEKKLVAFGMGRRACPGEPMAMQSVSFTLGLLIQCFDWKRVSEEKLDMTENNWITLSRLIPLEAMCKARPLATKIGV

SEQ ID NO: 60039 - DNA, 1024 bp, Glycine max
  misc_feature (1)..(1024): Ceres Seq. ID no. 14315060
ttttctgccattcattataccaacgtataagcatctctctctctctctctgtgttgtgccttttcactactactttgttcggtagctacttcgcttctaccctccattccattctctggaacaatgtctgagaaaatcacagctgaaaaccttttaaacacccttgtggaaacacttactgagaagcaaaaatctggatcattttttgaagaagacaagtcaagctcagtgagctaccaattcaacagactgtttggacgccagaaacctgtgcaccatattttagggggtggaaaatctgctgatgtcttgttatggaggaacaagaagatctctgctagcgttttatcggcagcaacagctatatgggtgctttttgaatggcttaattataatttcataactattttattctttgttgtggctcttggtatgcttggacagtttctttggacaaatgtttctggcttgtttagcaggaagccatctaaagttccccgttttgtcctcccagatgatatcttcgtgaatattgcaactgtagttggtgctgaggttaaccgtggtttgaggtttctccaagatgtttcttgtggaggaagcctaaaacaatttcttattgttgtagtaagcttatgggctggtgctgtgattgggagctggtgcaattttttgactgtcatgtatattggttttgttgctgcacatacactcccagttctctatgaaaggtatgaggatcaagttgacaactttgtgtacaaggtctttgatcagatgcaaaatcactatcagaagctggatactggtttgctcagcaaaatccccaagggaaagctcaaaggaaagaagtatgaatagactcttccttttgtaaatggtttgattttcaatatctctttctctcacttgtgatggaattgggaaaggctgaaggatgtgatgtaactagggaacaaatctatgttggggtctttaaaatttgttgtatctcttctgtcaaaaaaaaaaaaagttttatcac

SEQ ID NO: 60040 - protein, 245 aa, Glycine max
  peptide (1)..(245): Ceres Seq. ID no. 14315061
MSEKITAENLLNTLVETLTEKQKSGSFFEEDKSSSVSYQFNRLFGRQKPVHHILGGGKSADVLLWRNKKISASVLSAATAIWVLFEWLNYNFITILFFVVALGMLGQFLWTNVSGLFSRKPSKVPRFVLPDDIFVNIATVVGAEVNRGLRFLQDVSCGGSLKQFLIVVVSLWAGAVIGSWCNFLTVMYIGFVAAHTLPVLYERYEDQVDNFVYKVFDQMQNHYQKLDTGLLSKIPKGKLKGKKYE

SEQ ID NO: 60041 - protein, 142 aa, Glycine max
  peptide (1)..(142): Ceres Seq. ID no. 14315062
MLGQFLWTNVSGLFSRKPSKVPRFVLPDDIFVNIATVVGAEVNRGLRFLQDVSCGGSLKQFLIVVVSLWAGAVIGSWCNFLTVMYIGFVAAHTLPVLYERYEDQVDNFVYKVFDQMQNHYQKLDTGLLSKIPKGKLKGKKYE

SEQ ID NO: 60042 - DNA, 1251 bp, Glycine max
  misc_feature (1)..(1251): Ceres Seq. ID no. 14316312
aacgtatggatcgaaggactatgtctatgatgtctagcaaagttgatcccttccagcatctcaaactcgtccccaattccgacggcacgatcactcgccagcgtgatgacccacccatctcaccctcactcaatcccacccttcccgtcctcacccaagacgcaaccatcaaccgatcaaacaacaccttcgcccgcatattcctaccccgcgaagcactcgattcctccccctccaacaacctccctctcgtcgtttacttccacggcggcggcttcgtcctcttcagcgccgcctctgacttcttccacgacgcatgcgtaaacctcgcagacgacaccaactccatcgtcgtttccgtggagtaccgcctcgcaccggaacacagactccccgcggcgtacgaagatgccgtcgaagcgctgcactggatcaaagcacagtcaaacgattggttgcgcaaccacgcggatttttccaactgttaccttatgggaagtagcgccggagcaaacatcgcgtaccacgtgggtctacgtgtagctgcggagcttaacgtttatggagacaattatctggcgccacttaagatcagagggctgatattgagtcagccgttcttcggaggaacgaagagggtgccttctgaggtgaggcttgtggacgatccggttttgccgccgcacgtgtgtgacttactgtgggagttgtcgctgcccctgggggttgaccgtgatcacgagtattgcaatccgacggctggcgatgggcctgtgattctggatcgggtgaggcagcttgcgtggcgggtgctggtgagtgggtgccatggggacccacttctggatcatcagatggctctggcaagactgatagaggagaagggtgtggctgtggtcacccgttttgaccaagggggatgtcatgggattgaggttcgtgctcgtaagcaccaaaaccaactctataacctagtcaaagattttattgcataatttctgacatggaactaccatttctttttaagctctatactgtataattacattttcaaaatattgctacaaataaatgttattttctctcttttgatactctcctccacccctcacttagagactgtttggtattacgaaaatagagagggagattaaggaagaaagtgaaaatgagttgtttaataatgtaacggaattgaaggtgtgtataatggcacacatagtatttcagtagcctacatttttaaatttg

SEQ ID NO: 60043 - protein, 330 aa, Glycine max
  peptide (1)..(330): Ceres Seq. ID no. 14316313
RMDRRTMSMMSSKVDPFQHLKLVPNSDGTITRQRDDPPISPSLNPTLPVLTQDATINRSNNTFARIFLPREALDSSPSNNLPLVVYFHGGGFVLFSAASDFFHDACVNLADDTNSIVVSVEYRLAPEHRLPAAYEDAVEALHWIKAQSNDWLRNHADFSNCYLMGSSAGANIAYHVGLRVAAELNVYGDNYLAPLKIRGLILSQPFFGGTKRVPSEVRLVDDPVLPPHVCDLLWELSLPLGVDRDHEYCNPTAGDGPVILDRVRQLAWRVLVSGCHGDPLLDHQMALARLIEEKGVAVVTRFDQGGCHGIEVRARKHQNQLYNLVKDFIA

SEQ ID NO: 60044 - protein, 329 aa, Glycine max
  peptide (1)..(329): Ceres Seq. ID no. 14316314
MDRRTMSMMSSKVDPFQHLKLVPNSDGTITRQRDDPPISPSLNPTLPVLTQDATINRSNNTFARIFLPREALDSSPSNNLPLVVYFHGGGFVLFSAASDFFHDACVNLADDTNSIVVSVEYRLAPEHRLPAAYEDAVEALHWIKAQSNDWLRNHADFSNCYLMGSSAGANIAYHVGLRVAAELNVYGDNYLAPLKIRGLILSQPFFGGTKRVPSEVRLVDDPVLPPHVCDLLWELSLPLGVDRDHEYCNPTAGDGPVILDRVRQLAWRVLVSGCHGDPLLDHQMALARLIEEKGVAVVTRFDQGGCHGIEVRARKHQNQLYNLVKDFIA

SEQ ID NO: 60045 - protein, 324 aa, Glycine max
  peptide (1)..(324): Ceres Seq. ID no. 14316315
MSMMSSKVDPFQHLKLVPNSDGTITRQRDDPPISPSLNPTLPVLTQDATINRSNNTFARIFLPREALDSSPSNNLPLVVYFHGGGFVLFSAASDFFHDACVNLADDTNSIVVSVEYRLAPEHRLPAAYEDAVEALHWIKAQSNDWLRNHADFSNCYLMGSSAGANIAYHVGLRVAAELNVYGDNYLAPLKIRGLILSQPFFGGTKRVPSEVRLVDDPVLPPHVCDLLWELSLPLGVDRDHEYCNPTAGDGPVILDRVRQLAWRVLVSGCHGDPLLDHQMALARLIEEKGVAVVTRFDQGGCHGIEVRARKHQNQLYNLVKDFIA

SEQ ID NO: 60046 - DNA, 1054 bp, Glycine max
  misc_feature (1)..(1054): Ceres Seq. ID no. 14305357
aaaaaaagcttctttgtctctcgtgccgattctccaccacaattcccttcaccccaatcacactttccggtagttgttgctattagtgtagaagatgagtacgctggatgcaacaagggctgaacttggtcttcttgttttatatttgggcaaggctgaagcaagggacaaaatatgcagggcaatacaatatggttccaaatttttgagtaatggggaacctggtactgctcagaatgtagacaaaacaaccagcttggcacgaaaagtcttccgtctctttaagtttgtcaatgacctacatgctttgataagtccaacaccacaggggacacccctccccctagctctgttggacttatcaaagcatgtagtcactgagcaaaccaaggaggaaagtactgaggccccacgacctgcagcttcagaagacaagccctcggttgaagttcagactaaagaggtggcagaggaagttgtgtctgagaccgtcacacaagagccaacagttgagaaacaagaagctgctgagggaacaaaagaaaatgccgatcctgctgagattaagacaccagaagctgcagaagatgttaatgttaaggaagagaaagaagctgaggctgaagctaggagggaagaggccccggcagagaaaagtgaggagaaggttgagacagaagggtcagctgaaaagaaagaggaggaagtgattgcagaagctgaagctgagaagaaggaggaggtcacagtcacagacacagaggctccaacagagtaaaagaatgtgaagaggggaaatgtgcagtttaagtgagtgtttgagagggtatttttttcttagttgcatcgtgtcttgttgctccatgcatgtcttttctttgtttagtggtctaataaaaagtctagctagggaagggatgagtgatgcgaatgccaaccactcagtacaagaaccacatggcatgtagtctttcaatctgatctatggggtgtgcatggctagctctccatccaatgaattatgttatggtcctttgtgtgattcaaaaaaaat

SEQ ID NO: 60047 - protein, 227 aa, Glycine max
  peptide (1)..(227): Ceres Seq. ID no. 14305358
MSTLDATRAELGLLVLYLGKAEARDKICRAIQYGSKFLSNGEPGTAQNVDKTTSLARKVFRLFKFVNDLHALISPTPQGTPLPLALLDLSKHVVTEQTKEESTEAPRPAASEDKPSVEVQTKEVAEEVVSETVTQEPTVEKQEAAEGTKENADPAEIKTPEAAEDVNVKEEKEAEAEARREEAPAEKSEEKVETEGSAEKKEEEVIAEAEAEKKEEVTVTDTEAPTE

SEQ ID NO: 60048 - DNA, 1182 bp, Glycine max
  misc_feature (1)..(1182): Ceres Seq. ID no. 14314396
atatacaccccattgctacgaagggctatatagcataaacattttagtcttcattgcacaatgtcgacctcttccattaacgggtggtgcctctcttccatctccccagccaaaacctctctcaagaaggccacattaggcccttctgtcttcgcaaccagagaggatatggcaaaggaatacgagcaagctattgaagaactccagaaattgttgagggagaagagtgaactcaaagccacagctgctgagaaagtggagcagataacagcttctctgggaacatcatcatctgatggcatcccatcatcagaagcctcagacaggatcaaagctggtttcattcacttcaagaaggagaaatatgacaagaatccagctttgtatggtgaacttgccaaaggccagagccccaagtttatggtgtttgcttgctcagactcaagggtgtgcccatctcatgtgctagatttccaaccaggagaggcctttgtggtcagaaatgttgctaacattgtcccaccatatgaccagtcaaaatacgctggaactggggcagcagttgagtatgctgttttgcatcttaaggtgtctgagattgtggtcattggacacagtgcttgtggtggtattaaggggcttctgtctttcccatatgatggaacctactctactgattttattgaggagtgggtcaaaattggcttgcctgcaaaggcaaaggtgaagacacaacatggggatgcaccttttgctgagttgtgctcacactgtgagaaggaagctgtgaatgtttcccttggaaaccttctaacatacccatttgttagagatggcttggtgaacaagacattgtcactaaaaggaggatactatgactttgttaagggatcttttgagctctggggccttcagtttggccttgcatcctctttctccgtatgaacatcaaccattatcaatgacctcatcttggttccctaagttaaagatgtggccaccattctgcattggaagctataggggccatgcttagaggtcgtgtgtatctgcaatgaagaggcctagccaccttcatcaccatatgatatttataaaaatatatatatatgaaactatgaactgcgtttatgcatgtcggaaaatcttcttttgataagagtttggaaatcctcttgtaac

SEQ ID NO: 60049 - protein, 294 aa, Glycine max
  peptide (1)..(294): Ceres Seq. ID no. 14314397
MSTSSINGWCLSSISPAKTSLKKATLGPSVFATREDMAKEYEQAIEELQKLLREKSELKATAAEKVEQITASLGTSSSDGIPSSEASDRIKAGFIHFKKEKYDKNPALYGELAKGQSPKFMVFACSDSRVCPSHVLDFQPGEAFVVRNVANIVPPYDQSKYAGTGAAVEYAVLHLKVSEIVVIGHSACGGIKGLLSFPYDGTYSTDFIEEWVKIGLPAKAKVKTQHGDAPFAELCSHCEKEAVNVSLGNLLTYPFVRDGLVNKTLSLKGGYYDFVKGSFELWGLQFGLASSFSV

SEQ ID NO: 60050 - protein, 258 aa, Glycine max
  peptide (1)..(258): Ceres Seq. ID no. 14314398
MAKEYEQAIEELQKLLREKSELKATAAEKVEQITASLGTSSSDGIPSSEASDRIKAGFIHFKKEKYDKNPALYGELAKGQSPKFMVFACSDSRVCPSHVLDFQPGEAFVVRNVANIVPPYDQSKYAGTGAAVEYAVLHLKVSEIVVIGHSACGGIKGLLSFPYDGTYSTDFIEEWVKIGLPAKAKVKTQHGDAPFAELCSHCEKEAVNVSLGNLLTYPFVRDGLVNKTLSLKGGYYDFVKGSFELWGLQFGLASSFSV

SEQ ID NO: 60051 - protein, 174 aa, Glycine max
  peptide (1)..(174): Ceres Seq. ID no. 14314399
MVFACSDSRVCPSHVLDFQPGEAFVVRNVANIVPPYDQSKYAGTGAAVEYAVLHLKVSEIVVIGHSACGGIKGLLSFPYDGTYSTDFIEEWVKIGLPAKAKVKTQHGDAPFAELCSHCEKEAVNVSLGNLLTYPFVRDGLVNKTLSLKGGYYDFVKGSFELWGLQFGLASSFSV

SEQ ID NO: 60052 - DNA, 1785 bp, Glycine max
  misc_feature (1)..(1785): Ceres Seq. ID no. 15226659
gttacaacagactctgactctctctctcaagattcctctccgcgcaaagaatcttcatttctgtttcgcttccaacactccaaattccatttcattttcatctctctctgtatctgatgctcagaacaaatttcgattccgaaaatggcactagcaagtaccaacactgatcaatccacaatcaccactccttcaaagaaaccctcaaaaaactccgagaatctgaaccctaacgtgcctcatcatcgaagcccttcttcaaagtcccctgctttgcgatcctccaagccaaacaacagcaacccaattgcgcaatcgccgcagaacaggatccggcagaggaagttcgtggtggcaaagaagaaaaatcagaagggtacccaaaacgacgccgtttcgtgcaagtgcaaacacaatggtggcgccaagtgtgtttgtgtagctttccagactctgagggcttctcaggaagagtttttcctcaaagaaaagaaggattgtgattatgattttgaagaagaaagagaagaagaagcaaaagctgtgaatgctattgaaatctatggaacaaaaagtgaaacagtgcaaggagaagaagaaaaagaagaaggaggttccacagtgaaacgaaggagggagagagataggttgttggaagaggcaaggaatagtgttcctgaaaatgggtttgggagggttatgcatttggtgaaagcctttgagaagcttctcactatacctaagagttcaaaggagaaagatcacaaggaggagcatgatcatgagcatgaagagcaaaagaataagagccaggtgatgaaatgggcattgccagggttgcaatttcaacaacatcctaagcctaagacacttgaagctactactgatgatgcttctgtttcgggttcttcttcattttgttgtacttctgatttggttttgacatccaagaaccttggtattggtcaagggatttcagtttcttcatcttgggattgtaaccgtgcaagtgtatctagtaggacttctgggggtagaaggagcaggagaaatagctcggagtcatctgggacttttggagggaggaggtggaagcagaaggagaagctaaaagtcactaggcaaaaaccatttaagttaagaacagagcaaaggggaaagttgaaagaggaagaatttgtgaagaaagtacaagagatgatgactgaagaagagaagatgaggataccaattgctcaggggcttccatggacaacagatgaacctgagtgcttgttaaaacctacagttaaagaaagcacaaggcctattgacctaaagcttcatagtgatattcgggcaattgatcgtgctgaatttgaccaacaggtggcagaaaaaatgaacttcatagaacaactcaagttggaaaaggaaagacaacaaaagttagaagaagaagaagaaatcaggaggttgaggaaggaactcattccaaaagctcaaccaatgccttattttgacagaccatttgtcccaaggaggtcaatgaagcatcccactatacctagagaacccaagttccacatgccccaacataagaagatcaagtgtttggtcatggaatgacatgtcctatctcaacataagaaatcaatgaatgcttcatttctccatcattctctccacaatataattataaaaatgcaaattaatggtagtgtattgagatattataaaaaaatacaaactaatgtgttccaaacaagttcaaattaatgatgactaattatgtttttagttctc

SEQ ID NO: 60053 - protein, 487 aa, Glycine max
  peptide (1)..(487): Ceres Seq. ID no. 15226660
MALASTNTDQSTITTPSKKPSKNSENLNPNVPHHRSPSSKSPALRSSKPNNSNPIAQSPQNRIRQRKFVVAKKKNQKGTQNDAVSCKCKHNGGAKCVCVAFQTLRASQEEFFLKEKKDCDYDFEEEREEEAKAVNAIEIYGTKSETVQGEEEKEEGGSTVKRRRERDRLLEEARNSVPENGFGRVMHLVKAFEKLLTIPKSSKEKDHKEEHDHEHEEQKNKSQVMKWALPGLQFQQHPKPKTLEATTDDASVSGSSSFCCTSDLVLTSKNLGIGQGISVSSSWDCNRASVSSRTSGGRRSRRNSSESSGTFGGRRWKQKEKLKVTRQKPFKLRTEQRGKLKEEEFVKKVQEMMTEEEKMRIPIAQGLPWTTDEPECLLKPTVKESTRPIDLKLHSDIRAIDRAEFDQQVAEKMNFIEQLKLEKERQQKLEEEEEIRRLRKELIPKAQPMPYFDRPFVPRRSMKHPTIPREPKFHMPQHKKIKCLVME

SEQ ID NO: 60054 - protein, 302 aa, Glycine max
  peptide (1)..(302): Ceres Seq. ID no. 15226661
MHLVKAFEKLLTIPKSSKEKDHKEEHDHEHEEQKNKSQVMKWALPGLQFQQHPKPKTLEATTDDASVSGSSSFCCTSDLVLTSKNLGIGQGISVSSSWDCNRASVSSRTSGGRRSRRNSSESSGTFGGRRWKQKEKLKVTRQKPFKLRTEQRGKLKEEEFVKKVQEMMTEEEKMRIPIAQGLPWTTDEPECLLKPTVKESTRPIDLKLHSDIRAIDRAEFDQQVAEKMNFIEQLKLEKERQQKLEEEEEIRRLRKELIPKAQPMPYFDRPFVPRRSMKHPTIPREPKFHMPQHKKIKCLVME

SEQ ID NO: 60055 - protein, 263 aa, Glycine max
  peptide (1)..(263): Ceres Seq. ID no. 15226662
MKWALPGLQFQQHPKPKTLEATTDDASVSGSSSFCCTSDLVLTSKNLGIGQGISVSSSWDCNRASVSSRTSGGRRSRRNSSESSGTFGGRRWKQKEKLKVTRQKPFKLRTEQRGKLKEEEFVKKVQEMMTEEEKMRIPIAQGLPWTTDEPECLLKPTVKESTRPIDLKLHSDIRAIDRAEFDQQVAEKMNFIEQLKLEKERQQKLEEEEEIRRLRKELIPKAQPMPYFDRPFVPRRSMKHPTIPREPKFHMPQHKKIKCLVME

SEQ ID NO: 60056 - DNA, 1214 bp, Glycine max
  misc_feature (1)..(1214): Ceres Seq. ID no. 14305398
aaaaaaaggtttgttcttagcaattcctctgtgttctcaaaggccgttttttttagtgtgtgtgtttcacttttatttccttttcggttccaatctatgtttgagtcgtattgtaatcatgttgagtcttggtcgatgccttgtataatgtgtatggtgggttgtatcttccttggattttattgaacatgcctgcctgcccgccacctgtttgatgaaatgcttgaacttttcagaaatgaactagtgtgtgatatattggcgcttgaatttgtgatgctacacctgttggctttcttgtttgcatctgaattacaaaagaagtgactgtgaatccgaatccaaatctgaatgggttatcttcaatttggcagacatggtgttaggcaggtccttagatttagagatgctagttgtgataatgttgtggtaaacccactcttatatgcttcccaaggacttcgttacaagaggaagctccaagtcatccttacaactgacatagataagctgggaaaggcaggtgacactgtcaaagttgcccctggatattttcgcaaccacctaatgcccaagctccttgctttccctaacattgataagtttgcttatctcctcaatgagcagcgcaagatctatcaaccaactgaagaagaaaaacaagaagatgtcactctagttaaagagtccaaggaagatatgatgaaagagtatgaaaaggcagcattacgtcttgataaagctcagctggttttgcggaggttaattaatgttcaaaaagccaagtcacgtgaatcaaaagaagaccccttggagttacgttatcctgtgacaaaagatactcttgtggctgaggtggcaagacaactttgtgtgaacgttgcacctgataacctgcatcttccatcacctctatccacattaggagaatatgaggtgccactgcgtataccaaggtccatcccgttgccagagggcaaggttaactggagtttgaaagttaaagtcaggagtaaataaatcactcatcttgttgaattcaagttcacaagggatggaatagtggttttatgctaataaatcattaaattgaatccgaggattataagattttgacattgcttttatttatagaaacagaaacgccactcatttaacaatgtctcttgaatagtctgtttttattgagtggagtctcatgtgttattgacaag

SEQ ID NO: 60057 - protein, 222 aa, Glycine max
  peptide (1)..(222): Ceres Seq. ID no. 14305399
MGYLQFGRHGVRQVLRFRDASCDNVVVNPLLYASQGLRYKRKLQVILTTDIDKLGKAGDTVKVAPGYFRNHLMPKLLAFPNIDKFAYLLNEQRKIYQPTEEEKQEDVTLVKESKEDMMKEYEKAALRLDKAQLVLRRLINVQKAKSRESKEDPLELRYPVTKDTLVAEVARQLCVNVAPDNLHLPSPLSTLGEYEVPLRIPRSIPLPEGKVNWSLKVKVRSK

SEQ ID NO: 60058 - protein, 150 aa, Glycine max
  peptide (1)..(150): Ceres Seq. ID no. 14305400
MPKLLAFPNIDKFAYLLNEQRKIYQPTEEEKQEDVTLVKESKEDMMKEYEKAALRLDKAQLVLRRLINVQKAKSRESKEDPLELRYPVTKDTLVAEVARQLCVNVAPDNLHLPSPLSTLGEYEVPLRIPRSIPLPEGKVNWSLKVKVRSK

SEQ ID NO: 60059 - DNA, 1266 bp, Glycine max
  misc_feature (1)..(1266): Ceres Seq. ID no. 14316075
atccgttacccttcctttcacaagtcataaaactcccttcacttgctctgaaattttcatgtatcactttcccttcactggttctattatcgttcttcttcttcactaagaatccaaaaaaaaatgaacgatcttatgacgaaatccttcaccagctacgtggagctgaagaaggtcgcaatgaaagaagacgttgatttggaagccggtggtcctggtgatcgcaaggtggaactgagctcttccacgacccacttggacacagacatgggcctcttcctagaagaggccgagaaggtgaaggccgagatggggtccctccgagacatcctgggccggctccagcaggccaacgaggagagcaagtccctccacaagcctgaagcccacaaggccctcagaagccgaatcaacgctgaaatccttgccgtactcaagaaggcccgggccatccggacccagctggaggagatggaccgcgccaatgccgccaacaggcgcctctccgccctcaaggacgggacccccgccatctaccggacccggattgctgtcaccaatggcctcaggaagaagctgaaggagctcatgatggactttcaggatctgaggcagaggatgatgactgagtacaaggatactgtgtgtagaaggtacttcacagttactggggagcacccagatgaggatgtgattgagaagatcatcgccaacgggaacgaggaagaggttcttgctaaggccatagaggaacacgggagagggaaggttctggataccgtgctggaaattcaggacaggcatgatgctgccaaggaggttgagaagagtctgcttgagctgcaccaggtgtttcttgacatggctgtcatggtggaggcacagggtgagaagatggacgacatcgagcatcacgtcttccacgcttcccactatgtcaaggatggaaccaagagtctccagagtgcaaaggagtaccagaagaggagcaggaagtggatgtgcattgggatcattcttctgctcattcttattctggttattgttattcctattgtcaccagtttaagcagttcttgagcttagtaaggaggagactttggatgatgatgatgatgattcttcttgactcatcgtgtttagagtgcttgatgggagataatgattcatctttttttcttttcctgcagatttgtttaattgttgttaaggtgttaccttaaccatgatttttctatctttgcgaaattgaaatataattcaatc

SEQ ID NO: 60060 - protein, 318 aa, Glycine max
  peptide (1)..(318): Ceres Seq. ID no. 14316076
MNDLMTKSFTSYVELKKVAMKEDVDLEAGGPGDRKVELSSSTTHLDTDMGLFLEEAEKVKAEMGSLRDILGRLQQANEESKSLHKPEAHKALRSRINAEILAVLKKARAIRTQLEEMDRANAANRRLSALKDGTPAIYRTRIAVTNGLRKKLKELMMDFQDLRQRMMTEYKDTVCRRYFTVTGEHPDEDVIEKIIANGNEEEVLAKAIEEHGRGKVLDTVLEIQDRHDAAKEVEKSLLELHQVFLDMAVMVEAQGEKMDDIEHHVFHASHYVKDGTKSLQSAKEYQKRSRKWMCIGIILLLILILVIVIPIVTSLSSS

SEQ ID NO: 60061 - protein, 314 aa, Glycine max
  peptide (1)..(314): Ceres Seq. ID no. 14316077
MTKSFTSYVELKKVAMKEDVDLEAGGPGDRKVELSSSTTHLDTDMGLFLEEAEKVKAEMGSLRDILGRLQQANEESKSLHKPEAHKALRSRINAEILAVLKKARAIRTQLEEMDRANAANRRLSALKDGTPAIYRTRIAVTNGLRKKLKELMMDFQDLRQRMMTEYKDTVCRRYFTVTGEHPDEDVIEKIIANGNEEEVLAKAIEEHGRGKVLDTVLEIQDRHDAAKEVEKSLLELHQVFLDMAVMVEAQGEKMDDIEHHVFHASHYVKDGTKSLQSAKEYQKRSRKWMCIGIILLLILILVIVIPIVTSLSSS

SEQ ID NO: 60062 - protein, 299 aa, Glycine max
  peptide (1)..(299): Ceres Seq. ID no. 14316078
MKEDVDLEAGGPGDRKVELSSSTTHLDTDMGLFLEEAEKVKAEMGSLRDILGRLQQANEESKSLHKPEAHKALRSRINAEILAVLKKARAIRTQLEEMDRANAANRRLSALKDGTPAIYRTRIAVTNGLRKKLKELMMDFQDLRQRMMTEYKDTVCRRYFTVTGEHPDEDVIEKIIANGNEEEVLAKAIEEHGRGKVLDTVLEIQDRHDAAKEVEKSLLELHQVFLDMAVMVEAQGEKMDDIEHHVFHASHYVKDGTKSLQSAKEYQKRSRKWMCIGIILLLILILVIVIPIVTSLSSS

SEQ ID NO: 60063 - DNA, 1341 bp, Glycine max
  misc_feature (1)..(1341): Ceres Seq. ID no. 15171708
aaagactaatattctcattctccccaaaacctctgctagtttttggttttgcttcaacaccctcgtcctccttcttcttcacactcccccagaaatcccaattttgcccctaccctcttccccaatttacctacgatgtacagcaacatgctggtcaactgctccaactgccgcacccctctgcagctgccacctggcgcgggatccatccgctgcgccctctgccgcgctgtcactctcatcggcgatccacgcgccctcccttcgcagccaccggcctccacccacgcgcctcctcctccgtcctctccctacagccacgcgccgcccccgcccaacccccacggccgcaagaaggccgtcatcgtcggcatctcctaccgcttctcgcgacacgagctcaagggatgcatcaacgacgccaagtgcatgaagtacctcctcatcaacaagttcagctttccagaatcttccatcatcatgctcaccgaagaagaagatccccatggccccaaatttccaacgaagcacaacatcaggatggcaatgtattggcttgcacaaggatgtcaacctggagactccctggtttttcattattctggtcatggatcacagcaaaggaactatagtggtgatgaagctgatggatatgatgaaactctatgtccccttgattttgaaacacagggtatgattgtagatgatgagatcaatgccgcacttgttagacctattcctcatggagctaagctacatgcactaattgatgcctgccatagtggcactgttctagatttgccatttctttgcagaatgaacaggagtgggcaatatgtatgggaggaccatcgccctagatccggtgtatggaagggatctagtggtggagaagttatctgcttcagtggatgcgacgatcatcaaacttcagctgatacatctgctctatcaaaaattacatcgactggggcaatgacattttgcttcatccaagccatagagcgtggccatggggctacctatggcagcattcttactgcaatgcgcacttccatcagaaatgttggcggcggcggcggcggtaccgggggtggtgatgtggtaacatcccttctctccatgcttttgactggagggagtctcagcggtgtcggtggactgggacaggaaccacagttaacagcttgcgaagcatttgatgtgcatagaaaacctttttcattatgatactcaatattctttattctgcaatttgttttcctaggctctgcccctgtatacgactacattgattacaatgattaatatattataaagtagagaggattcttttttcgc

SEQ ID NO: 60064 - protein, 364 aa, Glycine max
  peptide (1)..(364): Ceres Seq. ID no. 15171709
MYSNMLVNCSNCRTPLQLPPGAGSIRCALCRAVTLIGDPRALPSQPPASTHAPPPPSSPYSHAPPPPNPHGRKKAVIVGISYRFSRHELKGCINDAKCMKYLLINKFSFPESSIIMLTEEEDPHGPKFPTKHNIRMAMYWLAQGCQPGDSLVFHYSGHGSQQRNYSGDEADGYDETLCPLDFETQGMIVDDEINAALVRPIPHGAKLHALIDACHSGTVLDLPFLCRMNRSGQYVWEDHRPRSGVWKGSSGGEVICFSGCDDHQTSADTSALSKITSTGAMTFCFIQAIERGHGATYGSILTAMRTSIRNVGGGGGGTGGGDVVTSLLSMLLTGGSLSGVGGLGQEPQLTACEAFDVHRKPFSL

SEQ ID NO: 60065 - protein, 360 aa, Glycine max
  peptide (1)..(360): Ceres Seq. ID no. 15171710
MLVNCSNCRTPLQLPPGAGSIRCALCRAVTLIGDPRALPSQPPASTHAPPPPSSPYSHAPPPPNPHGRKKAVIVGISYRFSRHELKGCINDAKCMKYLLINKFSFPESSIIMLTEEEDPHGPKFPTKHNIRMAMYWLAQGCQPGDSLVFHYSGHGSQQRNYSGDEADGYDETLCPLDFETQGMIVDDEINAALVRPIPHGAKLHALIDACHSGTVLDLPFLCRMNRSGQYVWEDHRPRSGVWKGSSGGEVICFSGCDDHQTSADTSALSKITSTGAMTFCFIQAIERGHGATYGSILTAMRTSIRNVGGGGGGTGGGDVVTSLLSMLLTGGSLSGVGGLGQEPQLTACEAFDVHRKPFSL

SEQ ID NO: 60066 - protein, 266 aa, Glycine max
  peptide (1)..(266): Ceres Seq. ID no. 15171711
MKYLLINKFSFPESSIIMLTEEEDPHGPKFPTKHNIRMAMYWLAQGCQPGDSLVFHYSGHGSQQRNYSGDEADGYDETLCPLDFETQGMIVDDEINAALVRPIPHGAKLHALIDACHSGTVLDLPFLCRMNRSGQYVWEDHRPRSGVWKGSSGGEVICFSGCDDHQTSADTSALSKITSTGAMTFCFIQAIERGHGATYGSILTAMRTSIRNVGGGGGGTGGGDVVTSLLSMLLTGGSLSGVGGLGQEPQLTACEAFDVHRKPFSL

SEQ ID NO: 60067 - DNA, 1260 bp, Glycine max
  misc_feature (1)..(1260): Ceres Seq. ID no. 14316336
attttcactaaactaacttcctcaaatcaattacaatttttggacattttctctctcaaccctccaacaatattcccttctctctcatcattctcatgacataatcacatcacacaattgatttcctcaattacttctaatccacaatcaaatagcgcagcatggaagaatctgcgccccaacccaaaccaatcttacagaaaccccccggttaccgggaccccaactccaaaccgccaccacctcctcctcgaaagctcatgctgcccccccccttccagcccaaacggaagcgtcgcaacttctgccgcatatgctgctgtaccttctgcatcctcatcctcatcctcctccttgtgctcgttatcgccgccgctctcttctacctcatctacgacccctccctccctgagtttcacctcggctccttccgcgtccccaaacttaacgtcaccaatgccgccgacggggcctacctggctgccgacacggccgcacgtgtcgaggtcaagaaccgcagcggcaggatgtcgtggcatttctcccagagccgcttctcggtttcggcggagaacggggacctgaatctggggtccacgaaggtggccgggttcacggtgaaggagaagggcgtgaccgagctgaaggcggagacgagcgtaaaggagctggcattgaatgagaagcagaggagaaggcttaagagcgctgtggagagcaaagcgttggtccccaccgtggaggttcgaaccaaaaccggtgttggcttggagggttggaactcaccctccatctccgtcactgtcgtctgcggagatgccaccgtgagacaactcgataaaggagaccctcccctttgctccatcactctcctcaaatggatcaaaatacgatgagttggggatgtgttctgccagattgatgtccactgcgcgccatttagatcgaggtgaagattttgtgcgcttgtatctaaattatttttatattcttcttttttctctttacaaagtaaaggaagaatgaaaatgtaaattctttgcttagaaaaaagaaaagagtctcttctacagcagatcaacttgctgctggttctcccaaatgcgatgtgggatgcacataagaccaatacgtgaggttgtatttatcaaatatttattgttttttatgtggctggtgatcgtaggaatcgtaagtactcgagaaaatgttctctgtctttctctttttaataagaagaaaaccacaatgtgatgaggc

SEQ ID NO: 60068 - protein, 244 aa, Glycine max
  peptide (1)..(244): Ceres Seq. ID no. 14316337
MEESAPQPKPILQKPPGYRDPNSKPPPPPPRKLMLPPPFQPKRKRRNFCRICCCTFCILILILLLVLVIAAALFYLIYDPSLPEFHLGSFRVPKLNVTNAADGAYLAADTAARVEVKNRSGRMSWHFSQSRFSVSAENGDLNLGSTKVAGFTVKEKGVTELKAETSVKELALNEKQRRRLKSAVESKALVPTVEVRTKTGVGLEGWNSPSISVTVVCGDATVRQLDKGDPPLCSITLLKWIKIR

SEQ ID NO: 60069 - protein, 211 aa, Glycine max
  peptide (1)..(211): Ceres Seq. ID no. 14316338
MLPPPFQPKRKRRNFCRICCCTFCILILILLLVLVIAAALFYLIYDPSLPEFHLGSFRVPKLNVTNAADGAYLAADTAARVEVKNRSGRMSWHFSQSRFSVSAENGDLNLGSTKVAGFTVKEKGVTELKAETSVKELALNEKQRRRLKSAVESKALVPTVEVRTKTGVGLEGWNSPSISVTVVCGDATVRQLDKGDPPLCSITLLKWIKIR

SEQ ID NO: 60070 - protein, 122 aa, Glycine max
  peptide (1)..(122): Ceres Seq. ID no. 14316339
MSWHFSQSRFSVSAENGDLNLGSTKVAGFTVKEKGVTELKAETSVKELALNEKQRRRLKSAVESKALVPTVEVRTKTGVGLEGWNSPSISVTVVCGDATVRQLDKGDPPLCSITLLKWIKIR

SEQ ID NO: 60071 - DNA, 650 bp, Glycine max
  misc_feature (1)..(650): Ceres Seq. ID no. 15175368
atatttggagagagagagagagagagagaataaaaatggaaggaggatcaggtggcgagaggaacagtagtgtataccgagagtgcttgagaaatcatgcagccagcctaggaagctacgccacggacgggtgcgccgagtacacggtggacggcgcggggggactacaatgcgccgcgtgcgggtgccaccgcaacttccaccggaaagtgaagtacctggcggcggctgaaagccctcccacggagtatgggggcagcaacagcaagaagcggttcaggtctaagttcacggaagatcaaaaggagaagatgctagggtttgcggagaagcttggttggaagcttcagaggagggatcttgatgatgagatagagaggttttgccgaagcgttggggtgagtaggcaagtcttcaaagtttggatgcataaccataagaactcttcctcctcctcttctaccgccgccaatgtctcctccctcacccagtaattcactctctcctcttgtaattgtttctcattaattatcactttcatctttttagattgactagtttacttcaatattgtaagaagtcaatgaaatcacttaattgtcaggattatgtatgctatcactatctatttataacctataaagtttccg

SEQ ID NO: 60072 - protein, 163 aa, Glycine max
  peptide (1)..(163): Ceres Seq. ID no. 15175369
IWRERERERIKMEGGSGGERNSSVYRECLRNHAASLGSYATDGCAEYTVDGAGGLQCAACGCHRNFHRKVKYLAAAESPPTEYGGSNSKKRFRSKFTEDQKEKMLGFAEKLGWKLQRRDLDDEIERFCRSVGVSRQVFKVWMHNHKNSSSSSSTAANVSSLTQ

SEQ ID NO: 60073 - protein, 152 aa, Glycine max
  peptide (1)..(152): Ceres Seq. ID no. 15175370
MEGGSGGERNSSVYRECLRNHAASLGSYATDGCAEYTVDGAGGLQCAACGCHRNFHRKVKYLAAAESPPTEYGGSNSKKRFRSKFTEDQKEKMLGFAEKLGWKLQRRDLDDEIERFCRSVGVSRQVFKVWMHNHKNSSSSSSTAANVSSLTQ

SEQ ID NO: 60074 - DNA, 1717 bp, Glycine max
  misc_feature (1)..(1717): Ceres Seq. ID no. 14315919
agaaaaatcttttggattcccttctcattcactttcactttcactccttagcctggttataggagctagggtttatcgagggtttcgttccttcctctctgcaacaacaatggcgaaacctgggcgaggtcgtcgctctccctccggttccgtttccggctcctcctctcgctcctcttccccctccgactctcgttcctcctctcgctcgcgctccctttctcggtcccgttctccctcgcgctccagatcctcttccccctcctcctcctcttcctcccgaagctcccgcagccgcagccctcccccgcagaggcgccgaagtcctgctgacgcaactaggcgaggtcggtctcctccacctcagtctaagagagcttcacctcccccaaggaaaccttctcctgtacgcgagtcacttgttcttcatgtagaaaagctcagcagaaatgtcaatgaagggcacttgaaagaaattttcagtaactttggtgaggttataagtgtcgagttggcaatggatcgaactgtcaatcttccaaaagggtatggatatgtgcagttcaagacaagaggggatgctgaaaaggcattattgtacatggatggtgcccaaatagatggcaatgtcatcaaggcaagatttactctacctccaaggcagaaagtttcaccacccccaaaggcttctgctgttgctccaaagagagacacccccagggctgataatgctagtgcagatgttgacaaggatggaccaaagcggcaaagagaatcttctcctcgtagaaaacctcctccctcaccacggaggagatctcctgtacctagaagagctggatctccgagacgaccagattctccacgtcgccgtgcagattctcctgttcgtcgccgattagactctccttatcgtcgtggaggagacacacctcctaggaggcggcctgtgtctcctggaagaggtcgttctccatctccacctagacgccttagatcccctgcaaggctgtcacctagaaggatacgtggaagtccaggtcgaagacgttcacctccacctcctcccaggcgccgatcaccacctagacgaccacgtagtcctcctagaaggtctccaattggtcgtagacgtactcgctctccaatacgtaggtctgcacgctcacgctcaaggtcattctcacctcgcagaggtagaccaccagttagacgtggaaggtcatcatcctactctgattcacctagtccacgcaaggtatcccggagatcaaagagtcggagcccaagaaggcctttgagaggaagaggcagtagcaacagcagcagcagcagttcaccaccaccaccaccaccaccaccaactcgcaagccatagataattcttgtacatctactgtctatttctgttgatgtatttattgagattctgtaccggctgagttctagcttgatgtgcttggggatatatgttgcttttcattgtggtctattaacacattttttcttattagcacttaaaagttgtttggaaactaggcattccgtttttgtttggatcctactttagttgttactttgctcaaaaatgcaaaacatgaaagacgatagtgctctgctttattgtatttctagaaattcagtggaattccatgtaactggtagtttctttagaaatttgattatgcgaagaaagtagtagtaaatgttcaatgtg

SEQ ID NO: 60075 - protein, 458 aa, Glycine max
  peptide (1)..(458): Ceres Seq. ID no. 14315920
EKSFGFPSHSLSLSLLSLVIGARVYRGFRSFLSATTMAKPGRGRRSPSGSVSGSSSRSSSPSDSRSSSRSRSLSRSRSPSRSRSSSPSSSSSSRSSRSRSPPPQRRRSPADATRRGRSPPPQSKRASPPPRKPSPVRESLVLHVEKLSRNVNEGHLKEIFSNFGEVISVELAMDRTVNLPKGYGYVQFKTRGDAEKALLYMDGAQIDGNVIKARFTLPPRQKVSPPPKASAVAPKRDTPRADNASADVDKDGPKRQRESSPRRKPPPSPRRRSPVPRRAGSPRRPDSPRRRADSPVRRRLDSPYRRGGDTPPRRRPVSPGRGRSPSPPRRLRSPARLSPRRIRGSPGRRRSPPPPPRRRSPPRRPRSPPRRSPIGRRRTRSPIRRSARSRSRSFSPRRGRPPVRRGRSSSYSDSPSPRKVSRRSKSRSPRRPLRGRGSSNSSSSSSPPPPPPPPTRKP

SEQ ID NO: 60076 - protein, 422 aa, Glycine max
  peptide (1)..(422): Ceres Seq. ID no. 14315921
MAKPGRGRRSPSGSVSGSSSRSSSPSDSRSSSRSRSLSRSRSPSRSRSSSPSSSSSSRSSRSRSPPPQRRRSPADATRRGRSPPPQSKRASPPPRKPSPVRESLVLHVEKLSRNVNEGHLKEIFSNFGEVISVELAMDRTVNLPKGYGYVQFKTRGDAEKALLYMDGAQIDGNVIKARFTLPPRQKVSPPPKASAVAPKRDTPRADNASADVDKDGPKRQRESSPRRKPPPSPRRRSPVPRRAGSPRRPDSPRRRADSPVRRRLDSPYRRGGDTPPRRRPVSPGRGRSPSPPRRLRSPARLSPRRIRGSPGRRRSPPPPPRRRSPPRRPRSPPRRSPIGRRRTRSPIRRSARSRSRSFSPRRGRPPVRRGRSSSYSDSPSPRKVSRRSKSRSPRRPLRGRGSSNSSSSSSPPPPPPPPTRKP

SEQ ID NO: 60077 - protein, 286 aa, Glycine max
  peptide (1)..(286): Ceres Seq. ID no. 14315922
MDRTVNLPKGYGYVQFKTRGDAEKALLYMDGAQIDGNVIKARFTLPPRQKVSPPPKASAVAPKRDTPRADNASADVDKDGPKRQRESSPRRKPPPSPRRRSPVPRRAGSPRRPDSPRRRADSPVRRRLDSPYRRGGDTPPRRRPVSPGRGRSPSPPRRLRSPARLSPRRIRGSPGRRRSPPPPPRRRSPPRRPRSPPRRSPIGRRRTRSPIRRSARSRSRSFSPRRGRPPVRRGRSSSYSDSPSPRKVSRRSKSRSPRRPLRGRGSSNSSSSSSPPPPPPPPTRKP

SEQ ID NO: 60078 - DNA, 1073 bp, Glycine max
  misc_feature (1)..(1073): Ceres Seq. ID no. 14316416
atcgcaaatttttctttttcttctcccctttagatgagtaacgccacagactccgccggcaaaatcccaccggagacgaggcccgccgagagcgacagtggtggtgatagtgggccccggcccacgatcaagatcaatgttatgcacggatcctctcaacacgagttccacctcccggcccaatcaacttttggggatgttaagaaactccttgttaataaaactggtttagagcctgtagagcaacgacttttcttcagagggatagaaaagggtgataacctacatttgcaccttgaaggtgtaaaggataagtcaaagcttttgcttttggagggcactgctagcaaagagaggaaacttgaggaaaccagaaaacaaaacgtaatgtctaaagcttttgaggctattgctggtgttagagctgaggtggacaagctctcaaatagggtgacttccatagaagtagctattaatggggggaacaaagcatccgagaaagagtttcttgtgctgacagagctgcttatgagtcaattgctgaaactggatggtattgaggctgaaggtgaagcaaagttgcagagaaaagctgaggtgaatcgtgtgcagaaccttgtggataaattagattctctaaaggcaaggaacgccaacccttttagcaacagtagcaatgctgtcaaagtaacaacccaatgggaaacctttgactctggaatggaaagcttggatgctccatccgataacccgtcttccacaaaagtaactcaagaatgggagcggtttgattagctcggaaaccgtttttggaacatctaagttataaatgttgtacaacatcatattactggcccttcatcatattagaggtcttggcacaacgatgttgccttgtgatatggtaggctgaaattttaattgcagaaatgttctctccgctgaggtaaagttgcatatgtttgatctatctcgtgcacttatttttaggcaaaatatgtaaaccaaattgtattcttgttacttgaatatattattgcatcttccgatcatttggtttgtcttctgtttgc

SEQ ID NO: 60079 - protein, 253 aa, Glycine max
  peptide (1)..(253): Ceres Seq. ID no. 14316417
MSNATDSAGKIPPETRPAESDSGGDSGPRPTIKINVMHGSSQHEFHLPAQSTFGDVKKLLVNKTGLEPVEQRLFFRGIEKGDNLHLHLEGVKDKSKLLLLEGTASKERKLEETRKQNVMSKAFEAIAGVRAEVDKLSNRVTSIEVAINGGNKASEKEFLVLTELLMSQLLKLDGIEAEGEAKLQRKAEVNRVQNLVDKLDSLKARNANPFSNSSNAVKVTTQWETFDSGMESLDAPSDNPSSTKVTQEWERFD

SEQ ID NO: 60080 - protein, 217 aa, Glycine max
  peptide (1)..(217): Ceres Seq. ID no. 14316418
MHGSSQHEFHLPAQSTFGDVKKLLVNKTGLEPVEQRLFFRGIEKGDNLHLHLEGVKDKSKLLLLEGTASKERKLEETRKQNVMSKAFEAIAGVRAEVDKLSNRVTSIEVAINGGNKASEKEFLVLTELLMSQLLKLDGIEAEGEAKLQRKAEVNRVQNLVDKLDSLKARNANPFSNSSNAVKVTTQWETFDSGMESLDAPSDNPSSTKVTQEWERFD

SEQ ID NO: 60081 - protein, 135 aa, Glycine max
  peptide (1)..(135): Ceres Seq. ID no. 14316419
MSKAFEAIAGVRAEVDKLSNRVTSIEVAINGGNKASEKEFLVLTELLMSQLLKLDGIEAEGEAKLQRKAEVNRVQNLVDKLDSLKARNANPFSNSSNAVKVTTQWETFDSGMESLDAPSDNPSSTKVTQEWERFD

SEQ ID NO: 60082 - DNA, 1839 bp, Glycine max
  misc_feature (1)..(1839): Ceres Seq. ID no. 14316269
atcacaattcctcaacaacacaacacacaaacacaaaatccccttcaaaacctttcgctttctctctctctctaaagcaaaaacaaaaaagcttccctcgaattgcagaaaatggcaacaatgtccgcatctccaatgaacctcaacatgattgactctaacttcgaagtcgacaagctcacctacgaaatcttctccattctcgagaacaatttcctcttcggctacggcgacaccgaaaatcgcaccaattcgattaattttccgccgagagacgcgaaaccggcgaaacacgccgccggcaaggtccgcatcctctgcattgacggcgccggcgccactgacggcatcctcgccgcgaagtccctcgcgcacctcgaggcctgcctccgccgcaagtcaggcgacgcgaacgcgcgcgtcgccgatttcttcgacgccgccgccggctccggggtcggtggcgtcctcgccgcgctgcttttcactcgcggcaaggacggaaggccgctgtgcagcgccgagggggcgctgcggttcctcaccgacaaccgccgcaggatttcgcggcgggcggggctcctccggcgagtgctccggcctgcggcaaaggcggagaagctcttccgcaagacgttcggggagtgcacgctgaaggacacggtgaagcccgtgctgatcccctgctacgacctcgtcacgcgcgcggcgttcgttttctcgcgcgccgacgcgcttgaagtggacggctacgatttcaagatgcgcgatgtgtgcgccgccacgtcagcggacccatcctctgcccccacagagatgcggtccgtcgacggcaggaccaggatcatggccgtcgacggaggcgtcgccatgaacaatccaacggctgccgccatcacgcacgtgctcaataacaaacatgagttcccgttctgtaacggcgtttccgacctcctcgtactctccctcggtaacggagagtcagactttaacgccgttaagtcctcctctggcttcgtaaggatcgccggcgaaggagcttccgatatggtggatcaagccgtatcgatggcatttggtgagtgtcggacgagcaattatgtgcggattcagtcaaacgggatcatggcaaacaagagcacagaggccaagtcctgcaaaacggcgtcggatttgtttgccatgtcggaggagatgttggcccagaagaacgttgagtccattttgttcagggggaagaaggtggcggagaacaccaacatggacaagttagagttgtttgggggagagttaattaaggagcaagagagaagaaaaacaagcattttagcaacggtggtgttgaagaacaataatgcctcaccctcacccagcagaacttcctctgccactaccttgtccactttgtcctccagtagttaaaaccagaaacagacaagggagattagagggaagaaatccaaagttagatttttcattgtggggttgaatttttatgccagtttttcttttttattttaagtttgtggtgttggggtagctgccgcttgggaccaaattaaggcaaattgagagactgagctgtgcagagccgaatccttaattactactattactattactacctacattatatttattttttttatttttctttagtttttttgggggtatatattacatttttatgtaatgatagtgatttgtgtatatggttattgccatggcatgatttttggtttaatgttagagctgtgcttgatttgtgagaattgtactgttcggtaagaacatcatcatctgatagttaaatagtattgtgactgaatgcagaacact

SEQ ID NO: 60083 - protein, 436 aa, Glycine max
  peptide (1)..(436): Ceres Seq. ID no. 14316270
MATMSASPMNLNMIDSNFEVDKLTYEIFSILENNFLFGYGDTENRTNSINFPPRDAKPAKHAAGKVRILCIDGAGATDGILAAKSLAHLEACLRRKSGDANARVADFFDAAAGSGVGGVLAALLFTRGKDGRPLCSAEGALRFLTDNRRRISRRAGLLRRVLRPAAKAEKLFRKTFGECTLKDTVKPVLIPCYDLVTRAAFVFSRADALEVDGYDFKMRDVCAATSADPSSAPTEMRSVDGRTRIMAVDGGVAMNNPTAAAITHVLNNKHEFPFCNGVSDLLVLSLGNGESDFNAVKSSSGFVRIAGEGASDMVDQAVSMAFGECRTSNYVRIQSNGIMANKSTEAKSCKTASDLFAMSEEMLAQKNVESILFRGKKVAENTNMDKLELFGGELIKEQERRKTSILATVVLKNNNASPSPSRTSSATTLSTLSSSS

SEQ ID NO: 60084 - protein, 433 aa, Glycine max
  peptide (1)..(433): Ceres Seq. ID no. 14316271
MSASPMNLNMIDSNFEVDKLTYEIFSILENNFLFGYGDTENRTNSINFPPRDAKPAKHAAGKVRILCIDGAGATDGILAAKSLAHLEACLRRKSGDANARVADFFDAAAGSGVGGVLAALLFTRGKDGRPLCSAEGALRFLTDNRRRISRRAGLLRRVLRPAAKAEKLFRKTFGECTLKDTVKPVLIPCYDLVTRAAFVFSRADALEVDGYDFKMRDVCAATSADPSSAPTEMRSVDGRTRIMAVDGGVAMNNPTAAAITHVLNNKHEFPFCNGVSDLLVLSLGNGESDFNAVKSSSGFVRIAGEGASDMVDQAVSMAFGECRTSNYVRIQSNGIMANKSTEAKSCKTASDLFAMSEEMLAQKNVESILFRGKKVAENTNMDKLELFGGELIKEQERRKTSILATVVLKNNNASPSPSRTSSATTLSTLSSSS

SEQ ID NO: 60085 - protein, 428 aa, Glycine max
  peptide (1)..(428): Ceres Seq. ID no. 14316272
MNLNMIDSNFEVDKLTYEIFSILENNFLFGYGDTENRTNSINFPPRDAKPAKHAAGKVRILCIDGAGATDGILAAKSLAHLEACLRRKSGDANARVADFFDAAAGSGVGGVLAALLFTRGKDGRPLCSAEGALRFLTDNRRRISRRAGLLRRVLRPAAKAEKLFRKTFGECTLKDTVKPVLIPCYDLVTRAAFVFSRADALEVDGYDFKMRDVCAATSADPSSAPTEMRSVDGRTRIMAVDGGVAMNNPTAAAITHVLNNKHEFPFCNGVSDLLVLSLGNGESDFNAVKSSSGFVRIAGEGASDMVDQAVSMAFGECRTSNYVRIQSNGIMANKSTEAKSCKTASDLFAMSEEMLAQKNVESILFRGKKVAENTNMDKLELFGGELIKEQERRKTSILATVVLKNNNASPSPSRTSSATTLSTLSSSS

SEQ ID NO: 60086 - DNA, 854 bp, Glycine max
  misc_feature (1)..(854): Ceres Seq. ID no. 14315878
tccctttggttcccgtatcagtatcaaagtccaggacgatgtcgtttgggtcctctctgttgtctcattcgcatgcccttcgattcttgtccaacaacaacagaaacagaacctcccgcttcaaagccactgccaaagttcccgatttcctctctgcagattggtttgaatcgcgcaagaaaataccctttggaccacgattagattttagtgcagaagatgcggtgcattaccagcttgaagccttgaagtataatgaccagcctcgtccagactatggaatcgaggttatgtacaggtttgctggatttgatccctttgaaaggtctccctattttggccctttctttgatttgggccagtttgaacggtttaggcgaatttttcaccattctacttatcgggtcttactaggtcacaaggagagaaagatcatgagcactttgttcgtcgaggagaacaaatacaagcagcgggtttggattcgtggaagtcgaccagaggaagaggagatatttcaacttacaatggtttagaaggttggaggatgctgggatggttactggttaacagagtctctgcttcacgatacggatacatttgccggtggattagcatattgaaagtcatctaatgcaggaatcaggctcgtgaggttccactgtcaaaagcatgaaatgatctgcattcctgcaactactatcctaatctgtaaaatttgtgtacatatgtaagaaattcagctgttaatatgtgtatataattggtcctcgctaatcaaatgtaaacattcttgtatattttgctgaatgttgcaggagctagcatactttaatgcttatgctcacatctgt

SEQ ID NO: 60087 - protein, 177 aa, Glycine max
  peptide (1)..(177): Ceres Seq. ID no. 14315879
PLVPVSVSKSRTMSFGSSLLSHSHALRFLSNNNRNRTSRFKATAKVPDFLSADWFESRKKIPFGPRLDFSAEDAVHYQLEALKYNDQPRPDYGIEVMYRFAGFDPFERSPYFGPFFDLGQFERFRRIFHHSTYRVLLGHKERKIMSTLFVEENKYKQRVWIRGSRPEEEEIFQLTMV

SEQ ID NO: 60088 - protein, 165 aa, Glycine max
  peptide (1)..(165): Ceres Seq. ID no. 14315880
MSFGSSLLSHSHALRFLSNNNRNRTSRFKATAKVPDFLSADWFESRKKIPFGPRLDFSAEDAVHYQLEALKYNDQPRPDYGIEVMYRFAGFDPFERSPYFGPFFDLGQFERFRRIFHHSTYRVLLGHKERKIMSTLFVEENKYKQRVWIRGSRPEEEEIFQLTMV

SEQ ID NO: 60089 - DNA, 1045 bp, Glycine max
  misc_feature (1)..(1045): Ceres Seq. ID no. 14305540
agtctctgaatctgaaattgcaatgcttcacccggcggcactgatagcatcgtgtccttatccttatccttatcctgggcggcatgagttaccctcagcctcagcgtcagcgacagccagagtcgctgttccaatgccaaatctgagaggcaaagcggttgttggtgttggttccagaatgataaggtgcatggctaaccccagaagagttcaaatggtggccaagcaaattaggagagagctttctcatatgcttctcaccgataaagtcttgcagtatgctgttcttcccgaagcctccttaggagccgaccgttacctctcttctctcaccaccatcaccgacgtccaagtctccgccgacttgcaggttgttaaggtgtatgtttctgtttttggagatgaaagaggtaaagaagtcgccattgccggcttgaaatctaaggctaaatatgttcgcagcgagttgggcaagcgtatcaagttgcgcttaactcctgagatacgctttcttgaggatgattcttttgagagaggaagcagggtcattgcaatactagataaaataaagaatgacaaaagccaatacaaggcggagttggattcgtcaccaaatgaggatcacgacgatgattgggatggtgaagatcctgaagaaggcatcatttatgtggaatagatgtctccctatgtaactctatcactactgtgcatctttcatatggacaaacctttcactgttgatagtgatcggaaacacttcactaaaatgcttgctggacagacgctgttctagatttgtagttgtgacaagtcacaattgacaacattatctcaacacaaagaccttcttgcgttgtctatccccaagtgatgtgatgtagaccaattttggggttttctctccttttatatgccttaacccaggatcttactatacaagagggtttgctgtataaagttcttttcctgctttacttattcctgtaagtggaatttataatgtttactattgctatgctattcgaattcggctgtcttcaac

SEQ ID NO: 60090 - protein, 225 aa, Glycine max
  peptide (1)..(225): Ceres Seq. ID no. 14305541
VSESEIAMLHPAALIASCPYPYPYPGRHELPSASASATARVAVPMPNLRGKAVVGVGSRMIRCMANPRRVQMVAKQIRRELSHMLLTDKVLQYAVLPEASLGADRYLSSLTTITDVQVSADLQVVKVYVSVFGDERGKEVAIAGLKSKAKYVRSELGKRIKLRLTPEIRFLEDDSFERGSRVIAILDKIKNDKSQYKAELDSSPNEDHDDDWDGEDPEEGIIYVE

SEQ ID NO: 60091 - protein, 218 aa, Glycine max
  peptide (1)..(218): Ceres Seq. ID no. 14305542
MLHPAALIASCPYPYPYPGRHELPSASASATARVAVPMPNLRGKAVVGVGSRMIRCMANPRRVQMVAKQIRRELSHMLLTDKVLQYAVLPEASLGADRYLSSLTTITDVQVSADLQVVKVYVSVFGDERGKEVAIAGLKSKAKYVRSELGKRIKLRLTPEIRFLEDDSFERGSRVIAILDKIKNDKSQYKAELDSSPNEDHDDDWDGEDPEEGIIYVE

SEQ ID NO: 60092 - protein, 181 aa, Glycine max
  peptide (1)..(181): Ceres Seq. ID no. 14305543
MPNLRGKAVVGVGSRMIRCMANPRRVQMVAKQIRRELSHMLLTDKVLQYAVLPEASLGADRYLSSLTTITDVQVSADLQVVKVYVSVFGDERGKEVAIAGLKSKAKYVRSELGKRIKLRLTPEIRFLEDDSFERGSRVIAILDKIKNDKSQYKAELDSSPNEDHDDDWDGEDPEEGIIYVE

SEQ ID NO: 60093 - DNA, 1239 bp, Glycine max
  misc_feature (1)..(1239): Ceres Seq. ID no. 15171139
atgcacacacatatcagcataagaacaaatgatcatgaagtgaagtgaagtgaagtgtatataaaatactttggaagtgtcgtgaagagccaataacggttttttgtgtgtttctttctctctcatgttgtagtatctcacttgtgtttttcattcgtttctgaaccacacaaacatcaccaccgaacaatgccgacggggttaccggcggcgaattccttagtggcgccggacgaagaggggtgggtgtgggggcagatcaaggcggaggcgcgccgcgacgccgagtcggagcctgctttggcgagctacctctactcgacgatcctctcgcactcgtcgctcgagcgttctctgtcttttcacctcggaaataagctctgttcctccacgcttctctcgacgctcctttacgacctgttcctcaacgccttctcctccgacccctccctccgctccgccgccgtcgccgatctccgcgctgcccgcgaacgcgaccccgcctgcgtctcctactcccactgcctcctcaattacaaaggcttcctcgcttgccaggcgcaccgtgtggcgcatctgttgtggcggcaatcacggcggccgttggctttagcgctgcactctcgcatcgcagatgtgtttgcggtggacattcacccggcggcaaggattgggaaggggattctgttcgaccatgccactggggtggtggtaggggagacagcggtaatcgggaacaatgtgtcgatcctgcaccatgttactctgggtgggactggcaaggttggtggagaccggcatcctaagattggggatggggtgcttattggtgctggtgctaccattctggggaatattaagattggggaaggtgcaaaggttggtgctggttcagtggttttaattgatgtgccaccacggacaacagcagttgggaacccggcgaggttggttggtgggaaggagaagccctctaagcatgaggatgtgcctggggagtctatggaccatacttcctttatctctgagtggtcagattatatcatttgaatttctaaggttaatcaattaatgaatgaatacttcaaatcaaatgctatgtgttctgctgttctagagttttgtaattttatatttggattgagattttgtagagaccacactctgcttaattatactgtattatgactggaaattttggcagcctgcaatatagtgacatattgtgcaacagattat

SEQ ID NO: 60094 - protein, 286 aa, Glycine max
  peptide (1)..(286): Ceres Seq. ID no. 15171140
MPTGLPAANSLVAPDEEGWVWGQIKAEARRDAESEPALASYLYSTILSHSSLERSLSFHLGNKLCSSTLLSTLLYDLFLNAFSSDPSLRSAAVADLRAARERDPACVSYSHCLLNYKGFLACQAHRVAHLLWRQSRRPLALALHSRIADVFAVDIHPAARIGKGILFDHATGVVVGETAVIGNNVSILHHVTLGGTGKVGGDRHPKIGDGVLIGAGATILGNIKIGEGAKVGAGSVVLIDVPPRTTAVGNPARLVGGKEKPSKHEDVPGESMDHTSFISEWSDYII

SEQ ID NO: 60095 - DNA, 1730 bp, Glycine max
  misc_feature (1)..(1730): Ceres Seq. ID no. 15168502
cttcttggtcttcttctcttaatcctctccaccacattcgaagggaacgttacaaaaaaatcaccattttttctcattgttaatcaagttaagataagatcattcctctctatcaacaaacctttattgtgtatatatatatatattcccacaattcacatcactcttgtccttcactcattcactctatatatccacttcatataatttcctccacattgtgcaccgttcatggtgatggcaaaactaaagcacccttcattggtggcacttcttctagtactagcgtgtctttttattgctccaacatcctcaacatccagaaaaacaagtttcaagcagcagcacccttgcccaacaacaaatgggttccgagtcatgcttcgccacgtcgattcgggaaaaaacttaaccaaactagagcgtgtccaacacgggatcaagcgtggaaagagcaggcttcagaagcttaatgcaatggtgttggcagcatcatcaacacctgattctgaagatcagttagaagcccctattcacgcaggaaatggagagtacttaatagagttagccattggaacaccaccagtgtcttaccctgcggttttggacactggcagtgaccttatatggacacagtgcaagccttgcacacggtgttacaaacaaccaacacccatttttgatcccaagaagtcctcttctttttccaaggtttcatgcggtagtagcttgtgcagtgctttgccttcttcaacatgcagtgatgggtgtgagtatgtttattcatacggtgattattcaatgacacaaggcgttttggctaccgagactttcacttttgggaagtctaagaacaaggtttccgttcacaacattggttttggttgtggggaggacaatgaaggtgatggatttgaacaagcttcagggctggttggtcttggacgtggtcctttgtctttggtttctcaactcaaggaacaaagattttcttattgtttgaccccaattgatgacacaaaagaaagtgttttgttgttggggtctttgggtaaagtgaaagatgcaaaagaagtggtgacaacacctcttctcaaaaaccctttgcaaccttctttttactatctttctcttgaagctatctctgttggggacactcgattgtccattgagaagtccacttttgaagtgggggatgatgggaatggtggtgtgatcatagactctggcaccacaatcacctacgttcaacaaaaggcctatgaggcactcaaaaaagagttcatttctcaaaccaaacttgctttggacaaaactagctcaacagggttggatctttgtttctccttgccatcagggtcaacacaagtggagattccaaagcttgttttccatttcaagggtggggatttggagcttcctgctgagaactacatgattggtgactccaatttgggagtggcttgtttggccatgggtgcttctagtggaatgtctatatttggaaatgttcaacagcagaacattttggtgaaccatgatcttgaaaaggagaccatttcttttgttcctacgtcgtgtgatcagttgtgagagtgtgtgatatatttactgattagtgtatgtttttattgctttgtttgtttgataattttctgttgccggacttgtgttgttatgattgaatctcttagttgttgcaataatatgaacatttttattctctgttc

SEQ ID NO: 60096 - protein, 453 aa, Glycine max
  peptide (1)..(453): Ceres Seq. ID no. 15168503
MVMAKLKHPSLVALLLVLACLFIAPTSSTSRKTSFKQQHPCPTTNGFRVMLRHVDSGKNLTKLERVQHGIKRGKSRLQKLNAMVLAASSTPDSEDQLEAPIHAGNGEYLIELAIGTPPVSYPAVLDTGSDLIWTQCKPCTRCYKQPTPIFDPKKSSSFSKVSCGSSLCSALPSSTCSDGCEYVYSYGDYSMTQGVLATETFTFGKSKNKVSVHNIGFGCGEDNEGDGFEQASGLVGLGRGPLSLVSQLKEQRFSYCLTPIDDTKESVLLLGSLGKVKDAKEVVTTPLLKNPLQPSFYYLSLEAISVGDTRLSIEKSTFEVGDDGNGGVIIDSGTTITYVQQKAYEALKKEFISQTKLALDKTSSTGLDLCFSLPSGSTQVEIPKLVFHFKGGDLELPAENYMIGDSNLGVACLAMGASSGMSIFGNVQQQNILVNHDLEKETISFVPTSCDQL

SEQ ID NO: 60097 - protein, 451 aa, Glycine max
  peptide (1)..(451): Ceres Seq. ID no. 15168504
MAKLKHPSLVALLLVLACLFIAPTSSTSRKTSFKQQHPCPTTNGFRVMLRHVDSGKNLTKLERVQHGIKRGKSRLQKLNAMVLAASSTPDSEDQLEAPIHAGNGEYLIELAIGTPPVSYPAVLDTGSDLIWTQCKPCTRCYKQPTPIFDPKKSSSFSKVSCGSSLCSALPSSTCSDGCEYVYSYGDYSMTQGVLATETFTFGKSKNKVSVHNIGFGCGEDNEGDGFEQASGLVGLGRGPLSLVSQLKEQRFSYCLTPIDDTKESVLLLGSLGKVKDAKEVVTTPLLKNPLQPSFYYLSLEAISVGDTRLSIEKSTFEVGDDGNGGVIIDSGTTITYVQQKAYEALKKEFISQTKLALDKTSSTGLDLCFSLPSGSTQVEIPKLVFHFKGGDLELPAENYMIGDSNLGVACLAMGASSGMSIFGNVQQQNILVNHDLEKETISFVPTSCDQL

SEQ ID NO: 60098 - protein, 404 aa, Glycine max
  peptide (1)..(404): Ceres Seq. ID no. 15168505
MLRHVDSGKNLTKLERVQHGIKRGKSRLQKLNAMVLAASSTPDSEDQLEAPIHAGNGEYLIELAIGTPPVSYPAVLDTGSDLIWTQCKPCTRCYKQPTPIFDPKKSSSFSKVSCGSSLCSALPSSTCSDGCEYVYSYGDYSMTQGVLATETFTFGKSKNKVSVHNIGFGCGEDNEGDGFEQASGLVGLGRGPLSLVSQLKEQRFSYCLTPIDDTKESVLLLGSLGKVKDAKEVVTTPLLKNPLQPSFYYLSLEAISVGDTRLSIEKSTFEVGDDGNGGVIIDSGTTITYVQQKAYEALKKEFISQTKLALDKTSSTGLDLCFSLPSGSTQVEIPKLVFHFKGGDLELPAENYMIGDSNLGVACLAMGASSGMSIFGNVQQQNILVNHDLEKETISFVPTSCDQL

SEQ ID NO: 60099 - DNA, 983 bp, Glycine max
  misc_feature (1)..(983): Ceres Seq. ID no. 15168530
actttgggatttaaatacttttccatatgggtacttcgaaagttctcagcattgttttcttcgtgctattgggcgtaggcatatgctccgctgcaagaacactcctcaccattggtggaggtgtgcatggtgagataggtgttggtgttggtgtaggaggttatggtggtggtggaggttcaggtggaggtggaggatatggaggcgcgggagggcatggtgtaggtagtgacgaaggttcaaccactccaacgataaccgaatgctacgagccgagcgaggcgagcatcgagtggagcgtgaccaccgcggagggacacgacgacgccgtttccaacggcgtcgtcgtcgaagaaaagtggaagcggaaaggtggaaacggtttgttggtgagctgtcggagccagaaggcggttagcgtggggccgcaaccggtgaaatgtggatcagagggacaaagaaatgccacgtcatcgttatcatcacatgtgaacgtgattgggagtgtaaataagccaccacttgctcatgctaggggtcaccgcaacgcacctcgcgtgtcgcttgctttcgcgacatagccatttgcgttgcgcgcgcgcgcattcatgcaccttctcttcttctctcccaaacaaacaagaccccgagaataacgtccgcgcgcgctttttccgttttgtttgttccttcctccgttttgaattattctgtcgccttttgttttcctgttccatttatatatatccgttggggtcacgttcttttctggatagaatgtcgttgtttatgagatatgatgtttttttttttatgttgcaaacaattttaatttgagagttatgcttataaagtgtaaacagccattccttgaactaccataggtgatttgtgattgatcagatgattatctaagatccttgtattataagtagataattttttctctctcggctaaaatataattttcatttcattccact

SEQ ID NO: 60100 - protein, 184 aa, Glycine max
  peptide (1)..(184): Ceres Seq. ID no. 15168531
MGTSKVLSIVFFVLLGVGICSAARTLLTIGGGVHGEIGVGVGVGGYGGGGGSGGGGGYGGAGGHGVGSDEGSTTPTITECYEPSEASIEWSVTTAEGHDDAVSNGVVVEEKWKRKGGNGLLVSCRSQKAVSVGPQPVKCGSEGQRNATSSLSSHVNVIGSVNKPPLAHARGHRNAPRVSLAFAT

SEQ ID NO: 60101 - protein, 102 aa, Glycine max
  peptide (1)..(102): Ceres Seq. ID no. 15168532
MLGVTATHLACRLLSRHSHLRCARAHSCTFSSSLPNKQDPENNVRARFFRFVCSFLRFELFCRLLFSCSIYIYPLGSRSFLDRMSLFMRYDVFFFMLQTILI

SEQ ID NO: 60102 - DNA, 1435 bp, Glycine max
  misc_feature (1)..(1435): Ceres Seq. ID no. 13528157
aaacaacagaagcagcaggttcaaacttcaattcatggaagtgtgattctaatctccacaacaaacctaaccctaaaaagctaacccttttttttttttttttaaatattgnttctttttttacttaccctanatgttagagccatggacataaccccaacaacaacgatcaacaacaacaacactactcccagtgcaacaacaaaatccccagaaaatgaaacagaaacaccgaccaggatcaccacccccatcactcccacaacgacaaaaacctcatctttctcgaatggtgtcctcaaacgcacccaccaccaccaccacctccaccaccctatccctccggtggttacctacaaagaatgcctcaaaaatcacgccgccaacttgggtggccacgccttagatggctgcggcgagttcatgccctctccgaccgccaccgctgccgaccccagctccataaaatgcgccgcctgcggctgccaccgcaacttccaccgccgcgagccggaggagccccccatcgcctccaccaccacgcacgtcatcgagtatcagccccaccaccgccaccaccctcccccgccgctgcacgcggcggcggtagccacccgcagccccaattctgcttccccaccgccgatctcctcgtcgtactacccctccgcgccgcacatgctcctcgccctctccgccggactggcggctccgccggagagcaccgccgcgcctgccgccgcgcccacgagaaagcggttccgcacgaagttcagccaagagcagaaggagaagatgcacaagttcgcggagaaagtagggtggaagattcagaagcgcgacgaggatttgattcacgaaatttgcaacgaagttggcgttgatagaagcgttctcaaggtttggatgcataacaacaaaaacacctttgccaaaaaggataacaataatattgttactagtaatgatattaatattactactaaaaataatatttctactgataatgatgcaaatgggagtgatgtcaaggtttttgaaaaccctaacaatgatggtggtgaagatcgcgctgaagatccgagtagtaatcnctatgatggggtgaacgttgttggtgctaatggatcttctagttcttgatctaagggggaagaaaataataatgtattagataggttaatgatgattatgatgatgatgatgatgctacaaggttaattaatcagctgtttttaatttcttttcttttcttttttttgtttttaattgtttagtttttatattgttaatgagagcatgatgatcaatcagtttaatgggagagaatgttatatccggaagagaatttattttgcttttaatggttttatgctgaattaagttagcttttagttgttaccncttgttatgaatgtatattatgtttatcttt

SEQ ID NO: 60103 - protein, 332 aa, Glycine max
  peptide (1)..(332): Ceres Seq. ID no. 13528158
  misc_feature (317)..(317): Xaa is any aa, unknown or other
MDITPTTTINNNNTTPSATTKSPENETETPTRITTPITPTTTKTSSFSNGVLKRTHHHHHLHHPIPPVVTYKECLKNHAANLGGHALDGCGEFMPSPTATAADPSSIKCAACGCHRNFHRREPEEPPIASTTTHVIEYQPHHRHHPPPPLHAAAVATRSPNSASPPPISSSYYPSAPHMLLALSAGLAAPPESTAAPAAAPTRKRFRTKFSQEQKEKMHKFAEKVGWKIQKRDEDLIHEICNEVGVDRSVLKVWMHNNKNTFAKKDNNNIVTSNDINITTKNNISTDNDANGSDVKVFENPNNDGGEDRAEDPSSNXYDGVNVVGANGSSSS

SEQ ID NO: 60104 - protein, 239 aa, Glycine max
  peptide (1)..(239): Ceres Seq. ID no. 13528159
  misc_feature (224)..(224): Xaa is any aa, unknown or other
MPSPTATAADPSSIKCAACGCHRNFHRREPEEPPIASTTTHVIEYQPHHRHHPPPPLHAAAVATRSPNSASPPPISSSYYPSAPHMLLALSAGLAAPPESTAAPAAAPTRKRFRTKFSQEQKEKMHKFAEKVGWKIQKRDEDLIHEICNEVGVDRSVLKVWMHNNKNTFAKKDNNNIVTSNDINITTKNNISTDNDANGSDVKVFENPNNDGGEDRAEDPSSNXYDGVNVVGANGSSSS

SEQ ID NO: 60105 - protein, 173 aa, Glycine max
  peptide (1)..(173): Ceres Seq. ID no. 13528160
MPQKSRRQLGWPRLRWLRRVHALSDRHRCRPQLHKMRRLRLPPQLPPPRAGGAPHRLHHHARHRVSAPPPPPPSPAAARGGGSHPQPQFCFPTADLLVVLPLRAAHAPRPLRRTGGSAGEHRRACRRAHEKAVPHEVQPRAEGEDAQVRGESRVEDSEARRGFDSRNLQRSWR

SEQ ID NO: 60106 - DNA, 1590 bp, Glycine max
  misc_feature (1)..(1590): Ceres Seq. ID no. 15171614
aattcaatcattagtttcatttcataattcccatctcatggccatctcaaacaataatcatcatgctcttctacttgcttcaccaggaatgggtcacataatccctgccctagaacttgccaagcgtttagtcactcacaaaatcatttccaaactcaccttcttttgtggttcaatcaaaacctctactccatcaaaagctgagacacaaattctccaatcagccataaaggaaaaccttttcgatctaattcaactcccccccattgatctcaccatccatgttagtcctcgtgacaccttagaaaccaaaatagcaattataatgcatgaaatcccactactttttgtgtccacaatatccagcatgaacctcaacccaaccatgatcatcactgacttcttcttcagccaagttatacctctagccaaaaacctaaacctacccacatttgcttttgcaccaaccaatgcatggctcgtcgcacttggtcttcacacccccactttggataaagaaatagaaggagaatatatcaatgaaagcaaaccgatctcaatcccaggttgcaaatccattcacccccttgatatgtttggtatgttgcgtgacaggacacaaaggatctaccatgaatatgttggcgcgtgtgaaggggcagcacttgctgatgggatctttgtgaacacgtttcatgagttggagccaaagacacttgaagcacttggtagtggacacattattaccaaggtgcccgtgtacccggttgggcctattgtaagggatcaaagaagccctaatggtagcaatgaggggaaaataggtgatgtttttgggtggctggacaaacaagaagaagagtcagtggtgtatgtgtcacttgggagtggatacacaatgtcatttgaggaaattaaagagatggctttggggttggagctgagtggaaaaaaatttgtttggtctgtgcgcccacctgccaccaaatctggcactggcaactatctcacagcaggtgaggaaggagaaaccagaactatccttgggtctaataatgaaccatcaaactcttttcctgatgagttctaccgcatacaaaccaatggaattgtgatcacagattgggcaccacaattggatattttgaagcacccatcttttggtggttttgtgtctcattgtgggtggaactcattaatggagagtgtttcatgtggggtgccaataattggattgcctctttatgcagagcaaatgatgaatgctgcgatgctaatggaggaagttggcaatgcaattcgagtagaggtgtcaccatctaccaacatggttggaagggaggagttatcaaaagcaataaggaagataatggataaggatgacaaagaagggtgtgtaatgagggaaagggctaaagagcttaagcacatagcagaaagagcttggtttcatgatggtccttcttatttagcactttcaaaaatcactcactcaaatagggtgtgataactcatttatggtggttaaaataagtactcactttggtacaagaaaattctattctagaataaacaatcattattattgtc

SEQ ID NO: 60107 - protein, 501 aa, Glycine max
  peptide (1)..(501): Ceres Seq. ID no. 15171615
IQSLVSFHNSHLMAISNNNHHALLLASPGMGHIIPALELAKRLVTHKIISKLTFFCGSIKTSTPSKAETQILQSAIKENLFDLIQLPPIDLTIHVSPRDTLETKIAIIMHEIPLLFVSTISSMNLNPTMIITDFFFSQVIPLAKNLNLPTFAFAPTNAWLVALGLHTPTLDKEIEGEYINESKPISIPGCKSIHPLDMFGMLRDRTQRIYHEYVGACEGAALADGIFVNTFHELEPKTLEALGSGHIITKVPVYPVGPIVRDQRSPNGSNEGKIGDVFGWLDKQEEESVVYVSLGSGYTMSFEEIKEMALGLELSGKKFVWSVRPPATKSGTGNYLTAGEEGETRTILGSNNEPSNSFPDEFYRIQTNGIVITDWAPQLDILKHPSFGGFVSHCGWNSLMESVSCGVPIIGLPLYAEQMMNAAMLMEEVGNAIRVEVSPSTNMVGREELSKAIRKIMDKDDKEGCVMRERAKELKHIAERAWFHDGPSYLALSKITHSNRV

SEQ ID NO: 60108 - protein, 489 aa, Glycine max
  peptide (1)..(489): Ceres Seq. ID no. 15171616
MAISNNNHHALLLASPGMGHIIPALELAKRLVTHKIISKLTFFCGSIKTSTPSKAETQILQSAIKENLFDLIQLPPIDLTIHVSPRDTLETKIAIIMHEIPLLFVSTISSMNLNPTMIITDFFFSQVIPLAKNLNLPTFAFAPTNAWLVALGLHTPTLDKEIEGEYINESKPISIPGCKSIHPLDMFGMLRDRTQRIYHEYVGACEGAALADGIFVNTFHELEPKTLEALGSGHIITKVPVYPVGPIVRDQRSPNGSNEGKIGDVFGWLDKQEEESVVYVSLGSGYTMSFEEIKEMALGLELSGKKFVWSVRPPATKSGTGNYLTAGEEGETRTILGSNNEPSNSFPDEFYRIQTNGIVITDWAPQLDILKHPSFGGFVSHCGWNSLMESVSCGVPIIGLPLYAEQMMNAAMLMEEVGNAIRVEVSPSTNMVGREELSKAIRKIMDKDDKEGCVMRERAKELKHIAERAWFHDGPSYLALSKITHSNRV

SEQ ID NO: 60109 - protein, 472 aa, Glycine max
  peptide (1)..(472): Ceres Seq. ID no. 15171617
MGHIIPALELAKRLVTHKIISKLTFFCGSIKTSTPSKAETQILQSAIKENLFDLIQLPPIDLTIHVSPRDTLETKIAIIMHEIPLLFVSTISSMNLNPTMIITDFFFSQVIPLAKNLNLPTFAFAPTNAWLVALGLHTPTLDKEIEGEYINESKPISIPGCKSIHPLDMFGMLRDRTQRIYHEYVGACEGAALADGIFVNTFHELEPKTLEALGSGHIITKVPVYPVGPIVRDQRSPNGSNEGKIGDVFGWLDKQEEESVVYVSLGSGYTMSFEEIKEMALGLELSGKKFVWSVRPPATKSGTGNYLTAGEEGETRTILGSNNEPSNSFPDEFYRIQTNGIVITDWAPQLDILKHPSFGGFVSHCGWNSLMESVSCGVPIIGLPLYAEQMMNAAMLMEEVGNAIRVEVSPSTNMVGREELSKAIRKIMDKDDKEGCVMRERAKELKHIAERAWFHDGPSYLALSKITHSNRV

SEQ ID NO: 60110 - DNA, 1304 bp, Glycine max
  misc_feature (1)..(1304): Ceres Seq. ID no. 13594301
gcaatttttttgtcaatttagctgttgcaactgatactctaacagtgttttattctatgcatctctttaccaaattgcccctgctcaaagttgaaattctatagtcactttttaatttttttttttgttctgggtgtttttcttatctgtgttttgtttcaattgcgcgaggtgggtttttctagggtttggaggctatgccgaaagcgggttgaataagctcaggtgaagaaaatgattctcacaaagcagtaccgatgcatacactcagctagctgtcaatgtactaaagggcatttaagtgaagatgtgatattcttagtatttcataatttgaattggaatcccaagctaattgctactctatcatgtgtgtgcaaatggtttgatgatcttgccaagcgagttctatggaaagagttttgtagaacaagagctccgaaaatgttgtgtgatctgcaatctaatgggagccacattgttgatgggaactggagggccctagggaagcttcttatatactgttcaggatgcacaaaaggtggcttgttcaatagcattcagatccctggtcactttgtttatcagacacgattttctagaacatcaggaaagagctttcttttgccacaatgcagaactgatgttttgtatgtgtctgatccttgtgagcatcttgaccaaggtgaagaaggagatgtaggattcttccgtggcattttcaagtcatttgcaacctcaaaggtcaggaagatgcttattaataaaggtgccaagctccatccaacagaagtctgcccttattgtaaggcaaagttgtggagcatgctgcaagccaaaatgatccctcaaagtgctagttgcaggttgggttcttatgatgattgtattgagtattatgtgtgcctcaacggccacatgcttgggatatgtacactgttaccattgtctgattcagaagaggcatctgaattggagtaatacctaaatgattttcaggttggcagtaaatcttcacaagttggctaaacactgctggtatactccaggctcaattcaactaatcagcacctaaaatatgccattaacttaccctcaagcttgatgctgcaatctcacccaacccaagccacaatttccaaggaaggacggagatgatcaatttttagtatgaatcgttatactgaagtttgttactgtgaactatgtgatatcccatgtagattgatacgcggtgtctctacctgtgacaaatatgcgtgtgtaataattcatacttgttcaatataatcaggattcattct

SEQ ID NO: 60111 - protein, 248 aa, Glycine max
  peptide (1)..(248): Ceres Seq. ID no. 13594302
MILTKQYRCIHSASCQCTKGHLSEDVIFLVFHNLNWNPKLIATLSCVCKWFDDLAKRVLWKEFCRTRAPKMLCDLQSNGSHIVDGNWRALGKLLIYCSGCTKGGLFNSIQIPGHFVYQTRFSRTSGKSFLLPQCRTDVLYVSDPCEHLDQGEEGDVGFFRGIFKSFATSKVRKMLINKGAKLHPTEVCPYCKAKLWSMLQAKMIPQSASCRLGSYDDCIEYYVCLNGHMLGICTLLPLSDSEEASELE

SEQ ID NO: 60112 - protein, 178 aa, Glycine max
  peptide (1)..(178): Ceres Seq. ID no. 13594303
MLCDLQSNGSHIVDGNWRALGKLLIYCSGCTKGGLFNSIQIPGHFVYQTRFSRTSGKSFLLPQCRTDVLYVSDPCEHLDQGEEGDVGFFRGIFKSFATSKVRKMLINKGAKLHPTEVCPYCKAKLWSMLQAKMIPQSASCRLGSYDDCIEYYVCLNGHMLGICTLLPLSDSEEASELE

SEQ ID NO: 60113 - DNA, 1196 bp, Glycine max
  misc_feature (1)..(1196): Ceres Seq. ID no. 14316371
atctaccattggggtttcactgttcagtgtaactctcaagccatgtctccgggtcccgttattgacgcagccaccgaccccggcgccgaccaacaaattccctccgtcgacgacgcaatcctcaagaagaaagctcacccccaggttccccccatttccattcttttttctactttactttatctcttattcgcttccacgatcttttttttctcaggaagatgacgctcccattgtcgaggacgtcaaggacgatgacaaagaggaaaccgaagacgaggatgaggacgatgacgacgatgacaaggaagatgacgcccaaggtggtgctgagggtgggaagcagagcagaagtgagaagaagagccgaaaagcaatgttgaagttgggactgaaacctgttactggcgttagtagggtcacaatcaagaggacaaagaatattctttttttcatctcaaaacctgatgtcttcaagagtccaaattctgagacctacatcatatttggggaggcaaaaatagaggacttgagctctcagttgcagacacaggctgctcaacagttcaggatgccagatgtgggatccgtactggcaaaacaagatcaagatgctgcagctgcagcggcacagcctgaagaagaggaggaggaggttgatgaaactggtgtcgagccccatgacattgatttggtgatgacacaggcaggagtgtcaagaagcaaggctgtcaaggcccttaagactcacaatggggacattgtcggtgccattatggagctcactacttagtttcggtttatgttccatttgtagtttttgatttttggggatgattttggaactagtgccatcgtttttgtggtagtcaaaccatatatttggtccatatggttgtgcttaccttataatttcttgtggtacgatgtgatgatcaatgatcatattattttgttgtctttacttatagtagccttcttttagctctatatctttttgcccttaagttaacgtctagccctaaaattcgttggtttaaactttaggtatatatggttggtttgttgtatctgtacctgcaacactaaaggttcatgtcccgtggcctttggaaaatgggggccattgagctaggaatttttgtatcttaggctatattgatgattggattaaattgaattaattttaaaatttg

SEQ ID NO: 60114 - protein, 263 aa, Glycine max
  peptide (1)..(263): Ceres Seq. ID no. 14316372
STIGVSLFSVTLKPCLRVPLLTQPPTPAPTNKFPPSTTQSSRRKLTPRFPPFPFFFLLYFISYSLPRSFFSQEDDAPIVEDVKDDDKEETEDEDEDDDDDDKEDDAQGGAEGGKQSRSEKKSRKAMLKLGLKPVTGVSRVTIKRTKNILFFISKPDVFKSPNSETYIIFGEAKIEDLSSQLQTQAAQQFRMPDVGSVLAKQDQDAAAAAAQPEEEEEEVDETGVEPHDIDLVMTQAGVSRSKAVKALKTHNGDIVGAIMELTT

SEQ ID NO: 60115 - protein, 138 aa, Glycine max
  peptide (1)..(138): Ceres Seq. ID no. 14316373
MLKLGLKPVTGVSRVTIKRTKNILFFISKPDVFKSPNSETYIIFGEAKIEDLSSQLQTQAAQQFRMPDVGSVLAKQDQDAAAAAAQPEEEEEEVDETGVEPHDIDLVMTQAGVSRSKAVKALKTHNGDIVGAIMELTT

SEQ ID NO: 60116 - DNA, 1259 bp, Glycine max
  misc_feature (1)..(1259): Ceres Seq. ID no. 14316390
aaagaggtgtccgaatcgaacaggagcaagcaaagtcaaagaaaaagagagaggagagagagaaacaacaatcatcatcggccagaagcgaacacgacagacacatctgagaaaccaaacctgatagagatgtcgagtggaggaaaccttagttgcgtgttggtagctgtggatggcagcgaggaaagcatgaacgcgctgcgttgggcactgaacaacctcaagctccgatcccctgcacccgattccaccgatgctccttccttcaccgtcttccacgtccaatccccgccctccatcgccactggcctcaatcccggtgccatccccttcggtggccccagtgatctcgaagttcctgctttcactgcagccattgaagcgcaccaaaagcgcatcaccaacgccgtactcgatcacgccctcggaatttgctccgaattcaacctcaccagtaaggtcagaacccatgttcttgtaggagatccaaaggagaagatttgtgaagcagttcaggatttgaatgctgatgtgcttgtgatggggtctcgtgcttttggccccattaagaggatgttcctgggaagtgtaagcaactactgcgcccaccattctccatgccctgtcattattatcaaggaaaaggacattgtcaataagagaaactgatgcacttctactatgctaccatgattcttgtctcttgatcagtaggttctttaggtgggttgtcagtgccatatttcagttgctgacgctgcatccttgcttgccaaattaattatgtcgaaggctttttcgtcttgcaatttgcttgctttgttagaccagtgttgtacctcagctttgaagcttgtgtcttttgttgagccaatgctagccagaccctgcttcaagtacgtgttttcactttctgtggacaattctgctgtgtgtgtgaaattcttggagttaaagagtgctttataactgtgctgtcacaacgtcaattgttgtcccaaatggttcaaagagatatttgcctccaggtttgtattcgttctgaatttatacaatgttgtacagaaatgttgcattactattgctccttggtcagagccagttctagttgtgattgtgatatgcaacaaactggccatttgacatttgtcatgtacaaattttcaaattgagaatccagctagtgttggctgcagtgtgtcttactgttgcattattgacagtgtcctgcttaaataaatatttatatgatttatgac

SEQ ID NO: 60117 - protein, 222 aa, Glycine max
  peptide (1)..(222): Ceres Seq. ID no. 14316391
KEVSESNRSKQSQRKRERRERNNNHHRPEANTTDTSEKPNLIEMSSGGNLSCVLVAVDGSEESMNALRWALNNLKLRSPAPDSTDAPSFTVFHVQSPPSIATGLNPGAIPFGGPSDLEVPAFTAAIEAHQKRITNAVLDHALGICSEFNLTSKVRTHVLVGDPKEKICEAVQDLNADVLVMGSRAFGPIKRMFLGSVSNYCAHHSPCPVIIIKEKDIVNKRN

SEQ ID NO: 60118 - protein, 179 aa, Glycine max
  peptide (1)..(179): Ceres Seq. ID no. 14316392
MSSGGNLSCVLVAVDGSEESMNALRWALNNLKLRSPAPDSTDAPSFTVFHVQSPPSIATGLNPGAIPFGGPSDLEVPAFTAAIEAHQKRITNAVLDHALGICSEFNLTSKVRTHVLVGDPKEKICEAVQDLNADVLVMGSRAFGPIKRMFLGSVSNYCAHHSPCPVIIIKEKDIVNKRN

SEQ ID NO: 60119 - protein, 159 aa, Glycine max
  peptide (1)..(159): Ceres Seq. ID no. 14316393
MNALRWALNNLKLRSPAPDSTDAPSFTVFHVQSPPSIATGLNPGAIPFGGPSDLEVPAFTAAIEAHQKRITNAVLDHALGICSEFNLTSKVRTHVLVGDPKEKICEAVQDLNADVLVMGSRAFGPIKRMFLGSVSNYCAHHSPCPVIIIKEKDIVNKRN

SEQ ID NO: 60120 - DNA, 2318 bp, Glycine max
  misc_feature (1)..(2318): Ceres Seq. ID no. 14316344
ctcttctctctttctgtgtctcaaacccaaagaacacggagttggcggcgaccctttctctctctgatttcgatcatggcagctgttgctccttcttctgacaaaactgcagatttattgcagaatttgaccctggactctgagtccaaacccattggagttgctgagcctgcgaagaagaatggacccactttttccagtggtgcagctaaagggagggccaagccattcaatccaaattcatgctttgttccaaatggatacccttctgcgtattattatggaggttatgatgggcaaggtgattggaatgcttattccagatatatgaaccttgatggagggatggctcaaggtgtttatggggataactgctcttatatgtaccatcaaggttatggttatgcaccatatggaacatatgcatctcccaattcctcttctccaatgattcaacaggatggtcagcagtacgggctgcaacagtaccagtatccatgttcttattacaaatctccagcttctgctgatgtgtcatttactaccaacaaaatcagtcttccacaaggagaaatatcaactactgttgatgttgctgattgtgtttcttcaacaaatgctatgaataaaggaaacaatgttaacgtgggcaatagtaatttcactgataaaaatgggttaaatccatttttaactagttcacagcacacatctttgaatacaaatgattcttatcaaggggctagcttgccagcttatgctcctttgtcaggatatcagggtccaagaagcacccatggtacacaactgccagtcccttcggatgcgtccttagtatctgacggacaggccaaacatggagccaaggttggattatcttcatcagtagtgcctgtcaaagatttttcatctcaaagaaatcaaagacttcctcagccacttccccaatactcaaacatgagtggttccagacatccttctggacttgacctggtttctggattcatgaacgggatgtatccgagcaacaggatgtacagccaatatggaaacacattcaggcctaattctcatttcggatctgctgcgtatggatctagaatgggctctttcgatagcaaacataatggtgcagggtatggctgcggtcttaaccattttaaaaaaagtatggatggtttcagcgagctaaataagggacccagagctgccaagagttctgataataaaaacatcaaaagtcttggacctgtcacattattacacaagggacagaacctttcagtgaagagtgacaacaaagaagttcctttggttcccgacaaggaacagtacaatgggaaagatttggctgagaattattctgatgccaagttttttgtcatcaaatcctatagtgaggatgatattcataaaagcataaaatacagcgcttgggcaagcacccctaacggcaacaaaaagctggattcggcatatcaggaagccaaggagaagcccggtggctgtcccatatttttgttattttcggtcaacactagtgggcaatttgttggtttagccgagatgttgggtcctgttgattttggtaaaaccgtagattattggcagcaggacaggtggactggttgcttttctgtgaagtggcatgtcatcaaggatatcccaaatagcgtgttgaggcacataacgcttgaaaacaatgaaaacaaacctgtaacaaatagtagggatactcaggaggttaagtttgagaagggtgttcaacttgtcaaaatattcaaggagcattcaagccaaacatgcatcttggatgattttgggttctacgaggatcgtgaaaaggtgactcaggagaaaaagtctaaggaacagcagttaccaaaacagatcagcaagcccagtgatttcacatttgggacggttacatttccgaagtctcttgatgcaaccttgatcaatgaatctgctacagcaaatgcagcagagggaagaatgaatgcagaagggctgttagaagggaatggatcgactacagcacttgaagatgcttctaagagctgttaaagcaatgatagtcattggctgatttttgttttggtttgtttattccctattgctttagtcatctagtgagtggtggtgtttttcagtttcaaattatctgttatgtgatcttggtcttggtttggagtggagcatctaattttagcatttttctttggtctcgttcaataaaatgtgattgtttttagtagttataagtttcatggtaggtcaaaggaagttttaatcaaaatatattgtgttattgtagt

SEQ ID NO: 60121 - protein, 688 aa, Glycine max
  peptide (1)..(688): Ceres Seq. ID no. 14316345
LFSLSVSQTQRTRSWRRPFLSLISIMAAVAPSSDKTADLLQNLTLDSESKPIGVAEPAKKNGPTFSSGAAKGRAKPFNPNSCFVPNGYPSAYYYGGYDGQGDWNAYSRYMNLDGGMAQGVYGDNCSYMYHQGYGYAPYGTYASPNSSSPMIQQDGQQYGLQQYQYPCSYYKSPASADVSFTTNKISLPQGEISTTVDVADCVSSTNAMNKGNNVNVGNSNFTDKNGLNPFLTSSQHTSLNTNDSYQGASLPAYAPLSGYQGPRSTHGTQLPVPSDASLVSDGQAKHGAKVGLSSSVVPVKDFSSQRNQRLPQPLPQYSNMSGSRHPSGLDLVSGFMNGMYPSNRMYSQYGNTFRPNSHFGSAAYGSRMGSFDSKHNGAGYGCGLNHFKKSMDGFSELNKGPRAAKSSDNKNIKSLGPVTLLHKGQNLSVKSDNKEVPLVPDKEQYNGKDLAENYSDAKFFVIKSYSEDDIHKSIKYSAWASTPNGNKKLDSAYQEAKEKPGGCPIFLLFSVNTSGQFVGLAEMLGPVDFGKTVDYWQQDRWTGCFSVKWHVIKDIPNSVLRHITLENNENKPVTNSRDTQEVKFEKGVQLVKIFKEHSSQTCILDDFGFYEDREKVTQEKKSKEQQLPKQISKPSDFTFGTVTFPKSLDATLINESATANAAEGRMNAEGLLEGNGSTTALEDASKSC

SEQ ID NO: 60122 - protein, 663 aa, Glycine max
  peptide (1)..(663): Ceres Seq. ID no. 14316346
MAAVAPSSDKTADLLQNLTLDSESKPIGVAEPAKKNGPTFSSGAAKGRAKPFNPNSCFVPNGYPSAYYYGGYDGQGDWNAYSRYMNLDGGMAQGVYGDNCSYMYHQGYGYAPYGTYASPNSSSPMIQQDGQQYGLQQYQYPCSYYKSPASADVSFTTNKISLPQGEISTTVDVADCVSSTNAMNKGNNVNVGNSNFTDKNGLNPFLTSSQHTSLNTNDSYQGASLPAYAPLSGYQGPRSTHGTQLPVPSDASLVSDGQAKHGAKVGLSSSVVPVKDFSSQRNQRLPQPLPQYSNMSGSRHPSGLDLVSGFMNGMYPSNRMYSQYGNTFRPNSHFGSAAYGSRMGSFDSKHNGAGYGCGLNHFKKSMDGFSELNKGPRAAKSSDNKNIKSLGPVTLLHKGQNLSVKSDNKEVPLVPDKEQYNGKDLAENYSDAKFFVIKSYSEDDIHKSIKYSAWASTPNGNKKLDSAYQEAKEKPGGCPIFLLFSVNTSGQFVGLAEMLGPVDFGKTVDYWQQDRWTGCFSVKWHVIKDIPNSVLRHITLENNENKPVTNSRDTQEVKFEKGVQLVKIFKEHSSQTCILDDFGFYEDREKVTQEKKSKEQQLPKQISKPSDFTFGTVTFPKSLDATLINESATANAAEGRMNAEGLLEGNGSTTALEDASKSC

SEQ ID NO: 60123 - protein, 579 aa, Glycine max
  peptide (1)..(579): Ceres Seq. ID no. 14316347
MNLDGGMAQGVYGDNCSYMYHQGYGYAPYGTYASPNSSSPMIQQDGQQYGLQQYQYPCSYYKSPASADVSFTTNKISLPQGEISTTVDVADCVSSTNAMNKGNNVNVGNSNFTDKNGLNPFLTSSQHTSLNTNDSYQGASLPAYAPLSGYQGPRSTHGTQLPVPSDASLVSDGQAKHGAKVGLSSSVVPVKDFSSQRNQRLPQPLPQYSNMSGSRHPSGLDLVSGFMNGMYPSNRMYSQYGNTFRPNSHFGSAAYGSRMGSFDSKHNGAGYGCGLNHFKKSMDGFSELNKGPRAAKSSDNKNIKSLGPVTLLHKGQNLSVKSDNKEVPLVPDKEQYNGKDLAENYSDAKFFVIKSYSEDDIHKSIKYSAWASTPNGNKKLDSAYQEAKEKPGGCPIFLLFSVNTSGQFVGLAEMLGPVDFGKTVDYWQQDRWTGCFSVKWHVIKDIPNSVLRHITLENNENKPVTNSRDTQEVKFEKGVQLVKIFKEHSSQTCILDDFGFYEDREKVTQEKKSKEQQLPKQISKPSDFTFGTVTFPKSLDATLINESATANAAEGRMNAEGLLEGNGSTTALEDASKSC

SEQ ID NO: 60124 - DNA, 1725 bp, Glycine max
  misc_feature (1)..(1725): Ceres Seq. ID no. 15171693
atattccgataaacagaaacaccaccgttgaatttgagaatcccggcgaggcatgttcttgctccgagtccactcggtggaagaggaccaccctctggatccccaaaccatcttccaatcccaatcccaatcccaatcccaatcccaatccaacaaccctaaattcagcgaacgcagaggcgcactccacttgttccgaacctcttcccattcctcgctcccaacccagacctctctttcttctctcctcttcatcctcgccgtccccaactacctctccttccacgacttcattcccttctgtggaccccacctcgaccgtttccaccaccttctcttcatcagaaacgacggcaccgaagatcgctatagcgtcctcatcgagttcgccgatcactttgccgccgacgcattttttaccaatttcaatgccaagaagttttctcctgccgaggcagaggtgtgccatattttgtttctgcaatccgtggagtattctgaatatgcagaagttgctgggactccgcctcctggttgtacggaaataccaacttgtcctgtttgtcttgagaggttggacccagatacgagtgggattctcacaacactttgcgaccactcatttgattgcccttgtgtttcaaagtggacgtacttgtcttgccaggtttgtcaattctgtcagcaacaggatgagaagccaacctgttttatttgtggaacattagatgatctctgggtttgtatgatttgtggatttgttggatgtggaagatataaagaaggacatgccattcagcattggaaagatactcagcattgctattctcttgattttaaaacacagcaaatttgggattatgtgggtgacagttatgtccatcgactgaaccaggaccagtctaaaattgatggcaagttggaggagatgaattttcgctgtatgtcactggaaggagattgtggtatgtgcgaatgccgtgaagatttgggaattaatggggcccttttcaacagcaaagttgaaacgattgtggatgaatacaaccgtcttcttacatctcagttggagacacaaagacaatattatgaatctttactagtggaggcaaaaagtaaaatggaaagttccatgtctgaagcagtggagaaagctgcagcttctgaaatgcaggatatccaaaatgaactggaaaagtgtacagaagaaagaaatgccattgctgaggtcaatcagaaactcataaaaaatcaagagatttggcggaagaagtttaaagaagctgaagagagggaagctaaatcaattaaattgatgaatgagaggataattgatttggaggaacagattagagatatcaagatttttctagaagcacaaaaaacaattgataaaatgtcagattcaaatgggatcaaggagggaacagtcctgccggtggcttatgagcaatcttctccaggccacagtaagagaaacaaaaagtctggccgaaggaggaattagttgcaacctcaaccagaacacaatattcgaacttatgggtagtctgctttttaggagggaaggacactgcttctgattattacactgatacttgttgatatatagaggcagttccaactcgtggccatggattgctgtctgcatattttagatgttgtatagtttattcttgtaaacagttagtttaacgaatttcgtggtcctaaccctttcctctc

SEQ ID NO: 60125 - protein, 484 aa, Glycine max
  peptide (1)..(484): Ceres Seq. ID no. 15171694
MFLLRVHSVEEDHPLDPQTIFQSQSQSQSQSQSNNPKFSERRGALHLFRTSSHSSLPTQTSLSSLLFILAVPNYLSFHDFIPFCGPHLDRFHHLLFIRNDGTEDRYSVLIEFADHFAADAFFTNFNAKKFSPAEAEVCHILFLQSVEYSEYAEVAGTPPPGCTEIPTCPVCLERLDPDTSGILTTLCDHSFDCPCVSKWTYLSCQVCQFCQQQDEKPTCFICGTLDDLWVCMICGFVGCGRYKEGHAIQHWKDTQHCYSLDFKTQQIWDYVGDSYVHRLNQDQSKIDGKLEEMNFRCMSLEGDCGMCECREDLGINGALFNSKVETIVDEYNRLLTSQLETQRQYYESLLVEAKSKMESSMSEAVEKAAASEMQDIQNELEKCTEERNAIAEVNQKLIKNQEIWRKKFKEAEEREAKSIKLMNERIIDLEEQIRDIKIFLEAQKTIDKMSDSNGIKEGTVLPVAYEQSSPGHSKRNKKSGRRRN

SEQ ID NO: 60126 - protein, 253 aa, Glycine max
  peptide (1)..(253): Ceres Seq. ID no. 15171695
MICGFVGCGRYKEGHAIQHWKDTQHCYSLDFKTQQIWDYVGDSYVHRLNQDQSKIDGKLEEMNFRCMSLEGDCGMCECREDLGINGALFNSKVETIVDEYNRLLTSQLETQRQYYESLLVEAKSKMESSMSEAVEKAAASEMQDIQNELEKCTEERNAIAEVNQKLIKNQEIWRKKFKEAEEREAKSIKLMNERIIDLEEQIRDIKIFLEAQKTIDKMSDSNGIKEGTVLPVAYEQSSPGHSKRNKKSGRRRN

SEQ ID NO: 60127 - DNA, 750 bp, Glycine max
  misc_feature (1)..(750): Ceres Seq. ID no. 15175191
atttctctctctctctctctctcttctccgtcaatgccttctcctctcacagtcacagggtctgtttgttagggtttcctttttttccatttcccccctttctcccacactatctctttccgcattttcccaattaggatgtgtcattgagacagaagaagaagaagaaattggagggggtgtgtgatcgggtcctcaggtgaagatctgaggctgttggtgtctcttttcttttctccgagttccaaagatgagcgcttctaggttcatcaagtgcgtcactgttggggatggtgctgtgggcaaaacctgtttgcttatttcctacaccagcagtgacgcacttgatgaaccttgaagctcagctgagaaaaattgaggaacaactagagaaaaagaaagcagaatatggtgaaaaaatgaaaaacaaaatagccttagttcacaagcaagcagaggagaagagagcaatggttgaagccaagcgtggtgaagaaattctcaaggcagaggaaatagctgcaaaacaccgtgcaactggaacctctccaaagaaggcctttggatgcttttaaatttttattcctttttttgttgttgtgcttttgtgcctgatgtcatagcaataatgaaatttttgtctataatattttcatgtttgttttttaaatgttgtttatgtgtgtacgaaatggaaagggggacactatgaagtttgtgacatacagaacagcctctagatctttttgt

SEQ ID NO: 60128 - protein, 94 aa, Glycine max
  peptide (1)..(94): Ceres Seq. ID no. 15175192
MVLWAKPVCLFPTPAVTHLMNLEAQLRKIEEQLEKKKAEYGEKMKNKIALVHKQAEEKRAMVEAKRGEEILKAEEIAAKHRATGTSPKKAFGCF

SEQ ID NO: 60129 - protein, 75 aa, Glycine max
  peptide (1)..(75): Ceres Seq. ID no. 15175193
MNLEAQLRKIEEQLEKKKAEYGEKMKNKIALVHKQAEEKRAMVEAKRGEEILKAEEIAAKHRATGTSPKKAFGCF

SEQ ID NO: 60130 - protein, 61 aa, Glycine max
  peptide (1)..(61): Ceres Seq. ID no. 15175194
FLSLSLSLLRQCLLLSQSQGLFVRVSFFSISPLSPTLSLSAFSQLGCVIETEEEEEIGGGV

SEQ ID NO: 60131 - DNA, 1480 bp, Glycine max
  misc_feature (1)..(1480): Ceres Seq. ID no. 15168421
acacagaaaaacaaatccttcaaacatcgttttatttttcttctctctaaactaaaaaaaatgaagggcaccatagttctacaccctgccatgagtaggggacacctagtccccatggtagaacttggcaagttcatatacactcaccaccaccaaaacctccccatcaaaatcctcctcccttcgccgcccaactccaccacccttcaatacatcgccgccgtctccgccaccacgccttcgatcaccttccaccacctctcaccctcacaacacttactccacgtcctccaaaccctcatctcccaatcttccaaacccaaagccttcatcctagacttcttcaaccactccgctgctgatgtcacacgaaccctaaaaatccccacctactattacttccccaactccgcgagttgcgtcgctctcttcctttacaccccaaccatccactacaacaccaagaaaggcttttccagttacagcgacacgcttcgccgcatccccggtttgccgccactgtcgccggaggacatgcccacctccctcctcgaccgccggagcttcgagtccttcgccaacatgtcgattcaaatgagaaaaacagatggaataatcgttaacacgttcgagaagcttgagaataaagctttcttcgcgttgaagaatgggatctgcatgtcattagaaacacataagtctcattcttcaacgccagaaacacgtaacccacgtgtcttttgcatgggcccacttgtttctaacggtggaggtgaacatgataatgatgatagtggttgcatgagttggctcgactcgcaaccgagtcgaaccgttgtgtttttaagctttggaagctacggaaggttctcgaagagtcagataagggagatagcgttagggttagagaggagtggacaaaggtttttgtgggttatgaggaacccatatgagagaagtgaattgattttggaggaattgttgccaaaagggtttttggaaagaactaaagagaggggaatggtgatgaagaattgggcgccacaagttaagattctgagtcatgactcggtgggtgggttcgtgactcactgcgggtggaactcggtgttggaagcggtctcttggggtgtgcctatggtgtcgtggcctttgtatgcggaacaaaggttgaatagggtggttatggttgaggagatgaaggtggctttggcgttgaaggagaacgaagatgggtttgttagggctagtgagttggaagagcgagttagggagcttatggactcggagagagggagagggaaagaggttagagagagagttttgagcgcgagatatgatgctgtagctgcactcagcgatggtggatcttcacgggttgagttgaatgacttggttgagttgtggatgcaatgatgcttaaaagagtattattttttttcctgcttttattttaagtcaactgggtcaaccagttcac

SEQ ID NO: 60132 - protein, 471 aa, Glycine max
  peptide (1)..(471): Ceres Seq. ID no. 15168422
TQKNKSFKHRFIFLLSKLKKMKGTIVLHPAMSRGHLVPMVELGKFIYTHHHQNLPIKILLPSPPNSTTLQYIAAVSATTPSITFHHLSPSQHLLHVLQTLISQSSKPKAFILDFFNHSAADVTRTLKIPTYYYFPNSASCVALFLYTPTIHYNTKKGFSSYSDTLRRIPGLPPLSPEDMPTSLLDRRSFESFANMSIQMRKTDGIIVNTFEKLENKAFFALKNGICMSLETHKSHSSTPETRNPRVFCMGPLVSNGGGEHDNDDSGCMSWLDSQPSRTVVFLSFGSYGRFSKSQIREIALGLERSGQRFLWVMRNPYERSELILEELLPKGFLERTKERGMVMKNWAPQVKILSHDSVGGFVTHCGWNSVLEAVSWGVPMVSWPLYAEQRLNRVVMVEEMKVALALKENEDGFVRASELEERVRELMDSERGRGKEVRERVLSARYDAVAALSDGGSSRVELNDLVELWMQ

SEQ ID NO: 60133 - protein, 451 aa, Glycine max
  peptide (1)..(451): Ceres Seq. ID no. 15168423
MKGTIVLHPAMSRGHLVPMVELGKFIYTHHHQNLPIKILLPSPPNSTTLQYIAAVSATTPSITFHHLSPSQHLLHVLQTLISQSSKPKAFILDFFNHSAADVTRTLKIPTYYYFPNSASCVALFLYTPTIHYNTKKGFSSYSDTLRRIPGLPPLSPEDMPTSLLDRRSFESFANMSIQMRKTDGIIVNTFEKLENKAFFALKNGICMSLETHKSHSSTPETRNPRVFCMGPLVSNGGGEHDNDDSGCMSWLDSQPSRTVVFLSFGSYGRFSKSQIREIALGLERSGQRFLWVMRNPYERSELILEELLPKGFLERTKERGMVMKNWAPQVKILSHDSVGGFVTHCGWNSVLEAVSWGVPMVSWPLYAEQRLNRVVMVEEMKVALALKENEDGFVRASELEERVRELMDSERGRGKEVRERVLSARYDAVAALSDGGSSRVELNDLVELWMQ

SEQ ID NO: 60134 - protein, 441 aa, Glycine max
  peptide (1)..(441): Ceres Seq. ID no. 15168424
MSRGHLVPMVELGKFIYTHHHQNLPIKILLPSPPNSTTLQYIAAVSATTPSITFHHLSPSQHLLHVLQTLISQSSKPKAFILDFFNHSAADVTRTLKIPTYYYFPNSASCVALFLYTPTIHYNTKKGFSSYSDTLRRIPGLPPLSPEDMPTSLLDRRSFESFANMSIQMRKTDGIIVNTFEKLENKAFFALKNGICMSLETHKSHSSTPETRNPRVFCMGPLVSNGGGEHDNDDSGCMSWLDSQPSRTVVFLSFGSYGRFSKSQIREIALGLERSGQRFLWVMRNPYERSELILEELLPKGFLERTKERGMVMKNWAPQVKILSHDSVGGFVTHCGWNSVLEAVSWGVPMVSWPLYAEQRLNRVVMVEEMKVALALKENEDGFVRASELEERVRELMDSERGRGKEVRERVLSARYDAVAALSDGGSSRVELNDLVELWMQ

SEQ ID NO: 60135 - DNA, 1253 bp, Glycine max
  misc_feature (1)..(1253): Ceres Seq. ID no. 14316365
tccacaacctcgtatttctattctctcctctttctctctctatggcttccttgctttaatcgcaattttactcttttttttaatcggccgatcattcgattggatctgatttcatattaaaatcttatctttttgctaattgtcgctttcccaattcgtaattatctgaagtttggatttgggtgctttctttgcccctttatcgttgattgaatggttttgatccgggactgtgatttacgctctatcggggcagttgctggtcttgctgttgcaattgttttcacatggaggctcttgagatctccttctgggtctcaacggaggcaacagaaacggcaaggtccttcatctagtaatcctggagtcggtacaaattcaaattcaaatgcgtcggtggttccttcggatgcttgttcaccctcagatgattcaagggcgcaaaatgttgttgatgagttctttcagccagtcaagccaaccttggggcagatagttaggcagaagttgagtgaaggaagaaaggtaacttgtcgccttcttggagtgatccttgaggaaagtagtccagaggagctgcagaaacaagctactgtgaggtcctctgtgctagaagtactattggaagtaacaaaattttgtgatttatatctcatggaacgagttctggatgatgaaagcgagaaaagagttcttgtagcattggaagaagcaggggtattcacttcaggtggtctggtcaaggacaaggttctgttctgcagcacagagaatgggcggtcatcgtttgttcggcaattggaacctgattggcatattgattcaaatcctgaaattgtcactcagttggctaggtttatcaagtatcaacttcatgtatctccttacaaaactgaaagaactgctgcaaatgtgttcagtgctccatctctggaacagttctttggatccatatgaaactaaaaccactacaaatcagatgttattcataaatatctcctagtttatttctatgtgcatcttggtttccacattcaccatatgttttttttccagcttttctagatgtatgagaacaaggttagattttttttgaagttttaaggttctcactctaggtaggtgaaagaccttatgtgtatgatgctttgaagaagttttactattttcttttttcttctttgttttgaaatttgtgcattacattgtatcccatccagacattttaaactggcaaggtgacaatttttatt

SEQ ID NO: 60136 - protein, 247 aa, Glycine max
  peptide (1)..(247): Ceres Seq. ID no. 14316366
MVLIRDCDLRSIGAVAGLAVAIVFTWRLLRSPSGSQRRQQKRQGPSSSNPGVGTNSNSNASVVPSDACSPSDDSRAQNVVDEFFQPVKPTLGQIVRQKLSEGRKVTCRLLGVILEESSPEELQKQATVRSSVLEVLLEVTKFCDLYLMERVLDDESEKRVLVALEEAGVFTSGGLVKDKVLFCSTENGRSSFVRQLEPDWHIDSNPEIVTQLARFIKYQLHVSPYKTERTAANVFSAPSLEQFFGSI

SEQ ID NO: 60137 - DNA, 660 bp, Glycine max
  misc_feature (1)..(660): Ceres Seq. ID no. 15172800
atccccaaatgccccatccaaaacgagacactgaacactgatactctcttcactctcagtgctatcagcaaggaaaaccagagtacccaaagaaaaactaatgatttcactacgaccctataacacatgtcttgaaacaacaacgtttctcttcaacccttcaaagcttggaatctctagacaaacccaaacatgcatgatagcacaaaggaaagcaacaccacgtagaatagaagtcaaatgcagtggtgcagaaaataagggtgagagaacgtttttgacactggaggaagctggtttggttgagatatcaggcttgagcacacatgaacgctttctatgccgtttaacgatatcgtcgttgaacttgctaagagtgatatcggagcaagaagggtgtccaattgaggagctcaatgctgccaagatatgtgattggttcctcaaagataagctcaaaagagaacagaacttaggctctgcggttcttcaatgggatgataattccgactacaaattttaattttctatttactacttgtttctttcttaagtcacgagttttctaggattatgttaatcgagaaaggggtgacaccttttttcggtattggattctaaaattcttatggtaaatgattcggattgttgacgctgctc

SEQ ID NO: 60138 - protein, 140 aa, Glycine max
  peptide (1)..(140): Ceres Seq. ID no. 15172801
MISLRPYNTCLETTTFLFNPSKLGISRQTQTCMIAQRKATPRRIEVKCSGAENKGERTFLTLEEAGLVEISGLSTHERFLCRLTISSLNLLRVISEQEGCPIEELNAAKICDWFLKDKLKREQNLGSAVLQWDDNSDYKF

SEQ ID NO: 60139 - protein, 108 aa, Glycine max
  peptide (1)..(108): Ceres Seq. ID no. 15172802
MIAQRKATPRRIEVKCSGAENKGERTFLTLEEAGLVEISGLSTHERFLCRLTISSLNLLRVISEQEGCPIEELNAAKICDWFLKDKLKREQNLGSAVLQWDDNSDYKF

SEQ ID NO: 60140 - DNA, 888 bp, Glycine max
  misc_feature (1)..(888): Ceres Seq. ID no. 12612244
gtcgctggcaagtttcgatatcccacgcaacggtatctccttattcgtgttttttaaaaatttgagctggtttttttgtcgcgtttgtttataacgttggtgtttcttgactcgtgtactagtactagtactacccccaacacaacactcaccaaaccacgctccgattcaaattccaactccgaatcaaaccctagtacaacaatccaacgaaaccttcttcttctcaattctccgatcccatcctcaatggaaaacccggattcctctcttcctctctccatcaagaaggagaacgtcactcccattacctctaaaatcgcggaacttaatgaatcgagatcggagcttctgggcagagttcagagtttgaaacaggatttgcaaagttggaggtcgaagttagatacacaagtcaaggtctatcgcgacgagctgtcagaacttaagaaaacacttaatgttgaagtggaccaacttcgagcagaatttcaagatctgaggactacccttcagcagcaacaagaggatgtcactgctagcttaagaaacttggggcttcaggatgcctcagatgtcaagcatgctccgtcgcaggagacaaagattgaaaaaattgtcaaggaagaacaggtggtggtacctgaagaagataatagcagcaaagtagctgaaacttaaatagctttttaatttgagtatttgctgctcgctgtgtacaccctagagaagctgaatgactctgtattatggtagatatttgatgtgtttgattactactgttgggtataatgcgggacttaagaatcaatggtaaatttcccgttacccttcctcgggtataatcgatattaattgaacaaattatggtatgctttcatttcttcc

SEQ ID NO: 60141 - protein, 143 aa, Glycine max
  peptide (1)..(143): Ceres Seq. ID no. 12612245
MENPDSSLPLSIKKENVTPITSKIAELNESRSELLGRVQSLKQDLQSWRSKLDTQVKVYRDELSELKKTLNVEVDQLRAEFQDLRTTLQQQQEDVTASLRNLGLQDASDVKHAPSQETKIEKIVKEEQVVVPEEDNSSKVAET

SEQ ID NO: 60142 - DNA, 1017 bp, Glycine max
  misc_feature (1)..(1017): Ceres Seq. ID no. 15168314
actcttgtactgtcttagatctcgtttctctcttcgactcgtccacactttgtcgtcgttcccaatcgcaggccatatcgccgggggcattcccgccgtatcatccttgcctcttaccgaacactgaaacggggaattactcaggagagcttcgcaatcccactaacagctgctacccgcggttttggttttttcgctagtatcaatctattcttcatccctgttgatcaagaatgcaattctttggggggtctgagattagtccttcacctcctgctccgacagcttcaggaaacaatggccatatgatgtatgtgttcaataggaatggtgtgtgcctgctctatagggagtggaatcgtcccttgcggacattggatgcccagcaagaccaaaagttaatgtttggtctacttttctctctgaagtcattaactgccaagatggaccccactagtgctgttgagaaaggaaaccttggtatgccacagttacctggccaaggttgttcatttcacagtttccgcactaatacgtacaaacttagtttcatggaaagtccttctggaataaagatcatcttggtgactcatcctagaactggtgatctacgggaatccttaaagtatatctacaatttgtatgttgaatatgttgtcaagaatccgctctatacacctggatctcctattaggtgtgagctgttcaatacaacgttggaccagtatgtgagaggcatttcatagatgctgagttgtttccaatcaatagtgtggtttttacgccttgttttgcatggtgtatgtgagaggcattgcatagaagccgagttgtttccattcaacactattgatgacttgtgtggtgtaacgccttgtttgtcatggtggtcactacattgttgttagtcagaaacttttagggagttttcttaagcttgagctgtaccttttttgttacagataacactagtgatactccattttaattgaatcctacaatttatgttgccctgtt

SEQ ID NO: 60143 - protein, 170 aa, Glycine max
  peptide (1)..(170): Ceres Seq. ID no. 15168315
MQFFGGSEISPSPPAPTASGNNGHMMYVFNRNGVCLLYREWNRPLRTLDAQQDQKLMFGLLFSLKSLTAKMDPTSAVEKGNLGMPQLPGQGCSFHSFRTNTYKLSFMESPSGIKIILVTHPRTGDLRESLKYIYNLYVEYVVKNPLYTPGSPIRCELFNTTLDQYVRGIS

SEQ ID NO: 60144 - protein, 146 aa, Glycine max
  peptide (1)..(146): Ceres Seq. ID no. 15168316
MMYVFNRNGVCLLYREWNRPLRTLDAQQDQKLMFGLLFSLKSLTAKMDPTSAVEKGNLGMPQLPGQGCSFHSFRTNTYKLSFMESPSGIKIILVTHPRTGDLRESLKYIYNLYVEYVVKNPLYTPGSPIRCELFNTTLDQYVRGIS

SEQ ID NO: 60145 - protein, 145 aa, Glycine max
  peptide (1)..(145): Ceres Seq. ID no. 15168317
MYVFNRNGVCLLYREWNRPLRTLDAQQDQKLMFGLLFSLKSLTAKMDPTSAVEKGNLGMPQLPGQGCSFHSFRTNTYKLSFMESPSGIKIILVTHPRTGDLRESLKYIYNLYVEYVVKNPLYTPGSPIRCELFNTTLDQYVRGIS

SEQ ID NO: 60146 - DNA, 1058 bp, Glycine max
  misc_feature (1)..(1058): Ceres Seq. ID no. 15168326
accaaacaacacatcaacagagaagccatgaaaactctgatttgtgcaccaaacgcagccttcaatctctcaaaactttctccatggaaaccaaacttccaagcttatcatcatcaccctacacacaaactcaactaccccttcaccacattaaagccacgtgctagtgccaaaggcttttcttccacggggcctccaactgttgcaagtgataatgccaatactactaagaagcccatgagaagaaaaaacaatgatgatgatgatgatgagcttccccaggaagttatgtacaggctaataggtaggatcttgttctctgttggggtgccaatggggttgggtttggccttgttgggcctttttggagagctcaaggaaaagcatgtgtgggatgcaccactgtggttaccctttttgacaacactcttgacttttggagcttcctctcttgggattgcgtatggagcactttccacaagtttggatgctgaaaaggaaggttcttttcttggggtggaacagcttcagaaaaattgggtagagatgtggcaggagaaacaagaggatgaaaactaggcagcctaatcaaggagaaattattagctaggtagtctccgaccaccatcacgtgtttatggcccccaccaatctctacatggcacacatgacacgagtttttcaatttatatgaaagaattaatagcattgaattatgtgttatgtgatgattagttgagattatgatggtccccgaggatgtagtaattcctgcttaatagtgataattttgcaaatgccaaatgggttcatgatgttgcatgagataaattagttctgtacatcaacatacccaagtggtaattttgcaccatataagaagtcagaaccataattattgttgtagttgttattataagtggtgaaagatttgagtagtttgtactaggtcttaggtttaaactttgttgctatcattgcataaaagaaaattgctcttctaagtgaaaatagattgtagtattggtctaccttgccatacgacaattttattcaat

SEQ ID NO: 60147 - protein, 192 aa, Glycine max
  peptide (1)..(192): Ceres Seq. ID no. 15168327
TKQHINREAMKTLICAPNAAFNLSKLSPWKPNFQAYHHHPTHKLNYPFTTLKPRASAKGFSSTGPPTVASDNANTTKKPMRRKNNDDDDDELPQEVMYRLIGRILFSVGVPMGLGLALLGLFGELKEKHVWDAPLWLPFLTTLLTFGASSLGIAYGALSTSLDAEKEGSFLGVEQLQKNWVEMWQEKQEDEN

SEQ ID NO: 60148 - protein, 183 aa, Glycine max
  peptide (1)..(183): Ceres Seq. ID no. 15168328
MKTLICAPNAAFNLSKLSPWKPNFQAYHHHPTHKLNYPFTTLKPRASAKGFSSTGPPTVASDNANTTKKPMRRKNNDDDDDELPQEVMYRLIGRILFSVGVPMGLGLALLGLFGELKEKHVWDAPLWLPFLTTLLTFGASSLGIAYGALSTSLDAEKEGSFLGVEQLQKNWVEMWQEKQEDEN

SEQ ID NO: 60149 - protein, 113 aa, Glycine max
  peptide (1)..(113): Ceres Seq. ID no. 15168329
MRRKNNDDDDDELPQEVMYRLIGRILFSVGVPMGLGLALLGLFGELKEKHVWDAPLWLPFLTTLLTFGASSLGIAYGALSTSLDAEKEGSFLGVEQLQKNWVEMWQEKQEDEN

SEQ ID NO: 60150 - DNA, 809 bp, Glycine max
  misc_feature (1)..(809): Ceres Seq. ID no. 15175411
aatttctggtctatttggttacgatggaatatcaattccaccatagtttaggttcgaacgccgttgccaaaaaatagatacttgtttcttattcacgtagtattttaatacttagtcaaacacgatagcatgaacccaaaatttttgacaattgtttctcaacaagagagattttgattttagcagaaaagcaatggcaagtgcgttgggtagcagagttgaatctgttcgaaactctcacttactaagcttttcgctcaactccattagatccttgagttcttcttcttcatccgccgtttcttctgctcagaaccctaagactaagaaatcgaagcgaagaaagaagaacttgttcgatgtggctcagttcttacctaactggggaatcggctaccacatggccaagactcactggaatgaagtttcttacgaaatcactaaaatcaatctctacaaggatggaagacatggaaaagcatggggggttgcttttaaaaatggcttgccattagcagatgctccaaaaaaaattagtggagttcacaagcgctgttggagatacctaccaaatgtagtaaaagaattagaaagttcaacaaacttaatgagttccgcagacagtgactttgggtttttaggtcatcgacattagcccgtccatgtcttttcaatttggcttagttgttttcgataatggtatcgtttcttagtagatcatgtaatattccttacgcattcatgcaaggtgcttaattaagtttctttctttttgatttttaattagataaatgaactctcgaccatgc

SEQ ID NO: 60151 - protein, 153 aa, Glycine max
  peptide (1)..(153): Ceres Seq. ID no. 15175412
MASALGSRVESVRNSHLLSFSLNSIRSLSSSSSSAVSSAQNPKTKKSKRRKKNLFDVAQFLPNWGIGYHMAKTHWNEVSYEITKINLYKDGRHGKAWGVAFKNGLPLADAPKKISGVHKRCWRYLPNVVKELESSTNLMSSADSDFGFLGHRH

SEQ ID NO: 60152 - protein, 84 aa, Glycine max
  peptide (1)..(84): Ceres Seq. ID no. 15175413
MAKTHWNEVSYEITKINLYKDGRHGKAWGVAFKNGLPLADAPKKISGVHKRCWRYLPNVVKELESSTNLMSSADSDFGFLGHRH

SEQ ID NO: 60153 - DNA, 805 bp, Glycine max
  misc_feature (1)..(805): Ceres Seq. ID no. 13594418
agaaaatgtaaagatttcttaatggagaagtgagcggtgagaggaaacagaagagagaagagcaatcggtgagtgaatggaatggattcaggtcctccggcgaacgatttgtgttcagtgtgccatggcaactttcatattccatgccaagccaattgttctcactggttttgcggaaattgcataatgcttgtgtggcagcacggatcagtgggttgttcatgcaagtgcccactgtgtcgtcgagccatcagtctcttagtccccacagaagagtctctgaggcaacagcaggaccccgaagtttcccagattctgtcaaagattcatgcctataaccgtttcttcggtggccaacccaccactctctatcagagactgcgagatcttccctttctcttgcacaggctgctcagggaattcctccaccctcacagatcccttcctcttctcattcgcgctcgcgtctttgttgttatgatagcgagtgttatatacctcttcagccctattgacatcattcctgaagggatattaggagtagttggtttcttagatgatctcctaattgtgctcatctgcttcctacatgttgctgccctttatagatcagtactctacctccgtcatgggggttcctgaacatgttctacaattttacaggtaaaatgagatgatgatgcctagataggtgccggatatggatagtgggcattattctttcattttcaaaattgaactactttgttttctatgtacatagacaagttcaatttcaaatagtggaattagtaatggaaattac

SEQ ID NO: 60154 - protein, 186 aa, Glycine max
  peptide (1)..(186): Ceres Seq. ID no. 13594419
MDSGPPANDLCSVCHGNFHIPCQANCSHWFCGNCIMLVWQHGSVGCSCKCPLCRRAISLLVPTEESLRQQQDPEVSQILSKIHAYNRFFGGQPTTLYQRLRDLPFLLHRLLREFLHPHRSLPLLIRARVFVVMIASVIYLFSPIDIIPEGILGVVGFLDDLLIVLICFLHVAALYRSVLYLRHGGS

SEQ ID NO: 60155 - protein, 151 aa, Glycine max
  peptide (1)..(151): Ceres Seq. ID no. 13594420
MLVWQHGSVGCSCKCPLCRRAISLLVPTEESLRQQQDPEVSQILSKIHAYNRFFGGQPTTLYQRLRDLPFLLHRLLREFLHPHRSLPLLIRARVFVVMIASVIYLFSPIDIIPEGILGVVGFLDDLLIVLICFLHVAALYRSVLYLRHGGS

SEQ ID NO: 60156 - DNA, 876 bp, Glycine max
  misc_feature (1)..(876): Ceres Seq. ID no. 13594355
agtttatcaatggcacttctccacccaaatcttcttcccactttcaattccaacactcttacctttccttccatcaaactcaaaccctcactctcgcacgtgccttctccaacccccacacgcttcagtctctctgtttccgcggcggaaaccaccgcttttgccgcccctcccactccccaacctgagaagcttggagttgtagttaagccaacggagaagccgagacttgtgttgaagttcatatggatggagaagaacattggaattgcgcttgaccagatggtaccgggccatggcaccattcctctgagcccatattacttttggccccgaaaagatgcctgggaagagctcaaggagttgcttgagaacaagccttggcatatgccttctcccatcagtggaggccaaactgtagccagtattttggtcaggcttcttatagccttggtaaggaaagttggggttggagctggaccgagcgttgggttgcggcacgtccttgggaagttcgggttcgaggtcagaccaccaaaacaacaaaactcaacggccatgggcaggtgcaaaaaaccaaattagacaagatgaaccaaaatgaaagcaaagtagccttggctaaacctacactatcaaacgggaaggaaaggaaaacggtacttcagggctgtcaaagaacaatgtatccaaatagcccattctaatttgatggtttatggtttcttcttgcacttctttgggggtttattttccatattttgcttggtgagaatctaccttttggtgtgtacgttccactaggagagacttcacttattgtctgcttttgcatggtgcatatgattatgaatatgaattccctagttttggttg

SEQ ID NO: 60157 - protein, 194 aa, Glycine max
  peptide (1)..(194): Ceres Seq. ID no. 13594356
SLSMALLHPNLLPTFNSNTLTFPSIKLKPSLSHVPSPTPTRFSLSVSAAETTAFAAPPTPQPEKLGVVVKPTEKPRLVLKFIWMEKNIGIALDQMVPGHGTIPLSPYYFWPRKDAWEELKELLENKPWHMPSPISGGQTVASILVRLLIALVRKVGVGAGPSVGLRHVLGKFGFEVRPPKQQNSTAMGRCKKPN

SEQ ID NO: 60158 - protein, 191 aa, Glycine max
  peptide (1)..(191): Ceres Seq. ID no. 13594357
MALLHPNLLPTFNSNTLTFPSIKLKPSLSHVPSPTPTRFSLSVSAAETTAFAAPPTPQPEKLGVVVKPTEKPRLVLKFIWMEKNIGIALDQMVPGHGTIPLSPYYFWPRKDAWEELKELLENKPWHMPSPISGGQTVASILVRLLIALVRKVGVGAGPSVGLRHVLGKFGFEVRPPKQQNSTAMGRCKKPN

SEQ ID NO: 60159 - protein, 111 aa, Glycine max
  peptide (1)..(111): Ceres Seq. ID no. 13594358
MEKNIGIALDQMVPGHGTIPLSPYYFWPRKDAWEELKELLENKPWHMPSPISGGQTVASILVRLLIALVRKVGVGAGPSVGLRHVLGKFGFEVRPPKQQNSTAMGRCKKPN

SEQ ID NO: 60160 - DNA, 586 bp, Glycine max
  misc_feature (1)..(586): Ceres Seq. ID no. 13638406
acatcctaatcgaaaaactttacaaccttttaagcaactccttttgctttattgatgtattcttcattttaagcaccatcatcttcctattttgttttccaatattgctgtttgttgtggtaaatttttctgtagttcatcatcatgctagaaggcaaggctgtgattggtgagactgacatgcttcagaccatgcagcaagatgctatggatttagcatccaaagcactcgatttctttgatgtcactgaagccattaagattgctcgatttataaagaaggagtttgataggatgcatggacctggttggcagtgtattgtaggcactgattttggttcgtttgtgactcactgttgtggctgtttcatctatttctgcttaggcaacttggcaattttgctattcagaggctcggctgctccagaggcacatgaaaatcggttctcagcactagatgcagccaaagcataatttcattgcctaattaattttccctctcttttgacttttctatatatatttttgttcattccatgtaatgtaatgataatgtagaaagaaatggaaggttttagagaaaagc

SEQ ID NO: 60161 - protein, 109 aa, Glycine max
  peptide (1)..(109): Ceres Seq. ID no. 13638407
MLEGKAVIGETDMLQTMQQDAMDLASKALDFFDVTEAIKIARFIKKEFDRMHGPGWQCIVGTDFGSFVTHCCGCFIYFCLGNLAILLFRGSAAPEAHENRFSALDAAKA

SEQ ID NO: 60162 - protein, 97 aa, Glycine max
  peptide (1)..(97): Ceres Seq. ID no. 13638408
MLQTMQQDAMDLASKALDFFDVTEAIKIARFIKKEFDRMHGPGWQCIVGTDFGSFVTHCCGCFIYFCLGNLAILLFRGSAAPEAHENRFSALDAAKA

SEQ ID NO: 60163 - protein, 93 aa, Glycine max
  peptide (1)..(93): Ceres Seq. ID no. 13638409
MQQDAMDLASKALDFFDVTEAIKIARFIKKEFDRMHGPGWQCIVGTDFGSFVTHCCGCFIYFCLGNLAILLFRGSAAPEAHENRFSALDAAKA

SEQ ID NO: 60164 - DNA, 732 bp, Glycine max
  misc_feature (1)..(732): Ceres Seq. ID no. 13594425
acacaattaagctcaaatcaaaagtccctttgcatactatctatcacttatcagttatcacaaagcaaattcattaagtcttttgccatggcctccaacagctgcttcatcttggcttttttcattgctatttccttctcatgcatggattttggcctagcagctcgccatcttatgcaaacaagtactgcaccaaatttgcctttgccaaaaccaacattgccacctttgccttcacttccaacactgcctcagggcaatgttccacctttgcctacaatcccatctcttccaaccattccaactgttccacaggtcactcttccaccacttgctgccactttacttccaaacttccccacagtcccaaccactattccttccttccccttcttctccccaccaccttcagccaccactccctaaatgaagctactctgcttattggatacataggcactcgtatccttggagtttggttctggctttcagtgatcgttggctgcatttcgtgttgtttttatgttatacatgtgatggtgatatatattgtacgttgtccatttattgccggggaatatttatagtaatctttcattttcctttgttcttccatcttgtattgtatggataggattattgttttttcttcctcctccttacttcatgtacttggggatcatctattgttataggatatacgctatatataataaataatccatgttccct

SEQ ID NO: 60165 - protein, 148 aa, Glycine max
  peptide (1)..(148): Ceres Seq. ID no. 13594426
MHGFWPSSSPSYANKYCTKFAFAKTNIATFAFTSNTASGQCSTFAYNPISSNHSNCSTGHSSTTCCHFTSKLPHSPNHYSFLPLLLPTTFSHHSLNEATLLIGYIGTRILGVWFWLSVIVGCISCCFYVIHVMVIYIVRCPFIAGEYL

SEQ ID NO: 60166 - protein, 141 aa, Glycine max
  peptide (1)..(141): Ceres Seq. ID no. 13594427
TQLSSNQKSLCILSITYQLSQSKFIKSFAMASNSCFILAFFIAISFSCMDFGLAARHLMQTSTAPNLPLPKPTLPPLPSLPTLPQGNVPPLPTIPSLPTIPTVPQVTLPPLAATLLPNFPTVPTTIPSFPFFSPPPSATTP

SEQ ID NO: 60167 - protein, 112 aa, Glycine max
  peptide (1)..(112): Ceres Seq. ID no. 13594428
MASNSCFILAFFIAISFSCMDFGLAARHLMQTSTAPNLPLPKPTLPPLPSLPTLPQGNVPPLPTIPSLPTIPTVPQVTLPPLAATLLPNFPTVPTTIPSFPFFSPPPSATTP

SEQ ID NO: 60168 - DNA, 941 bp, Glycine max
  misc_feature (1)..(941): Ceres Seq. ID no. 12782126
gcatccgaatgtttcgctcctcgtatcctcctcatccttttatgcgtgtcttcccccaacgaaaccagcgagaccaaacgtggtaacgctttgaatctttgaattcattcaaagatcccccttctgtctccctctctacgcatatcagggcactatggctgccacggtgaaacaaatgtctttgatcgtgtcactgttcggcgtggtgtccttcattttgggtgttgttgctgaaaacaagaagcctgcggcaggaacacccgtgcctggtttggatggtgtctctgtcacctgcaagtacccagctgatccaactgttgcattggggtatctttctacagcatttcttgttgcatccactgtgactggatatctgtctttgttttacccttacaaaggaaagtctattccacaaggggttctgtttaagcacaccactttcacagtgttcttcaacatttctttgttcaccactggattagctgcagctatgctgttatggccaacaatcaccgaacacattcacctgacacgcaatgtgcaccgcaatatcaactatgaatgtcctacagctaaaactggtctacttggaggtggtgcctttctatcacttgattcatctctcctttggttgattgcccttatgctagctgacaatgctcgcgaggacttctttgaagaagaaggagaagatggtgacaagggtgaatttggcacagcctcctctgatgcttattatgatgctgattcaggaccgaaggctagttcctgaagtatgctacaagtagaaataagtgttgcacctggtatttctgtagtttccttttaatcacgctgaacaattccgtgaaataatgaatgtacatatatttaaaatggttgttctcggtgaacatttattgtgcttaagcactactgcagaaaaaaacatagttgtttgc

SEQ ID NO: 60169 - protein, 205 aa, Glycine max
  peptide (1)..(205): Ceres Seq. ID no. 12782127
MAATVKQMSLIVSLFGVVSFILGVVAENKKPAAGTPVPGLDGVSVTCKYPADPTVALGYLSTAFLVASTVTGYLSLFYPYKGKSIPQGVLFKHTTFTVFFNISLFTTGLAAAMLLWPTITEHIHLTRNVHRNINYECPTAKTGLLGGGAFLSLDSSLLWLIALMLADNAREDFFEEEGEDGDKGEFGTASSDAYYDADSGPKASS

SEQ ID NO: 60170 - protein, 198 aa, Glycine max
  peptide (1)..(198): Ceres Seq. ID no. 12782128
MSLIVSLFGVVSFILGVVAENKKPAAGTPVPGLDGVSVTCKYPADPTVALGYLSTAFLVASTVTGYLSLFYPYKGKSIPQGVLFKHTTFTVFFNISLFTTGLAAAMLLWPTITEHIHLTRNVHRNINYECPTAKTGLLGGGAFLSLDSSLLWLIALMLADNAREDFFEEEGEDGDKGEFGTASSDAYYDADSGPKASS

SEQ ID NO: 60171 - DNA, 1231 bp, Glycine max
  misc_feature (1)..(1231): Ceres Seq. ID no. 15177031
aaaaaagttgaagaatatgagcagcagtgcagggaagttggtgtgtgtcaccggtgctgccggttatattgcttcatggattgtcaagttcctacttgaacgtggttacactgtcagggccactgttcgaaacccaaatgatcacacgaaggtagaacatttgctaaaacttgaaggtgcaaaggagagactgcacctttttaaggcagatcttttgggtgaaaattcttttgactccattgttgagggctgtgatggcgtctttcatactgcttctccttttattatcaacgtcaaagacccacaggctgacctacttgacccagcagtgaagggaactcttaacgttcttaaatcatgtgtaaaatcgccatctgtgaaacgagtcatcttaacatcttctgtggctgcagttgcatataataaaaggcctaaaagtcctgaagttgtagttgatgaaacctggtggtctgatccagattactgtaaggaattaaagctgtggtatttactttcaaagactttggctgaagatgctgcctggaaatttgccaaagaaaacgaccttgacttggttgttgttaacccagcaatggttgtagggcctcttttgcaagcagagcttaacactagtgctgctattattttaaacctaataaatggttcagaaactttttcaaatgatacatatggatggatcaatgtgaaagatgttgcaaacgcccatattcaggcatatgagattgcttcagctagtggaagatattgtttagttgagagagtggcacactactctgaactcgccaggattttacgtgatcagtacccgacatatcaaattccagaaaagtctgcagacgataagccttatgtaccaacatttcaggtttccaaagaaaaggcaaagaccttggggattgaatttattcctttggaagtgagtcttagagagacagtggaaactttgaaagaaaagaactttgccaacttttagtctctgatatctctgcttgatcaggagtgaacacgttgagaatctcaacggtgtttcgtttgtggttctggttttagaatctcattgcttgaaaataaactattgtactgaaatgtcaagcttgtgtgttgtaataaaacaagattaattgttggttttatttcggtttgtactcatgaaggaaaccaacgtgtggtataaaaagataataattaagtatcaggctatttctagtcc

SEQ ID NO: 60172 - protein, 330 aa, Glycine max
  peptide (1)..(330): Ceres Seq. ID no. 15177032
KKLKNMSSSAGKLVCVTGAAGYIASWIVKFLLERGYTVRATVRNPNDHTKVEHLLKLEGAKERLHLFKADLLGENSFDSIVEGCDGVFHTASPFIINVKDPQADLLDPAVKGTLNVLKSCVKSPSVKRVILTSSVAAVAYNKRPKSPEVVVDETWWSDPDYCKELKLWYLLSKTLAEDAAWKFAKENDLDLVVVNPAMVVGPLLQAELNTSAAIILNLINGSETFSNDTYGWINVKDVANAHIQAYEIASASGRYCLVERVAHYSELARILRDQYPTYQIPEKSADDKPYVPTFQVSKEKAKTLGIEFIPLEVSLRETVETLKEKNFANF

SEQ ID NO: 60173 - protein, 325 aa, Glycine max
  peptide (1)..(325): Ceres Seq. ID no. 15177033
MSSSAGKLVCVTGAAGYIASWIVKFLLERGYTVRATVRNPNDHTKVEHLLKLEGAKERLHLFKADLLGENSFDSIVEGCDGVFHTASPFIINVKDPQADLLDPAVKGTLNVLKSCVKSPSVKRVILTSSVAAVAYNKRPKSPEVVVDETWWSDPDYCKELKLWYLLSKTLAEDAAWKFAKENDLDLVVVNPAMVVGPLLQAELNTSAAIILNLINGSETFSNDTYGWINVKDVANAHIQAYEIASASGRYCLVERVAHYSELARILRDQYPTYQIPEKSADDKPYVPTFQVSKEKAKTLGIEFIPLEVSLRETVETLKEKNFANF

SEQ ID NO: 60174 - DNA, 625 bp, Glycine max
  misc_feature (1)..(625): Ceres Seq. ID no. 15172828
aatttatctttggggaggcgggccgggattggagacagagcccacaaggcaacaacaaagtgcgcgtgagaaatcaacaagcggtgcttgccgagaagagagagagagagatggcggcgtcggcggcgacggcaacggcggcggcggtgggggcgggggaggtgatctccgtccacaccctggagcagtggaccatgcagatcgaggaggccaacgccgccaagaagctggtggtggttgacttcactgcatcatggtgtggaccatgccgcatcatggctccagttttcgctgatctcgccaagaagttcccaaatgctgttttcctcaaggtcgatgtcgatgaactgaagcccattgcggagcaattcagcgttgaggccatgccaaccttcctgttcattaaggaaggagatgtcaaggacagggttgtgggagctatcaaggaggaactgacgaacaaggttgggctacacgcggcggcccagtaatcacctagcggagtagtattcgcctaaataaaattgtggctcaagaagcggtgcctctaatggcaccttatatcctgtgtactgcttgttacttgttggttggatgatggtgaatcaagtgtgactttattcgg

SEQ ID NO: 60175 - protein, 162 aa, Glycine max
  peptide (1)..(162): Ceres Seq. ID no. 15172829
FIFGEAGRDWRQSPQGNNKVRVRNQQAVLAEKREREMAASAATATAAAVGAGEVISVHTLEQWTMQIEEANAAKKLVVVDFTASWCGPCRIMAPVFADLAKKFPNAVFLKVDVDELKPIAEQFSVEAMPTFLFIKEGDVKDRVVGAIKEELTNKVGLHAAAQ

SEQ ID NO: 60176 - protein, 126 aa, Glycine max
  peptide (1)..(126): Ceres Seq. ID no. 15172830
MAASAATATAAAVGAGEVISVHTLEQWTMQIEEANAAKKLVVVDFTASWCGPCRIMAPVFADLAKKFPNAVFLKVDVDELKPIAEQFSVEAMPTFLFIKEGDVKDRVVGAIKEELTNKVGLHAAAQ

SEQ ID NO: 60177 - protein, 98 aa, Glycine max
  peptide (1)..(98): Ceres Seq. ID no. 15172831
MQIEEANAAKKLVVVDFTASWCGPCRIMAPVFADLAKKFPNAVFLKVDVDELKPIAEQFSVEAMPTFLFIKEGDVKDRVVGAIKEELTNKVGLHAAAQ

SEQ ID NO: 60178 - DNA, 908 bp, Glycine max
  misc_feature (1)..(908): Ceres Seq. ID no. 13638318
agaaaatttgaacatatgttccttttttgttacaacgttgttgtttccaacggtacaacggtagatgatgggaacgctatctacgcaatttcgttccatcaaacgcccaaatccaaaccctaaactatccaaatcgtcatctcctacaaaatcagaaattaaattcatcgctaaaccaaaaccaaaatcagagtcagagtcagagtcatggtctgtttatctcatcctctccaccaaccatcctatcaaaacctacgttggaattacaaacaatttccctcgccgtttgaagcagcataacggtgaacttaaaggtggtgcaaaggcatcccgtgctggaagaccttggatttgtgcatgcataatttgtggttttacagaccgaagtgaagctagtgtatttgaatcaaaatggaaaactttctcaaggagagctccccgcaaaaatcaaaatgacaatctctccaagcaaagtgaagattcatcattaccactgctgcgacacagacaagcggctctgaatagagtgaaaggttcactcgactgcgctcacttagaaattatttggcatttggatccattgtgatccaactgccacaatgtatgtgttttgattatgtaattgtaataagttcaaatagcaaaacataggccataagagaaatattaagaacacattttgtgttattagttaaaatttattgaaaattataaaattataagtggatttcattaagtaaaaagtgagatcctccaaattttataattttttataataaagaatattaaaaagagtgcgtagctagcatttttctatatttgatagtactagcaaattgtaccagacattgattggttcttgtagtaaggtctttgtatagtatataagtgacgaaaggttataattt

SEQ ID NO: 60179 - protein, 173 aa, Glycine max
  peptide (1)..(173): Ceres Seq. ID no. 13638319
MMGTLSTQFRSIKRPNPNPKLSKSSSPTKSEIKFIAKPKPKSESESESWSVYLILSTNHPIKTYVGITNNFPRRLKQHNGELKGGAKASRAGRPWICACIICGFTDRSEASVFESKWKTFSRRAPRKNQNDNLSKQSEDSSLPLLRHRQAALNRVKGSLDCAHLEIIWHLDPL

SEQ ID NO: 60180 - protein, 172 aa, Glycine max
  peptide (1)..(172): Ceres Seq. ID no. 13638320
MGTLSTQFRSIKRPNPNPKLSKSSSPTKSEIKFIAKPKPKSESESESWSVYLILSTNHPIKTYVGITNNFPRRLKQHNGELKGGAKASRAGRPWICACIICGFTDRSEASVFESKWKTFSRRAPRKNQNDNLSKQSEDSSLPLLRHRQAALNRVKGSLDCAHLEIIWHLDPL

SEQ ID NO: 60181 - DNA, 1255 bp, Glycine max
  misc_feature (1)..(1255): Ceres Seq. ID no. 13594430
aaaaattgaataagaccataaaagttcgacatagttggtgttcactgctttttctcttttttcccgtggatcatcccaaagctctctgctttttggtggcacagatcccttgctgggtttaagttcctcactttggattctcccccaaatgggttcctttgatcgattgtttaaccgccaaagaggtcttcatgagatccttggtggtggtcaagttgcagatttaattctgtggaggcgtaagaaccttactgtggggatattgttggtcacactaggtgtttgggttgtgtttgagagatctggttatactcttctgtctcttatttctaatgttctccttctcctcattgtcattctctttctttgggccaaatcagcagatattctcaacagacctgctccacctctaccacagctgcgtctctcagaggaaatggcaaatgaagcgaagacttttatctgcacaagagttaatgatctgttgtcagtttctcaagatattgctctcggaaaagactcgaggctgtttctcaaagtagctgcatacctctggttaatttctattattggtggcttaactgatttccttaccctggcatacaccagtcttcttttggttcttacagtaccagcaatctatgaaagatatgaagattacatagatatgtatatcttgaagggttacagaaaattatgcctattgcatgttaaaataaatgagggatatgtcagcaaagtccacaactggattctggagaagaaaaagctaagctgagtttgtgtttttcgcattcattttgataagttctcttattattcttctaaagtatttcttacaggatcactggtgagattgtaattgtgagtttgagggacaacaatagtgatcttctccccccaaaaatgagtgtcttcctttttgcattttccatcttcaatgatggatcccttttttggtacataatgatgaaactcttacgttggactggttcatgtagtccactaagtatttaagatttcttcttaggttaacaaagaaaaaatataggtgtcactacctatacacaatataaaatgtgtttgccaagtatttgtacatgtaaataatataggtacaattattattnnnnaaaaaaaaaaaaaaaaaaaaaaaaaaaaaaaaaaaaaaaaaaaaaaaaaaaatttaaaaaaaaaaaaaaaagggtttttcgttcccgccaccctcgggggggggcccggaccccatttcccc

SEQ ID NO: 60182 - protein, 209 aa, Glycine max
  peptide (1)..(209): Ceres Seq. ID no. 15221352
MGSFDRLFNRQRGLHEILGGGQVADLILWRRKNLTVGILLVTLGVWVVFERSGYTLLSLISNVLLLLIVILFLWAKSADILNRPAPPLPQLRLSEEMANEAKTFICTRVNDLLSVSQDIALGKDSRLFLKVAAYLWLISIIGGLTDFLTLAYTSLLLVLTVPAIYERYEDYIDMYILKGYRKLCLLHVKINEGYVSKVHNWILEKKKLS

SEQ ID NO: 60183 - protein, 113 aa, Glycine max
  peptide (1)..(113): Ceres Seq. ID no. 15221353
MANEAKTFICTRVNDLLSVSQDIALGKDSRLFLKVAAYLWLISIIGGLTDFLTLAYTSLLLVLTVPAIYERYEDYIDMYILKGYRKLCLLHVKINEGYVSKVHNWILEKKKLS

SEQ ID NO: 60184 - DNA, 1455 bp, Glycine max
  misc_feature (1)..(1455): Ceres Seq. ID no. 13639636
tcctaatcgaaaaaaaacctaatagtaatagtagcaagtttctttcttttttgctctctctctctccatggacttccatctgaagcaatggagaaaccagcacgagtcagaggaacaacattctacaaagatgccaaaacttctccctgaatcccatcaacaacaacagccatcagcctctgcactccctttgtttgtacctgaacccaacagcagcaaagtcagcaccctgtcagattcaacattagcttctgctacaatgacttctaccaccactaacagattatttcccaggatggggagctacttcagcttgtctcagtggcaggagcttgagttgcaggctttgatattcaggtacatgttggctggtgctgctgttcctcctgaactccttcaaccaatcaagaaaagccttcttcattctccacactattacctccatcaccctctccaacattaccaaccttctgctttgttgcaatcagggtattggggtagaggagcgatggatccggagccagggcggtgccggagaaccgacggcaagaagtggcgctgttcgagggacgtggtggctgggcaaaagtactgtgagcgccacatgcaccgtggaagaaaccgttcaagaaagcctgtggaactacccacaccaactagtgctattaacaattgtggtgtaactggagttggatccctaggaccaggtgcttcatcatcttccatttgttcaccacccttagcttctgcttcattcaaatctccttttgatcttcatcttgatgaacgttcctctgggaccaagaatgaagacgaagatcatgtgggtggggatggcagatcaggtggaggtggtggccatatgctgaggcatttcttcgatgattggccacgatcactccaagactctgacaacgttgaaaacaatgctgctgctggccgtagcctctctatttcaatgcccggtgcttcctcggatgtgtcattgaaattgtccacgggctatggagaggactcgggcccaggaaatgagaatgtaagcctcgagccagagcagctgcagttgaattgggccggaggatgggcctcgtctaatcaagtggcttcgatgggaggtccacttgctgaggcactcagatcatctacttcaacctcatctcccactagtgttttgcatcgtcacttgcctcgtggatctgagaccagctttattagcacctgaatttagttatagtgggtgccccgattatttttctgtttcttgtttcgaggtttaagttccacttttggagcattcttggaccacggttatgttcttttcaaactgtgtagactacttttgtttctaagtgggcgatgaaaggatatggtcggtccctggttggattaattcgaagtaatactaaattgtcaattaacaatcacattttctttatgaaagtactttagttcctc

SEQ ID NO: 60185 - protein, 384 aa, Glycine max
  peptide (1)..(384): Ceres Seq. ID no. 13639637
MDFHLKQWRNQHESEEQHSTKMPKLLPESHQQQQPSASALPLFVPEPNSSKVSTLSDSTLASATMTSTTTNRLFPRMGSYFSLSQWQELELQALIFRYMLAGAAVPPELLQPIKKSLLHSPHYYLHHPLQHYQPSALLQSGYWGRGAMDPEPGRCRRTDGKKWRCSRDVVAGQKYCERHMHRGRNRSRKPVELPTPTSAINNCGVTGVGSLGPGASSSSICSPPLASASFKSPFDLHLDERSSGTKNEDEDHVGGDGRSGGGGGHMLRHFFDDWPRSLQDSDNVENNAAAGRSLSISMPGASSDVSLKLSTGYGEDSGPGNENVSLEPEQLQLNWAGGWASSNQVASMGGPLAEALRSSTSTSSPTSVLHRHLPRGSETSFIST

SEQ ID NO: 60186 - protein, 363 aa, Glycine max
  peptide (1)..(363): Ceres Seq. ID no. 13639638
MPKLLPESHQQQQPSASALPLFVPEPNSSKVSTLSDSTLASATMTSTTTNRLFPRMGSYFSLSQWQELELQALIFRYMLAGAAVPPELLQPIKKSLLHSPHYYLHHPLQHYQPSALLQSGYWGRGAMDPEPGRCRRTDGKKWRCSRDVVAGQKYCERHMHRGRNRSRKPVELPTPTSAINNCGVTGVGSLGPGASSSSICSPPLASASFKSPFDLHLDERSSGTKNEDEDHVGGDGRSGGGGGHMLRHFFDDWPRSLQDSDNVENNAAAGRSLSISMPGASSDVSLKLSTGYGEDSGPGNENVSLEPEQLQLNWAGGWASSNQVASMGGPLAEALRSSTSTSSPTSVLHRHLPRGSETSFIST

SEQ ID NO: 60187 - protein, 320 aa, Glycine max
  peptide (1)..(320): Ceres Seq. ID no. 13639639
MTSTTTNRLFPRMGSYFSLSQWQELELQALIFRYMLAGAAVPPELLQPIKKSLLHSPHYYLHHPLQHYQPSALLQSGYWGRGAMDPEPGRCRRTDGKKWRCSRDVVAGQKYCERHMHRGRNRSRKPVELPTPTSAINNCGVTGVGSLGPGASSSSICSPPLASASFKSPFDLHLDERSSGTKNEDEDHVGGDGRSGGGGGHMLRHFFDDWPRSLQDSDNVENNAAAGRSLSISMPGASSDVSLKLSTGYGEDSGPGNENVSLEPEQLQLNWAGGWASSNQVASMGGPLAEALRSSTSTSSPTSVLHRHLPRGSETSFIST

SEQ ID NO: 60188 - DNA, 1326 bp, Glycine max
  misc_feature (1)..(1326): Ceres Seq. ID no. 13528075
catggaggaccacaccccatttctctagcactgattaaacaataatctttgatttttttggtcctccggtcatccttgatgtgttcacaggaggtatgctctggtattttatatgacttaattagttcattttaaatgaatttaatttaatttaccaaattcagtaatgaaattgaatcagctaaattcaaccatgtatgaggtttcttgtagaattagcatgcagccaaccatatgcttcttagaatcttagtgacaacctgtagatgaagtgtgtcatatctttatcatttgttgtttctgttaactgatgatgatctactctgtaagttgtaactgtaatatagtaacattccttatttcatgttcctcttccaaccctaattgctttatctttctggtcatccagtggctagtatagaagaaccataagcactgagggaaaaagtgattagtactttagccaacaaattaaaaatggctgtcaccaaggtctacattgtgtattactccttatatggacatgtagacaccatggctagagaagtacacagaggggctgctacagttgaaggtgttgaagcaacactttggagggtacctgagatgctttcggaactaatattggataagttgaaggcccctcctaaaccaaatgatgtaccagacataatgccagaacaacttgtggaggctgatggtttgatatttggttttccttctcgttttgggatgatgccgagccagctcaaggccttctttgatgcaactagtgagctatgggcatcccaagcacttgccggcaaacctgctggaatcttctggagtactggtttttatggtggaggccaagaactatcagcattgacagctataactcaattagctcatcatggtatgctttttgttcctcttggatacacctttggaagtggcatgtttgagatagatgaggtaaaaggaggatctgcatatggtgctggaacttttgcaggagatggatctcgtcaacctacagaactagaactgcagcaggcattttaccagggtaaatatcttgccgaagtaacaaaaaagctgaaaagctaacttctctgcctaacaaatacatgacaggatactatgaactgtgatgtgctacattatctataacatttgattgaagactcgatgattatttttaccggtaagacaagatagaaagacctcatgtggcttttctttttctgggttctgttgttgcaacaatgtatatcttctgttatctctttcagaaaactctcaaattattccaatgaaatgataaacaagatattcagtatttcc

SEQ ID NO: 60189 - protein, 203 aa, Glycine max
  peptide (1)..(203): Ceres Seq. ID no. 13528076
MAVTKVYIVYYSLYGHVDTMAREVHRGAATVEGVEATLWRVPEMLSELILDKLKAPPKPNDVPDIMPEQLVEADGLIFGFPSRFGMMPSQLKAFFDATSELWASQALAGKPAGIFWSTGFYGGGQELSALTAITQLAHHGMLFVPLGYTFGSGMFEIDEVKGGSAYGAGTFAGDGSRQPTELELQQAFYQGKYLAEVTKKLKS

SEQ ID NO: 60190 - protein, 184 aa, Glycine max
  peptide (1)..(184): Ceres Seq. ID no. 13528077
MAREVHRGAATVEGVEATLWRVPEMLSELILDKLKAPPKPNDVPDIMPEQLVEADGLIFGFPSRFGMMPSQLKAFFDATSELWASQALAGKPAGIFWSTGFYGGGQELSALTAITQLAHHGMLFVPLGYTFGSGMFEIDEVKGGSAYGAGTFAGDGSRQPTELELQQAFYQGKYLAEVTKKLKS

SEQ ID NO: 60191 - protein, 160 aa, Glycine max
  peptide (1)..(160): Ceres Seq. ID no. 13528078
MLSELILDKLKAPPKPNDVPDIMPEQLVEADGLIFGFPSRFGMMPSQLKAFFDATSELWASQALAGKPAGIFWSTGFYGGGQELSALTAITQLAHHGMLFVPLGYTFGSGMFEIDEVKGGSAYGAGTFAGDGSRQPTELELQQAFYQGKYLAEVTKKLKS

SEQ ID NO: 60192 - DNA, 949 bp, Glycine max
  misc_feature (1)..(949): Ceres Seq. ID no. 12608620
accccattttggaaaataaccttatttcttggtctgcaaaacatcatggcagaagcgagtttctttgttggagtcataggtaacatcatctcaattctcatgtttctttctcctgtacctacgttttggaaaataaagaagcacggatccaccgaagatttctcaagccttccttatatttgcacattgcttaattgctccctctggacttactatggaatcataaaagctggagagtaccttgtggccactgttaatggctttggcattctcatggagacaatctacattattctatttctcatatatgcaccaaaagggataaggggtaggactgctattttggctttgattttggatgtggtaatcttgacggcaataataattattactcaattagcattagaaggagagactcgtagtggtgctgttggtgttatgggagcaggcttaaatattgttatgtattcctcacctctgtcggtcatgaaaacagtggtgactacaaaaagcgtggagtatatgccattcttgctttcttttttcttctttttcaacggtgccgtttggttgttgtatgctgttctcgttcgtgatgttatcctcggggtgccaaacggtactggatttttactgggagcgatgcaattagtgctatacgcgatctacagaaatgggaagcgtgtttcaaataacagattggaagaaggattacaacatgagcctctcatctcagagccgaataatgagtcacatcagagtgaagacaggcccatctagtttgtcctcaagttttaaagctatatatgcatgctagctcgaccattgttatttgatattttcaatataaaaagagataagttaaatgttcaattgattagtttattcgattaaagtatgtttttaccgatcaagtgcatgaaataattaatgtgaaattatttcaatt

SEQ ID NO: 60193 - protein, 259 aa, Glycine max
  peptide (1)..(259): Ceres Seq. ID no. 12608621
TPFWKITLFLGLQNIMAEASFFVGVIGNIISILMFLSPVPTFWKIKKHGSTEDFSSLPYICTLLNCSLWTYYGIIKAGEYLVATVNGFGILMETIYIILFLIYAPKGIRGRTAILALILDVVILTAIIIITQLALEGETRSGAVGVMGAGLNIVMYSSPLSVMKTVVTTKSVEYMPFLLSFFFFFNGAVWLLYAVLVRDVILGVPNGTGFLLGAMQLVLYAIYRNGKRVSNNRLEEGLQHEPLISEPNNESHQSEDRPI

SEQ ID NO: 60194 - protein, 244 aa, Glycine max
  peptide (1)..(244): Ceres Seq. ID no. 12608622
MAEASFFVGVIGNIISILMFLSPVPTFWKIKKHGSTEDFSSLPYICTLLNCSLWTYYGIIKAGEYLVATVNGFGILMETIYIILFLIYAPKGIRGRTAILALILDVVILTAIIIITQLALEGETRSGAVGVMGAGLNIVMYSSPLSVMKTVVTTKSVEYMPFLLSFFFFFNGAVWLLYAVLVRDVILGVPNGTGFLLGAMQLVLYAIYRNGKRVSNNRLEEGLQHEPLISEPNNESHQSEDRPI

SEQ ID NO: 60195 - protein, 226 aa, Glycine max
  peptide (1)..(226): Ceres Seq. ID no. 12608623
MFLSPVPTFWKIKKHGSTEDFSSLPYICTLLNCSLWTYYGIIKAGEYLVATVNGFGILMETIYIILFLIYAPKGIRGRTAILALILDVVILTAIIIITQLALEGETRSGAVGVMGAGLNIVMYSSPLSVMKTVVTTKSVEYMPFLLSFFFFFNGAVWLLYAVLVRDVILGVPNGTGFLLGAMQLVLYAIYRNGKRVSNNRLEEGLQHEPLISEPNNESHQSEDRPI

SEQ ID NO: 60196 - DNA, 1338 bp, Glycine max
  misc_feature (1)..(1338): Ceres Seq. ID no. 15177059
ataacataacttgcctcttcccccaagacccaagttttctcttttcctcataaccccctctctccctaccaaatttcaatttcctctttcctcccttaggttatggatccattggggaaacgccctgccgccgaggacgattccctaatttccgattgcgagagcggggtttccgctggagacacgccgccgccgttcgtcgaaaacgccgacctcgtccggaccagattcgttcgtggcctcgtcgcgcactgcttcaaacccgaggttctggcagttcgcagaaacgtgtgttcctccgtcatggccctggcgcgtcaacattcctttcacgtcttcgcgcgtgccgtggccgaattgcgcggcggcaatgccaacgtgaagttcgcctggtacggtgcgtccagtaaggaagagataaatgacatcattcagcacggtttcggtcacgctcacagtaacggcctgcgtctctctccacaagattctccacttgaaagtgtgaagagttccgttgtggacgaagacggtttgaggcacttgttgctgtgccgcgttatcttggggaagacggaggtggttccacgtggctcctaccaatgccgttcgagttctcaagagtttgattctggggtggatgatctttccaatcccaaggagtatgttatttggtgtaaccagatcaacactcatgttttgcccgaatatgttttgagtttcagacttccttcaccattgaaagggattgtgaagattggggaacctttgaggccttcttcgccgtggatggcattcccagctttgatttcgatgctttcgaagattttgcctccgtccgaggttgcctccattgccaagtttcacaaggattatagagaaaagaggatttctcgacatgagctgatacagaaagtgagagtaatagcaggcgacaaattgctactttccgtcatcaaatctttcagagccaagaaaatacctgcaaactttaaagatgacaaggcgaaagaatggcaagcggacagccagcagcttgaacggaatgattgttcatatgggagttctattagctattacaggaagtgaatagaatacttgaagaaacacaatgctcatactaaccaaaacttacattgagggtgcaagtgcaaccactgcttaagaagtagagcgtcatttgagaccttttaaattgtttttagggtgatatactgatataggtgatttgttttgatgttgacggacgatagtgtagcaaaagaaatcactttctctttctggttggttacagttactggttgaaataaatatacttcggttcggacgtttatcatagtt

SEQ ID NO: 60197 - protein, 327 aa, Glycine max
  peptide (1)..(327): Ceres Seq. ID no. 15177060
MDPLGKRPAAEDDSLISDCESGVSAGDTPPPFVENADLVRTRFVRGLVAHCFKPEVLAVRRNVCSSVMALARQHSFHVFARAVAELRGGNANVKFAWYGASSKEEINDIIQHGFGHAHSNGLRLSPQDSPLESVKSSVVDEDGLRHLLLCRVILGKTEVVPRGSYQCRSSSQEFDSGVDDLSNPKEYVIWCNQINTHVLPEYVLSFRLPSPLKGIVKIGEPLRPSSPWMAFPALISMLSKILPPSEVASIAKFHKDYREKRISRHELIQKVRVIAGDKLLLSVIKSFRAKKIPANFKDDKAKEWQADSQQLERNDCSYGSSISYYRK

SEQ ID NO: 60198 - protein, 260 aa, Glycine max
  peptide (1)..(260): Ceres Seq. ID no. 15177061
MALARQHSFHVFARAVAELRGGNANVKFAWYGASSKEEINDIIQHGFGHAHSNGLRLSPQDSPLESVKSSVVDEDGLRHLLLCRVILGKTEVVPRGSYQCRSSSQEFDSGVDDLSNPKEYVIWCNQINTHVLPEYVLSFRLPSPLKGIVKIGEPLRPSSPWMAFPALISMLSKILPPSEVASIAKFHKDYREKRISRHELIQKVRVIAGDKLLLSVIKSFRAKKIPANFKDDKAKEWQADSQQLERNDCSYGSSISYYRK

SEQ ID NO: 60199 - DNA, 1258 bp, Glycine max
  misc_feature (1)..(1258): Ceres Seq. ID no. 15168366
atttttcacctctccccaaaaccctcgcgccgcatttttatttttctctttcattatttttttaccatttttttatggacctcttcgccggcgaccacttccctgtccccgaccacgtcgctccgttccccgattccggcgacctcgtcttcgccgccgacctcctctcccaccgccccaacccccagaagctccgccctatcaggtccgtccccgccgcccccattgcccaccctcctccgccccctctctcgcacgatccgattccctccgggtcgggtcacgccccatgccacgaatccagctcgtctttagatgctgaggatgaagacgatgacgacaattcatcagcaagtacggaaggacatggccctataaagaagaggagaaagacggtgaggaagctcgaagattttttgaaggatttgatggcgaaggtgatggaaaagcaagagcagatgcacgaacagttattggaaatcatagaaaataaggaaagggaaaggataaagagagaagaagcttggaagaacgaggagatggagagaatcagaaaagatgaagaggctagagcccaagtaaattctcgaaatttggccctcatatccttcattcagaacctgttgggccatgaaattcaaatcccccaacaaccagtagaaccatgcagcaaaagagaagaggatgaagttgaggtgagtgctagaaaggatttgaacaatgatccaagtgacaataatagatggcctgatgttgaagtgcaggcactgatcactgtgagaacttcattggagcacaagtttcgtttcatgggatcaaaagggtcaatatgggaggagatatctgaagcaatgaatggcatggggtacaaccgctcttcaaagaagtgtaaggagaagtgggaaaacattaacaagtactataaaaggacaatagggagtggcaagaaaaggcgtcaaaacagtaaaacttgcccttactttgatgagttggacattttgtatagaaatggtcttctaagtattggaaatgccttgagcaataccagcgatgttccccagattgaagtaaaggagttgactgaaacttgaatattagtaattgatagtcatagatacagcttatgtaaaagttccttcgtttcagcatttatttagccattcttcctttcaattttctcactgatgactttagtgtacaataccatcctctaactctgcatttaaaattttaaatattaagttcattgggttgatat

SEQ ID NO: 60200 - protein, 362 aa, Glycine max
  peptide (1)..(362): Ceres Seq. ID no. 15168367
FSPLPKTLAPHFYFSLSLFFYHFFMDLFAGDHFPVPDHVAPFPDSGDLVFAADLLSHRPNPQKLRPIRSVPAAPIAHPPPPPLSHDPIPSGSGHAPCHESSSSLDAEDEDDDDNSSASTEGHGPIKKRRKTVRKLEDFLKDLMAKVMEKQEQMHEQLLEIIENKERERIKREEAWKNEEMERIRKDEEARAQVNSRNLALISFIQNLLGHEIQIPQQPVEPCSKREEDEVEVSARKDLNNDPSDNNRWPDVEVQALITVRTSLEHKFRFMGSKGSIWEEISEAMNGMGYNRSSKKCKEKWENINKYYKRTIGSGKKRRQNSKTCPYFDELDILYRNGLLSIGNALSNTSDVPQIEVKELTET

SEQ ID NO: 60201 - protein, 338 aa, Glycine max
  peptide (1)..(338): Ceres Seq. ID no. 15168368
MDLFAGDHFPVPDHVAPFPDSGDLVFAADLLSHRPNPQKLRPIRSVPAAPIAHPPPPPLSHDPIPSGSGHAPCHESSSSLDAEDEDDDDNSSASTEGHGPIKKRRKTVRKLEDFLKDLMAKVMEKQEQMHEQLLEIIENKERERIKREEAWKNEEMERIRKDEEARAQVNSRNLALISFIQNLLGHEIQIPQQPVEPCSKREEDEVEVSARKDLNNDPSDNNRWPDVEVQALITVRTSLEHKFRFMGSKGSIWEEISEAMNGMGYNRSSKKCKEKWENINKYYKRTIGSGKKRRQNSKTCPYFDELDILYRNGLLSIGNALSNTSDVPQIEVKELTET

SEQ ID NO: 60202 - protein, 220 aa, Glycine max
  peptide (1)..(220): Ceres Seq. ID no. 15168369
MAKVMEKQEQMHEQLLEIIENKERERIKREEAWKNEEMERIRKDEEARAQVNSRNLALISFIQNLLGHEIQIPQQPVEPCSKREEDEVEVSARKDLNNDPSDNNRWPDVEVQALITVRTSLEHKFRFMGSKGSIWEEISEAMNGMGYNRSSKKCKEKWENINKYYKRTIGSGKKRRQNSKTCPYFDELDILYRNGLLSIGNALSNTSDVPQIEVKELTET

SEQ ID NO: 60203 - DNA, 1052 bp, Glycine max
  misc_feature (1)..(1052): Ceres Seq. ID no. 13595775
acacccaacccaacctcacgcacccactccaataatattaacaacaaccacaaccctttgtttttgttccttacacaccacacaccttcctcatcaatcaatggcgacccccccaaacgacgccgcatcgacaaagaagccccagcccataccatggacccaccaggagaccgtgcacctcatccgcgcctaccaggagaagtggtatgcccttaagcggggcccactccgccacaaccagtgggaggaggtcgccgtcgttgtcgccgcccgctgcggctatgacctcgcccaccccgctaagtccgccctccagtgccgccacaagatggaaaagctccgccagcgccaccgtgccgagaagaagcaacaacacaccgcggccgccctccgccctggcgcgtggcagtacaacaccctcatggacgacctcgagcgcggccccctccccatctccgccctcgcccctctcgacacctttgaagaagaagacgaaaacaacgacgacaccattgacgatcgaaacgactatgatggcgacgggagttttattaacatcaagtcgaagagtattaactgtatcctcagcgagaggcctgtgagaatgagaagcaacaaaagagggtttttgagagagcacgttgttgttaaagaagaagaggagaatgaaaacgaagacgacgacgttttggggttgtcgacggagatgagggctttcgcggagaggtttattgggatggagagtttgaagatggagatgatgaaggagacggagaggtgtaggttggagatggagaagaagcggatccagatgattctggaaacgcaaaggaggatcgttgattccattgggagggcgtttgggtctaacaagaggatcaagattactcaacaaaactgaaaagggtttcatttcttttcttttctaaattgtaattttgattgagtttaatttctatgcattgtgtaagaagttttaatcaagaggtaccacttatacatgacagaatgtgatgggatgacaatgaatacatgcactatttactcagttt

SEQ ID NO: 60204 - protein, 299 aa, Glycine max
  peptide (1)..(299): Ceres Seq. ID no. 13595776
HPTQPHAPTPIILTTTTTLCFCSLHTTHLPHQSMATPPNDAASTKKPQPIPWTHQETVHLIRAYQEKWYALKRGPLRHNQWEEVAVVVAARCGYDLAHPAKSALQCRHKMEKLRQRHRAEKKQQHTAAALRPGAWQYNTLMDDLERGPLPISALAPLDTFEEEDENNDDTIDDRNDYDGDGSFINIKSKSINCILSERPVRMRSNKRGFLREHVVVKEEEENENEDDDVLGLSTEMRAFAERFIGMESLKMEMMKETERCRLEMEKKRIQMILETQRRIVDSIGRAFGSNKRIKITQQN

SEQ ID NO: 60205 - protein, 266 aa, Glycine max
  peptide (1)..(266): Ceres Seq. ID no. 13595777
MATPPNDAASTKKPQPIPWTHQETVHLIRAYQEKWYALKRGPLRHNQWEEVAVVVAARCGYDLAHPAKSALQCRHKMEKLRQRHRAEKKQQHTAAALRPGAWQYNTLMDDLERGPLPISALAPLDTFEEEDENNDDTIDDRNDYDGDGSFINIKSKSINCILSERPVRMRSNKRGFLREHVVVKEEEENENEDDDVLGLSTEMRAFAERFIGMESLKMEMMKETERCRLEMEKKRIQMILETQRRIVDSIGRAFGSNKRIKITQQN

SEQ ID NO: 60206 - protein, 190 aa, Glycine max
  peptide (1)..(190): Ceres Seq. ID no. 13595778
MEKLRQRHRAEKKQQHTAAALRPGAWQYNTLMDDLERGPLPISALAPLDTFEEEDENNDDTIDDRNDYDGDGSFINIKSKSINCILSERPVRMRSNKRGFLREHVVVKEEEENENEDDDVLGLSTEMRAFAERFIGMESLKMEMMKETERCRLEMEKKRIQMILETQRRIVDSIGRAFGSNKRIKITQQN

SEQ ID NO: 60207 - DNA, 1522 bp, Glycine max
  misc_feature (1)..(1522): Ceres Seq. ID no. 14315862
gttttcattcaccgccgcattttgttcttgttgttgctctttcaacaggaaactcctccttcaacagattatgagtgcggttcattactcttgaagcaaggtttggtgggggggaataagatcatgcctggcattctctcaaggctgaatgcaaccatttactgtcgcattcgggaagcaataacaaggcaacaaggagtgccgacatccttgtacagaagttcagctttgcctctttgttcgctcacttcaagtcacacacttcacacaaaatcaatgattactgcctcacattccaatgctatgctgggagatgtttatgcttatggcttaatctcaggtcgtggtagtgtgcgagacttcacaaagcctgctgtaggttgcttgaggggtagtgtgaatctaaggagactacaaccattgtatggtcctttgagttttgggtgttctacttttgatgctaataggaggatccgggattcgagtttgctgcatggatcatggctcaagaatttctcagcctcttcttctgcttgctactcagccggggctgcacatgctgtctcatttgatggaagccctcctgatgaacagcttgcaaattcctctttttcgcctgacccaactattgttggtggtaagcccttgaagatgttgtcaggatcttgttacctaccacatccagataaggaggagacaggaggagaggatgctcattttatttgcacggatgaacaagcaattggtgttgctgatggtgtaggtggctgggcggatgttggcgttaatgcaggactgtttgcacaggaacttatatccaatttagtgagagcaattcaaaaggagcctaaaggttcttttaatctgacaagagtgttaagggaagctcacgcaaatacaaaggtcaagggttcatcaacagcttgtattgttgctcttactgacaagggactacattctattaatttgggtgacagtggattcattgtggttagagatggatgcaccattttcgagtccccttctcaacagcatgacttcaatttcccatatcagttggagagtgggaatggcgctgatctacccagctctggtgaggtttttaccatacccgttgcttcaggagatgtggtcatttctggaacagatggtttatttgacaatttgtacaacagtgagatcactggagttgttgaacatgcaattagggctggactagagccccaagtaactgctcagaagatagcagcactggctcgtcagcgagcactgtccaagagtagtcggacaccattttctaccctgctgaaaaagctggattctgttattatggtggcaaacttgatgacataactgttgttgtctcatacatatcaggttcagtgagtgagtgagtctcatttttgttctacatgtttgaactggtggaagagaatgaaatgtaacgatattatggtccattttttttggattggtataacgaagatgagatataatggaaactagtagtgaaatttattct

SEQ ID NO: 60208 - protein, 450 aa, Glycine max
  peptide (1)..(450): Ceres Seq. ID no. 14315863
VFIHRRILFLLLLFQQETPPSTDYECGSLLLKQGLVGGNKIMPGILSRLNATIYCRIREAITRQQGVPTSLYRSSALPLCSLTSSHTLHTKSMITASHSNAMLGDVYAYGLISGRGSVRDFTKPAVGCLRGSVNLRRLQPLYGPLSFGCSTFDANRRIRDSSLLHGSWLKNFSASSSACYSAGAAHAVSFDGSPPDEQLANSSFSPDPTIVGGKPLKMLSGSCYLPHPDKEETGGEDAHFICTDEQAIGVADGVGGWADVGVNAGLFAQELISNLVRAIQKEPKGSFNLTRVLREAHANTKVKGSSTACIVALTDKGLHSINLGDSGFIVVRDGCTIFESPSQQHDFNFPYQLESGNGADLPSSGEVFTIPVASGDVVISGTDGLFDNLYNSEITGVVEHAIRAGLEPQVTAQKIAALARQRALSKSSRTPFSTLLKKLDSVIMVANLMT

SEQ ID NO: 60209 - protein, 409 aa, Glycine max
  peptide (1)..(409): Ceres Seq. ID no. 14315864
MPGILSRLNATIYCRIREAITRQQGVPTSLYRSSALPLCSLTSSHTLHTKSMITASHSNAMLGDVYAYGLISGRGSVRDFTKPAVGCLRGSVNLRRLQPLYGPLSFGCSTFDANRRIRDSSLLHGSWLKNFSASSSACYSAGAAHAVSFDGSPPDEQLANSSFSPDPTIVGGKPLKMLSGSCYLPHPDKEETGGEDAHFICTDEQAIGVADGVGGWADVGVNAGLFAQELISNLVRAIQKEPKGSFNLTRVLREAHANTKVKGSSTACIVALTDKGLHSINLGDSGFIVVRDGCTIFESPSQQHDFNFPYQLESGNGADLPSSGEVFTIPVASGDVVISGTDGLFDNLYNSEITGVVEHAIRAGLEPQVTAQKIAALARQRALSKSSRTPFSTLLKKLDSVIMVANLMT

SEQ ID NO: 60210 - protein, 358 aa, Glycine max
  peptide (1)..(358): Ceres Seq. ID no. 14315865
MITASHSNAMLGDVYAYGLISGRGSVRDFTKPAVGCLRGSVNLRRLQPLYGPLSFGCSTFDANRRIRDSSLLHGSWLKNFSASSSACYSAGAAHAVSFDGSPPDEQLANSSFSPDPTIVGGKPLKMLSGSCYLPHPDKEETGGEDAHFICTDEQAIGVADGVGGWADVGVNAGLFAQELISNLVRAIQKEPKGSFNLTRVLREAHANTKVKGSSTACIVALTDKGLHSINLGDSGFIVVRDGCTIFESPSQQHDFNFPYQLESGNGADLPSSGEVFTIPVASGDVVISGTDGLFDNLYNSEITGVVEHAIRAGLEPQVTAQKIAALARQRALSKSSRTPFSTLLKKLDSVIMVANLMT

SEQ ID NO: 60211 - DNA, 1362 bp, Glycine max
  misc_feature (1)..(1362): Ceres Seq. ID no. 13639675
attcttcataatgattaaagaacttgtgaaatttatgtcaatcctactcttatcccgtggaaagtttttatagccagtctacatcgattaagatttgcttttgcctacagcgctcaaaagcttaagcaaatcttcacacttcctggagaaaacatgggtgcagcactagagaagtttttcttcagcactttggaaaggaatggaaaaggagaaagggcagatgttggggttccggttgctccatttggtactggaagattcgaagagcctgtccttaatggagattgtgaaaattactgtggtggctcacaatatgttcagttgtatcataattatgccatgccagtaattgtagattccagttctctagctttgcctgatgatatccttgcatcatcaacgcagcaaaactggagtctgttttatcatggtggtaccgatgtatatatcccgagacatacactctatcatccaacttacaaccttgaaggaggagggaaatcacgtggaacaggcacatacatacctgacttgaattacaattcctactgggatatgagcaccaaggcacctaggccaaggagatttccttcttcaaagcacaatgcatttcccagatcacgtctgaaaaagaaacaagtggaagaggttcattctgagatagacataaatgctaattcagattcaaggttgtttgagttcttaaatgaagatttccccgttcttccatgcaattccaaggctataccgccaacacaagccgaagagtctacgccattagaaaagtttcattctgagacagacatggatggtacttctcggtcatttgagttctcaaatgaagatttcccccttcttccaaaggtttgttctgagacacacatggatggtaattcaaggtcatttgggctttcaaagaaagattccccccttcttcaaagcgctcgcaagaccatcctgtcagggtctgctaatttaactaagcaagccaagagtttcccattctctaaagtgtctaaactgaaaaatattgagtttggaactttcaagaaatcacaatcattgacagaaccaagtgtgtcaacaaaggatgagaaagaagattccgatatttcattatctaaaaaaaactgtgcttgtattttcgaaggtggcgatagagaggaaagattaatctcttgaaagcaatgaaaagatggatcaacaatgttaacatagatattttgagggatattaaggatgtgtgtgtgtgtttgtttaagagagactggttgctagtgatagcctcaaacttctaggaacataatgatatcttgaacttgtacatttgtttaagttaaatcttttaatcatgtatgggtc

SEQ ID NO: 60212 - protein, 342 aa, Glycine max
  peptide (1)..(342): Ceres Seq. ID no. 13639676
MGAALEKFFFSTLERNGKGERADVGVPVAPFGTGRFEEPVLNGDCENYCGGSQYVQLYHNYAMPVIVDSSSLALPDDILASSTQQNWSLFYHGGTDVYIPRHTLYHPTYNLEGGGKSRGTGTYIPDLNYNSYWDMSTKAPRPRRFPSSKHNAFPRSRLKKKQVEEVHSEIDINANSDSRLFEFLNEDFPVLPCNSKAIPPTQAEESTPLEKFHSETDMDGTSRSFEFSNEDFPLLPKVCSETHMDGNSRSFGLSKKDSPLLQSARKTILSGSANLTKQAKSFPFSKVSKLKNIEFGTFKKSQSLTEPSVSTKDEKEDSDISLSKKNCACIFEGGDREERLIS

SEQ ID NO: 60213 - protein, 280 aa, Glycine max
  peptide (1)..(280): Ceres Seq. ID no. 13639677
MPVIVDSSSLALPDDILASSTQQNWSLFYHGGTDVYIPRHTLYHPTYNLEGGGKSRGTGTYIPDLNYNSYWDMSTKAPRPRRFPSSKHNAFPRSRLKKKQVEEVHSEIDINANSDSRLFEFLNEDFPVLPCNSKAIPPTQAEESTPLEKFHSETDMDGTSRSFEFSNEDFPLLPKVCSETHMDGNSRSFGLSKKDSPLLQSARKTILSGSANLTKQAKSFPFSKVSKLKNIEFGTFKKSQSLTEPSVSTKDEKEDSDISLSKKNCACIFEGGDREERLIS

SEQ ID NO: 60214 - protein, 208 aa, Glycine max
  peptide (1)..(208): Ceres Seq. ID no. 13639678
MSTKAPRPRRFPSSKHNAFPRSRLKKKQVEEVHSEIDINANSDSRLFEFLNEDFPVLPCNSKAIPPTQAEESTPLEKFHSETDMDGTSRSFEFSNEDFPLLPKVCSETHMDGNSRSFGLSKKDSPLLQSARKTILSGSANLTKQAKSFPFSKVSKLKNIEFGTFKKSQSLTEPSVSTKDEKEDSDISLSKKNCACIFEGGDREERLIS

SEQ ID NO: 60215 - DNA, 688 bp, Glycine max
  misc_feature (1)..(688): Ceres Seq. ID no. 15226128
atattaataataaccaaaacagcagagagaagagaagggctacacaaacacaatctctaatggcactcaggatgtgggcttcttccactgccaatgcactcaaactctcttctgtctccagacctcatctcttgcctcctttttctttctccagatgcttatcttccgtcttggatggacttaagtacgctgattcacatgaatgggtcaagcacgaaggctcagtcgccaccattggtatcactgaccatgcccaggaccatcttggagaggttgtgtatgtggagctgccagaaccaggtggcacagtttccaagaagtctggcttcggagccgttgaaagtgttaaagcaacaagtgatataaactctccaatctcgggggagatcgttgaggttaacaaaaagctcacagaaacgcctggcctggtcaactcaagcccatacgaagatggatggatgatcaaagtaaagccaagcgatccatctgaattagattccttgatgggtccaaaggagtacacaaaattttgtgaggaagaagatgcaagtcattaaagtttgaattgaattggctcctgcagttatgtgtgggactgactgttcttcatatgtttatgatcttattaccttctgaacagttttttaatatgcaacagaactgtttctttccaaaaaaaaaaaaaaaa

SEQ ID NO: 60216 - protein, 184 aa, Glycine max
  peptide (1)..(184): Ceres Seq. ID no. 15226129
INNNQNSREKRRATQTQSLMALRMWASSTANALKLSSVSRPHLLPPFSFSRCLSSVLDGLKYADSHEWVKHEGSVATIGITDHAQDHLGEVVYVELPEPGGTVSKKSGFGAVESVKATSDINSPISGEIVEVNKKLTETPGLVNSSPYEDGWMIKVKPSDPSELDSLMGPKEYTKFCEEEDASH

SEQ ID NO: 60217 - protein, 165 aa, Glycine max
  peptide (1)..(165): Ceres Seq. ID no. 15226130
MALRMWASSTANALKLSSVSRPHLLPPFSFSRCLSSVLDGLKYADSHEWVKHEGSVATIGITDHAQDHLGEVVYVELPEPGGTVSKKSGFGAVESVKATSDINSPISGEIVEVNKKLTETPGLVNSSPYEDGWMIKVKPSDPSELDSLMGPKEYTKFCEEEDASH

SEQ ID NO: 60218 - protein, 161 aa, Glycine max
  peptide (1)..(161): Ceres Seq. ID no. 15226131
MWASSTANALKLSSVSRPHLLPPFSFSRCLSSVLDGLKYADSHEWVKHEGSVATIGITDHAQDHLGEVVYVELPEPGGTVSKKSGFGAVESVKATSDINSPISGEIVEVNKKLTETPGLVNSSPYEDGWMIKVKPSDPSELDSLMGPKEYTKFCEEEDASH

SEQ ID NO: 60219 - DNA, 498 bp, Glycine max
  misc_feature (1)..(498): Ceres Seq. ID no. 13581730
atcctaatcgaaaaacatacacatttattccgctaaataataataataaaaaagaacgacacacaccaaagaaaaatttattagagcttttcgaagatatttgagatttgtgtttcatttgatatggagaagaagagtggtagcagctggtcctttaagaagatgagcaaagagttgtggccacggaggttgtcgtcgtcttttcgcagcaaacggcttcacttacccaccatgaccatcatcgttgacaacgttgttttcaagattgtctcggtggtagagggtgttgtaattgtttccacgctttgtgtattctacctttgttgtggttgtcacatttgaaatattctatgtatgtttgatgatcttcaaattcatttgttcgttcattttttgagggctagttaaagttcatcaataacagtctgagtttgtgttaagttgttaccatcctatgtagattgtccatgcaataaataacaattttgttttgttttt

SEQ ID NO: 60220 - protein, 72 aa, Glycine max
  peptide (1)..(72): Ceres Seq. ID no. 13581731
MEKKSGSSWSFKKMSKELWPRRLSSSFRSKRLHLPTMTIIVDNVVFKIVSVVEGVVIVSTLCVFYLCCGCHI

SEQ ID NO: 60221 - protein, 59 aa, Glycine max
  peptide (1)..(59): Ceres Seq. ID no. 13581732
MSKELWPRRLSSSFRSKRLHLPTMTIIVDNVVFKIVSVVEGVVIVSTLCVFYLCCGCHI

SEQ ID NO: 60222 - protein, 36 aa, Glycine max
  peptide (1)..(36): Ceres Seq. ID no. 13581733
MTIIVDNVVFKIVSVVEGVVIVSTLCVFYLCCGCHI

SEQ ID NO: 60223 - DNA, 1721 bp, Glycine max
  misc_feature (1)..(1721): Ceres Seq. ID no. 14311175
aatatcaaattctttgtcccacaaaagatggggttcactcccacaagtactgcaacatgctttctcataatagcacctctggttgtgctatggtgttggaagctactaaagtgggtgtggctgaggccaaagagattggagagagcattaagggcacagggccttcaggggaatccctacagcctcttgattggggacactaaggaaatgtacacagtgctcatgcaagctgccagatctcaacaatctacaagttcttttctctctaaggataaggatgcagcaccacatatcacaacctttaaccatcacattgtcaacaaattcggcaagaattcatttttttgggaaggtaccaaaccaaaagtggtaatcactgaccctgagcaaatcaaagaagtcttcaacaagatccaagactttgagaaacccaagttgagtcctattgtcaagttgttgggctctggacttgcaaatttagaaggcgagaaatggcgtacacatcgaaagattattaaccctgctttccatttagaaaaattgaaggttatgttaccaatatttcttgaatgttgtgacgatatggtttccaaatgggaaaggttgttgtcttcaaatgacaaatccgaaattgatgtgtggcctttccttcaaaatttaacatgtgatattatatctagaacagcatttggaagcagttatgaagatgggaaacgtatatttgaacttctgaaagagcaaactggacttatgatgaaattgcagaacgcttacattccaggatggtggttgctgccaacaactacaaataagaggatgaaaaaaattgatactgagatacgagcattacttaaaggtgtcatcaacaaacgagagaatgcaatgaaggctggtgaagtcttgaacaatgacttgttgggcatgcttttggaatcaaaccgtatggaaatacaagatcatggaaagaataacattattgcaatgactagcctagaggtaattgaggaatgcaatgcattctacatagcaggacaagaaaccacatcggttttactagtttggacaatggtgttattgagtagatatcctcattggcaagaacgtgcaagggaggaagtattgcatgtttttggtaaccaaaagccagactataatgggctaagtcaccttaaaattgtgaccatgattttatacgaggttcttaggttatacccacctttaatttattttgctcgagcgatcaagaatgatgtgaaacttggaaacctttccctacctgcgggagtgcaagtttccttaccaatactattgattcaccaggatcgtgatatttggggtgatgatgctacagagttcaacccagaaagatttgctgaaggagtagcaaaggcaacaaaaggccaagttgtgtttttcccatttggatggggtcctagagtgtgcttaggccaaaattttgctttattagaagcgaagttggttttgtcattactcttacaacgcttctcatttgagctttctcctacctatgcacatgctccagtcactgtgctcactcttaatccaaaatttggtgctcatatcatcttacataagttgtagtgtcatctattaatttgtatcctgcacacctaattatctccattcctttcttatgttctaatctcttgtatttatagagggaaacctctttattatattgaatgctatttttatttcct

SEQ ID NO: 60224 - protein, 533 aa, Glycine max
  peptide (1)..(533): Ceres Seq. ID no. 14311176
NIKFFVPQKMGFTPTSTATCFLIIAPLVVLWCWKLLKWVWLRPKRLERALRAQGLQGNPYSLLIGDTKEMYTVLMQAARSQQSTSSFLSKDKDAAPHITTFNHHIVNKFGKNSFFWEGTKPKVVITDPEQIKEVFNKIQDFEKPKLSPIVKLLGSGLANLEGEKWRTHRKIINPAFHLEKLKVMLPIFLECCDDMVSKWERLLSSNDKSEIDVWPFLQNLTCDIISRTAFGSSYEDGKRIFELLKEQTGLMMKLQNAYIPGWWLLPTTTNKRMKKIDTEIRALLKGVINKRENAMKAGEVLNNDLLGMLLESNRMEIQDHGKNNIIAMTSLEVIEECNAFYIAGQETTSVLLVWTMVLLSRYPHWQERAREEVLHVFGNQKPDYNGLSHLKIVTMILYEVLRLYPPLIYFARAIKNDVKLGNLSLPAGVQVSLPILLIHQDRDIWGDDATEFNPERFAEGVAKATKGQVVFFPFGWGPRVCLGQNFALLEAKLVLSLLLQRFSFELSPTYAHAPVTVLTLNPKFGAHIILHKL

SEQ ID NO: 60225 - protein, 524 aa, Glycine max
  peptide (1)..(524): Ceres Seq. ID no. 14311177
MGFTPTSTATCFLIIAPLVVLWCWKLLKWVWLRPKRLERALRAQGLQGNPYSLLIGDTKEMYTVLMQAARSQQSTSSFLSKDKDAAPHITTFNHHIVNKFGKNSFFWEGTKPKVVITDPEQIKEVFNKIQDFEKPKLSPIVKLLGSGLANLEGEKWRTHRKIINPAFHLEKLKVMLPIFLECCDDMVSKWERLLSSNDKSEIDVWPFLQNLTCDIISRTAFGSSYEDGKRIFELLKEQTGLMMKLQNAYIPGWWLLPTTTNKRMKKIDTEIRALLKGVINKRENAMKAGEVLNNDLLGMLLESNRMEIQDHGKNNIIAMTSLEVIEECNAFYIAGQETTSVLLVWTMVLLSRYPHWQERAREEVLHVFGNQKPDYNGLSHLKIVTMILYEVLRLYPPLIYFARAIKNDVKLGNLSLPAGVQVSLPILLIHQDRDIWGDDATEFNPERFAEGVAKATKGQVVFFPFGWGPRVCLGQNFALLEAKLVLSLLLQRFSFELSPTYAHAPVTVLTLNPKFGAHIILHKL

SEQ ID NO: 60226 - protein, 464 aa, Glycine max
  peptide (1)..(464): Ceres Seq. ID no. 14311178
MYTVLMQAARSQQSTSSFLSKDKDAAPHITTFNHHIVNKFGKNSFFWEGTKPKVVITDPEQIKEVFNKIQDFEKPKLSPIVKLLGSGLANLEGEKWRTHRKIINPAFHLEKLKVMLPIFLECCDDMVSKWERLLSSNDKSEIDVWPFLQNLTCDIISRTAFGSSYEDGKRIFELLKEQTGLMMKLQNAYIPGWWLLPTTTNKRMKKIDTEIRALLKGVINKRENAMKAGEVLNNDLLGMLLESNRMEIQDHGKNNIIAMTSLEVIEECNAFYIAGQETTSVLLVWTMVLLSRYPHWQERAREEVLHVFGNQKPDYNGLSHLKIVTMILYEVLRLYPPLIYFARAIKNDVKLGNLSLPAGVQVSLPILLIHQDRDIWGDDATEFNPERFAEGVAKATKGQVVFFPFGWGPRVCLGQNFALLEAKLVLSLLLQRFSFELSPTYAHAPVTVLTLNPKFGAHIILHKL

SEQ ID NO: 60227 - DNA, 1389 bp, Glycine max
  misc_feature (1)..(1389): Ceres Seq. ID no. 15171144
attagggattccctccctcctccgcctcttgtcactcacacagaaaagaccgttgaatttcaaacctcagccatgcccgctctcagaaagcgaaatcgattgtcggagttcgatgccatatccaaccacgacacacctcatgaacagaagaagaatatgtctgagtacgagctgtcgagagagcagagaatccgcgaaaaccgcgagagaatgggaaagctgggaatcttggacctttccctcactctcaagctcaacaacaaaaacaaaagatcctattcctctcacaaaccccaaacccctccttctcttccaaactcctccgtccccgttcgccgctcttccaggttgcagaatgtgactcctgttagttactccgaagttcccccaaagaaagacgagtttaagaaaaatggaagggtggtcattgaacaaggtgccaagccagaggtgtactctgaagaacacgagaagctgttgggaaacaccgacaagccctggacgctcttcgtcgatggtgttggcaaagatgggaaacgaatttatgactccgtccatggcaaaacttgccatcagtgcaggcaaaagactcttggttatcggacaagttgtagccaatgcaacatggtccaggggcagttttgtggagattgcttgtatatgagatatggggagcatgtactcgaagccttgcagaatccaacttggctatgccctgtttgtcgtggaatttgcaactgtagcttatgtcgtcaagcaaaaggatgggccccaactggcactctatataaaaagatatcaacattgggttacaaatcagttgcacactaccttattcaaacccggcgctcagaaatagatgtgaagaaaaatgcagatccttccaacccagtttcagcaaaaaggtcgctacccttctctgatgtggacaagtctcttgaggttaacgagaatcatctggaatcattgaagcctctagctgaatctgaaggtgatgatgctgaggtttcagcaaagagattgcttttctctgataagcaaaatcagcttgaaaaagttgagtgttcagataccccaaaacctcttcagcttgaaaaaaatgagtgttcaggtaccaagaagccacttgcttcttcctccaaacctagctctgacagcattgctggaagacttaggtccaggcttaaaaaaccatgagacttttttttatctttttcttagtctaacctgggatacatgtgcttactttccaagaaacacattatgaattgggataactggagttggtaatttggcatttgtcatagtaacggtaatatatgctttctcttttaattaccaaccggatttggtaatttggtataaaatcctttttgtcatagtaatggt

SEQ ID NO: 60228 - protein, 398 aa, Glycine max
  peptide (1)..(398): Ceres Seq. ID no. 15171145
IRDSLPPPPLVTHTEKTVEFQTSAMPALRKRNRLSEFDAISNHDTPHEQKKNMSEYELSREQRIRENRERMGKLGILDLSLTLKLNNKNKRSYSSHKPQTPPSLPNSSVPVRRSSRLQNVTPVSYSEVPPKKDEFKKNGRVVIEQGAKPEVYSEEHEKLLGNTDKPWTLFVDGVGKDGKRIYDSVHGKTCHQCRQKTLGYRTSCSQCNMVQGQFCGDCLYMRYGEHVLEALQNPTWLCPVCRGICNCSLCRQAKGWAPTGTLYKKISTLGYKSVAHYLIQTRRSEIDVKKNADPSNPVSAKRSLPFSDVDKSLEVNENHLESLKPLAESEGDDAEVSAKRLLFSDKQNQLEKVECSDTPKPLQLEKNECSGTKKPLASSSKPSSDSIAGRLRSRLKKP

SEQ ID NO: 60229 - protein, 374 aa, Glycine max
  peptide (1)..(374): Ceres Seq. ID no. 15171146
MPALRKRNRLSEFDAISNHDTPHEQKKNMSEYELSREQRIRENRERMGKLGILDLSLTLKLNNKNKRSYSSHKPQTPPSLPNSSVPVRRSSRLQNVTPVSYSEVPPKKDEFKKNGRVVIEQGAKPEVYSEEHEKLLGNTDKPWTLFVDGVGKDGKRIYDSVHGKTCHQCRQKTLGYRTSCSQCNMVQGQFCGDCLYMRYGEHVLEALQNPTWLCPVCRGICNCSLCRQAKGWAPTGTLYKKISTLGYKSVAHYLIQTRRSEIDVKKNADPSNPVSAKRSLPFSDVDKSLEVNENHLESLKPLAESEGDDAEVSAKRLLFSDKQNQLEKVECSDTPKPLQLEKNECSGTKKPLASSSKPSSDSIAGRLRSRLKKP

SEQ ID NO: 60230 - protein, 346 aa, Glycine max
  peptide (1)..(346): Ceres Seq. ID no. 15171147
MSEYELSREQRIRENRERMGKLGILDLSLTLKLNNKNKRSYSSHKPQTPPSLPNSSVPVRRSSRLQNVTPVSYSEVPPKKDEFKKNGRVVIEQGAKPEVYSEEHEKLLGNTDKPWTLFVDGVGKDGKRIYDSVHGKTCHQCRQKTLGYRTSCSQCNMVQGQFCGDCLYMRYGEHVLEALQNPTWLCPVCRGICNCSLCRQAKGWAPTGTLYKKISTLGYKSVAHYLIQTRRSEIDVKKNADPSNPVSAKRSLPFSDVDKSLEVNENHLESLKPLAESEGDDAEVSAKRLLFSDKQNQLEKVECSDTPKPLQLEKNECSGTKKPLASSSKPSSDSIAGRLRSRLKKP

SEQ ID NO: 60231 - DNA, 833 bp, Glycine max
  misc_feature (1)..(833): Ceres Seq. ID no. 12608429
actctctcttttgtttcctctcttaacttctcttctcacaccacttactttctctctcctctccatgtcttcttcacgtcaaacgtagaatatctttttctttttccccttttttaatcttaacccaatttttactctcgcaaagtggtgtatttgaggaagtttgatttgggaaatgaacaaaggacagtcaccggagcctcttgatttcttcatctggactgttgaggatgttggcttgtggctggagactataaatcttggtagttacagccaaatttttaaagaaaatggtgttaatggagaatacctggaaggcatgtccatgtttacgactgaacagatcctacgttttataagacgttgccacatgaagtggggagacttcatcacattatgcaaggaattaagacggattaaagtggcttgtctgaaaggggagcagaaggtgcggcggccatggtgggcaccggcttgcctatctacagtgttcttaaaggttgcaaaatccaacagacaatcaagagttgtttccttgaagctggaaccatgataatacaataagttaaacctctgcatatgtgtaccagtgtacgtatagcaaatttctttttgcctagaaaacaaaagataggaaagaactttttctagcccccttttttattttattttatttttcttttgattccaaaacctggttgtttcttctcctctggagaactgaactgttatgcagttgaaggtccttgtgcactaatttccggtgctgtgtaattatgtattctcttatatgtgaacgaaaatacgatatatgtcgtttctcttcaggttcc

SEQ ID NO: 60232 - protein, 125 aa, Glycine max
  peptide (1)..(125): Ceres Seq. ID no. 12608430
MNKGQSPEPLDFFIWTVEDVGLWLETINLGSYSQIFKENGVNGEYLEGMSMFTTEQILRFIRRCHMKWGDFITLCKELRRIKVACLKGEQKVRRPWWAPACLSTVFLKVAKSNRQSRVVSLKLEP

SEQ ID NO: 60233 - protein, 77 aa, Glycine max
  peptide (1)..(77): Ceres Seq. ID no. 12608431
MSMFTTEQILRFIRRCHMKWGDFITLCKELRRIKVACLKGEQKVRRPWWAPACLSTVFLKVAKSNRQSRVVSLKLEP

SEQ ID NO: 60234 - protein, 75 aa, Glycine max
  peptide (1)..(75): Ceres Seq. ID no. 12608432
MFTTEQILRFIRRCHMKWGDFITLCKELRRIKVACLKGEQKVRRPWWAPACLSTVFLKVAKSNRQSRVVSLKLEP

SEQ ID NO: 60235 - DNA, 1026 bp, Glycine max
  misc_feature (1)..(1026): Ceres Seq. ID no. 15168588
acacaagacactcaaattacatggtcatagtgtacacctagttaggcaaacacaccaaacaccaaacaccaaactagttggctcaattctctttgaatggctttggaggctttgaattcaccaacagcagccaccactccgttccgtggctaccaagaagaggaggaggacgaggaggctgaccttcacttacgtgagccttgggctaaaaggaaacgctccaaacgaccgcgttttgagacggaggaagagtacctcgctctttgcctcatcatgctcgcacaaagcggtaacaccagaaacatccacaacaacaacacccaattaccgtcttcttcactgtcagacaaagaagcgtcgccgccggtgaaactaacacacaggtgcaccgtttgcaacaaggcctttggttcttatcaagcactcggtggacacaaggccagccaccgcaaggcctcgtcggaatccaaccccaccgcctccgtctctgccctagccaacgacagcgtttctgcttccaccgtcggcggcggaaggatgcacgagtgttccatctgtcacaagagtttccctaccggtcaggccctgggtggccacaagcgctgccactacgacggcgggaacaaccacagtaacagcaacgccaacggaaacaacagcagcggcgccactacctccgacggcggcgctgcctcctcctcccacacgctccgtgggtttgacctgaaccttccggcgccgctgacggagttctggtcgccgatggggtttgatttcgggaagaagaaggtaggcggtgaacaagaggtggaaagcccgttgccggtaaccgccaagaggccgcgtttgtttacaggggaagatgatgaaaccgcgtagatttgtttgcagaattttattttaaattgattgaaattgaatttgttgctggtatatcgcgaatatgattatgaattcaaaccagttagtttaattttcattttatgtttttttttagtatataggtgggattgggattttgtttct

SEQ ID NO: 60236 - protein, 260 aa, Glycine max
  peptide (1)..(260): Ceres Seq. ID no. 15168589
MALEALNSPTAATTPFRGYQEEEEDEEADLHLREPWAKRKRSKRPRFETEEEYLALCLIMLAQSGNTRNIHNNNTQLPSSSLSDKEASPPVKLTHRCTVCNKAFGSYQALGGHKASHRKASSESNPTASVSALANDSVSASTVGGGRMHECSICHKSFPTGQALGGHKRCHYDGGNNHSNSNANGNNSSGATTSDGGAASSSHTLRGFDLNLPAPLTEFWSPMGFDFGKKKVGGEQEVESPLPVTAKRPRLFTGEDDETA

SEQ ID NO: 60237 - protein, 201 aa, Glycine max
  peptide (1)..(201): Ceres Seq. ID no. 15168590
MLAQSGNTRNIHNNNTQLPSSSLSDKEASPPVKLTHRCTVCNKAFGSYQALGGHKASHRKASSESNPTASVSALANDSVSASTVGGGRMHECSICHKSFPTGQALGGHKRCHYDGGNNHSNSNANGNNSSGATTSDGGAASSSHTLRGFDLNLPAPLTEFWSPMGFDFGKKKVGGEQEVESPLPVTAKRPRLFTGEDDETA

SEQ ID NO: 60238 - DNA, 1773 bp, Glycine max
  misc_feature (1)..(1773): Ceres Seq. ID no. 12608463
aaccacaatgcaccaaaacaactctttttcttcttcttcttcttcaccattctcaattcttttcttcttcttctaacatgggaccctcttccacgcacactcctcgttcccctacgtacttaattccctgcgttatagctcttgccctcttctccctcactggactcctcctctacaaggtggacgacgtcgcttcgcgcaccggaacggtggtgggtcacaacctagaaccgacgccgtggcacgtcttccctcacaagcccttcgacgaggagtcccgccagcagcgcgcgtacaaaatcctacaatgctcctacctgacgtgccgctacgccgctgaagccctcggcggagcacggcggagaaccggcggcggcagggaggagtgccccaagtttttccgggcaatccatcgggacctggcgccgtggtcggagagccggatatcgaaggcgcacgtggcggcggcgcagcggtacgcggcgttcagagtggtgattgttgaagggaaggtgtttgtggattggtactatgcttgtgtgcagagtagggcaatgtttacactgtgggggttgttgcagcttatgaggaggtaccctgggatggtgccagatgtggatatgatgtttgattgcatggataaaccttctgttaataagactgaacaccaagcaatgcctttgcctctatttcggtattgcaccacaaaggaacactttgacatcccttttccggattggtctttctggggttggtcagaaataaacatacgaccctggcaggaagagttcccagatatcaagcgaggttctcgatctgttacttggaaaaataagttaccatgggcatactggaaaggaaaccctgatgttgcatctcctattcgtactgaattaataaattgtaatgattctaggaagtggggagcagagattatgcgccaggattggggggaagcagctagaaatggctttaagcagtcaaaactttcagatcagtgtaatcatcggtataagatctatgctgaagggtatgcatggtctgtgagtttgaaatatattctctcatgtggttctgttgcattgattatatcaccccagtatgaagattttttcagccgtggccttattccaaaccataatttttggcttgttgatcctctaaatctatgtccatctataaagtatgctgtagaatgggggaaccaacacccagtagaggcagaggctatagggaaaagagggcaggatttaatggaaagcttgaacatgaatcgaatttatgaatacatgttccaccttatttctgattactcaaaacttcaagacttcaagcctactccaccaccaactgccctggaagtttgtgtagaatctgtgctttgctttgctgatgagaagcagaggatgttcctcaataaatcatttacattcccttcacataaacctccttgcaatctcaaacctgcctagttatatcacctcttagtttacacaacaaatatactaaaggattttacacatccaagaatatggaaactcccagtgaacattacacgttatttaatagtgtaaaaatatagtgccttttaggttatcatttacaagatttagctttagtaataggccatcatcatttatcagaaaacaacaccacaggaatttcattttcattctcttcccggtcattcttttgttactctgttttttgttttcttatctttgtctttccctttttttattttgcataaatttcttaaatcacaactaaatt

SEQ ID NO: 60239 - protein, 489 aa, Glycine max
  peptide (1)..(489): Ceres Seq. ID no. 12608464
PQCTKTTLFLLLLLHHSQFFSSSSNMGPSSTHTPRSPTYLIPCVIALALFSLTGLLLYKVDDVASRTGTVVGHNLEPTPWHVFPHKPFDEESRQQRAYKILQCSYLTCRYAAEALGGARRRTGGGREECPKFFRAIHRDLAPWSESRISKAHVAAAQRYAAFRVVIVEGKVFVDWYYACVQSRAMFTLWGLLQLMRRYPGMVPDVDMMFDCMDKPSVNKTEHQAMPLPLFRYCTTKEHFDIPFPDWSFWGWSEINIRPWQEEFPDIKRGSRSVTWKNKLPWAYWKGNPDVASPIRTELINCNDSRKWGAEIMRQDWGEAARNGFKQSKLSDQCNHRYKIYAEGYAWSVSLKYILSCGSVALIISPQYEDFFSRGLIPNHNFWLVDPLNLCPSIKYAVEWGNQHPVEAEAIGKRGQDLMESLNMNRIYEYMFHLISDYSKLQDFKPTPPPTALEVCVESVLCFADEKQRMFLNKSFTFPSHKPPCNLKPA

SEQ ID NO: 60240 - protein, 464 aa, Glycine max
  peptide (1)..(464): Ceres Seq. ID no. 12608465
MGPSSTHTPRSPTYLIPCVIALALFSLTGLLLYKVDDVASRTGTVVGHNLEPTPWHVFPHKPFDEESRQQRAYKILQCSYLTCRYAAEALGGARRRTGGGREECPKFFRAIHRDLAPWSESRISKAHVAAAQRYAAFRVVIVEGKVFVDWYYACVQSRAMFTLWGLLQLMRRYPGMVPDVDMMFDCMDKPSVNKTEHQAMPLPLFRYCTTKEHFDIPFPDWSFWGWSEINIRPWQEEFPDIKRGSRSVTWKNKLPWAYWKGNPDVASPIRTELINCNDSRKWGAEIMRQDWGEAARNGFKQSKLSDQCNHRYKIYAEGYAWSVSLKYILSCGSVALIISPQYEDFFSRGLIPNHNFWLVDPLNLCPSIKYAVEWGNQHPVEAEAIGKRGQDLMESLNMNRIYEYMFHLISDYSKLQDFKPTPPPTALEVCVESVLCFADEKQRMFLNKSFTFPSHKPPCNLKPA

SEQ ID NO: 60241 - protein, 305 aa, Glycine max
  peptide (1)..(305): Ceres Seq. ID no. 12608466
MFTLWGLLQLMRRYPGMVPDVDMMFDCMDKPSVNKTEHQAMPLPLFRYCTTKEHFDIPFPDWSFWGWSEINIRPWQEEFPDIKRGSRSVTWKNKLPWAYWKGNPDVASPIRTELINCNDSRKWGAEIMRQDWGEAARNGFKQSKLSDQCNHRYKIYAEGYAWSVSLKYILSCGSVALIISPQYEDFFSRGLIPNHNFWLVDPLNLCPSIKYAVEWGNQHPVEAEAIGKRGQDLMESLNMNRIYEYMFHLISDYSKLQDFKPTPPPTALEVCVESVLCFADEKQRMFLNKSFTFPSHKPPCNLKPA

SEQ ID NO: 60242 - DNA, 1594 bp, Glycine max
  misc_feature (1)..(1594): Ceres Seq. ID no. 15177037
tcgcgcccacaagcaaaacagagagaaaaaagaaagcagaaatgggatcattcccaaaagcaaaacccaacaacactcacaccgacaccaacaccaacacccataacagggttatgggttttctcctagttttctttccggaagagaataacaatacaacaccaaccattgctaccaaaagtaccaaacccaaccttgtatcttcttctccctctccacattccttgaagagaattagttccagttccaacaatgcccttctctccaaagcccagtccactatctcaatatgcttcctcctcctcttcactaccctccttctcttcacactctccacattcgaacccacacaccacaaacctcgctccataccccccaaatccaaactccgcaaaaacacctcctcaagcgacgtcgctttcccctccactgcgctccagcgtatgggcacgctctaccgcagaggcacccgagccatgaacgacatcgtcgtttgccacgtacccgaagacactactcacgacgaattccgaatcttcctcagactcctccaccgctccggcctcacttccaaatccgacgtcgtcttcatcttcgtctctgcctcctcttcaaccactttcgctcacattgtccacgaagagaacacctcattcctctcgctcattaacctccacgctcagttgaactcgactcagtgggccaaaccgtccgagtcgaacttcgacgcgactcgtttcttgaaagctcccaagaaaggagaaccgctctggggaaagaaaattcggacgaattatagtggctcggaaggtgagttgagtcgggcgagttatgggtcggtgcttagttttgatgccaacgaactcgatccagagaactcgttggctggttttttggaccgagttccactcagtttgagaaggtgggcctgttaccccatgttattcgggcgcgtgaggaggaactttaaacacgtgacccttgtggatgtaaaaaatgtggtcatttttaatgacccactcggacgagtcaggaaccagagtcccgagtcggttttcgtgtaccctaatgcaaaacacggtaggaactccgagaggactcagtcgcatcacccggttaactcagtgattctgatgggcggcgcccgcgggatccggcgcgtgtcgcacgccatgctcgttgcgattgttcgggccgcaatgcagccgcacaagaggaagaactcggtgtccgactcggcgattctgagtcaactcgtaaggaacaagtttgcattgaggaacgttcacttaattgtctcgggggagtcgattccggaagcgagttcactcgctgggtcaacatcgttttcggattgtgcaataattcagcggggtacgggtaattattatgacctcaattctattgttaagaagcaaatttgttcttctgtgatggattcttttgtttataacagtgattgtaagcatctggtaaaagtagaacaataatgagaaaataggggggaaaattaacgagaaaattcgtgtatttattgaacttacttgtactagtagttttatagtagcataaattttcccaccgtctctcctct

SEQ ID NO: 60243 - protein, 495 aa, Glycine max
  peptide (1)..(495): Ceres Seq. ID no. 15177038
APTSKTERKKKAEMGSFPKAKPNNTHTDTNTNTHNRVMGFLLVFFPEENNNTTPTIATKSTKPNLVSSSPSPHSLKRISSSSNNALLSKAQSTISICFLLLFTTLLLFTLSTFEPTHHKPRSIPPKSKLRKNTSSSDVAFPSTALQRMGTLYRRGTRAMNDIVVCHVPEDTTHDEFRIFLRLLHRSGLTSKSDVVFIFVSASSSTTFAHIVHEENTSFLSLINLHAQLNSTQWAKPSESNFDATRFLKAPKKGEPLWGKKIRTNYSGSEGELSRASYGSVLSFDANELDPENSLAGFLDRVPLSLRRWACYPMLFGRVRRNFKHVTLVDVKNVVIFNDPLGRVRNQSPESVFVYPNAKHGRNSERTQSHHPVNSVILMGGARGIRRVSHAMLVAIVRAAMQPHKRKNSVSDSAILSQLVRNKFALRNVHLIVSGESIPEASSLAGSTSFSDCAIIQRGTGNYYDLNSIVKKQICSSVMDSFVYNSDCKHLVKVEQ

SEQ ID NO: 60244 - protein, 482 aa, Glycine max
  peptide (1)..(482): Ceres Seq. ID no. 15177039
MGSFPKAKPNNTHTDTNTNTHNRVMGFLLVFFPEENNNTTPTIATKSTKPNLVSSSPSPHSLKRISSSSNNALLSKAQSTISICFLLLFTTLLLFTLSTFEPTHHKPRSIPPKSKLRKNTSSSDVAFPSTALQRMGTLYRRGTRAMNDIVVCHVPEDTTHDEFRIFLRLLHRSGLTSKSDVVFIFVSASSSTTFAHIVHEENTSFLSLINLHAQLNSTQWAKPSESNFDATRFLKAPKKGEPLWGKKIRTNYSGSEGELSRASYGSVLSFDANELDPENSLAGFLDRVPLSLRRWACYPMLFGRVRRNFKHVTLVDVKNVVIFNDPLGRVRNQSPESVFVYPNAKHGRNSERTQSHHPVNSVILMGGARGIRRVSHAMLVAIVRAAMQPHKRKNSVSDSAILSQLVRNKFALRNVHLIVSGESIPEASSLAGSTSFSDCAIIQRGTGNYYDLNSIVKKQICSSVMDSFVYNSDCKHLVKVEQ

SEQ ID NO: 60245 - protein, 458 aa, Glycine max
  peptide (1)..(458): Ceres Seq. ID no. 15177040
MGFLLVFFPEENNNTTPTIATKSTKPNLVSSSPSPHSLKRISSSSNNALLSKAQSTISICFLLLFTTLLLFTLSTFEPTHHKPRSIPPKSKLRKNTSSSDVAFPSTALQRMGTLYRRGTRAMNDIVVCHVPEDTTHDEFRIFLRLLHRSGLTSKSDVVFIFVSASSSTTFAHIVHEENTSFLSLINLHAQLNSTQWAKPSESNFDATRFLKAPKKGEPLWGKKIRTNYSGSEGELSRASYGSVLSFDANELDPENSLAGFLDRVPLSLRRWACYPMLFGRVRRNFKHVTLVDVKNVVIFNDPLGRVRNQSPESVFVYPNAKHGRNSERTQSHHPVNSVILMGGARGIRRVSHAMLVAIVRAAMQPHKRKNSVSDSAILSQLVRNKFALRNVHLIVSGESIPEASSLAGSTSFSDCAIIQRGTGNYYDLNSIVKKQICSSVMDSFVYNSDCKHLVKVEQ

SEQ ID NO: 60246 - DNA, 1362 bp, Glycine max
  misc_feature (1)..(1362): Ceres Seq. ID no. 12777206
attcgttcatcctcttgccaacacaacctcgttgctcatcttcaccgaagcacctcaaccattttcccaaccaaacctccatagaggaaaaaaaatccagactctaggccttcatggatagagaacaagaagagatgcaatttcttgggttctttggcatctacaaagaagcctccaagatcatactttcatggaggagaatcttcacccaaatcacctcaacactaatcctccctctctccttcatcttcctcatccacatggaaatctccaacctcctcttcaggaagattctcatcaacgaaatagtcatggacgaaacaaagcctaacacacctcaatacaacaagctcgatcacatgatctcttcagaaatggtcactcttgtggtcttcaaaatcgcatacttcactctgctcctcatattctccctcctctccacctcggcagtggtctgcaccatcgcctccatctacaccgcaaaagacgtgacattcaagagggtcatgagtgttgtccctaaggtgtggaagaggctcatgttgacctttctatgtgcctttgctgctttcttcgcttacaatatcatgactgcgctagttatgttcttgtccatagtcacaattgggttaagtagtggtgggcttgcggttttggtttcgataacggttttgtacttcattgggtttgtgtacctcaccgtggtgtggcaactagccagcgttgtcactgtgttggaggactcgtggggggttcgagccatggcgaagagcaaggagttgataagggggaagatggttttgtccatattcatctttttcacccttgtggcttcttttgtttccattagggttttgttcaaggtgatggtggtggatggatggagggtgagttctttggacaaaacagcatatggggttctctgtttcttgctattgtcttgtttgttcctctttgggcttgttttgcaaactgtgctctactttgtttgcaagtcctatcaccatgagaatattgacaaatcggctttggcagatcatcttgaagggtatcgtggagagtatgtgccattgacggctaaggatgttcagctggagcagtaccaagtttgatttataatatagcttaattagataaattaaattaatcatcatcatgtgtctagattgatgatgcggttaattatatctgctttggtttcttgatgtctttagaaatatcttttgtgtgtgaaattaaggcaggtgtgaagtgaatttcattactctctatatgattggttatatgtatttaattttctgtttaaaaataggactcttttgcaaaggtgtattaattaatgctatgagatgactttatttc

SEQ ID NO: 60247 - protein, 332 aa, Glycine max
  peptide (1)..(332): Ceres Seq. ID no. 12777207
MDREQEEMQFLGFFGIYKEASKIILSWRRIFTQITSTLILPLSFIFLIHMEISNLLFRKILINEIVMDETKPNTPQYNKLDHMISSEMVTLVVFKIAYFTLLLIFSLLSTSAVVCTIASIYTAKDVTFKRVMSVVPKVWKRLMLTFLCAFAAFFAYNIMTALVMFLSIVTIGLSSGGLAVLVSITVLYFIGFVYLTVVWQLASVVTVLEDSWGVRAMAKSKELIRGKMVLSIFIFFTLVASFVSIRVLFKVMVVDGWRVSSLDKTAYGVLCFLLLSCLFLFGLVLQTVLYFVCKSYHHENIDKSALADHLEGYRGEYVPLTAKDVQLEQYQV

SEQ ID NO: 60248 - protein, 325 aa, Glycine max
  peptide (1)..(325): Ceres Seq. ID no. 12777208
MQFLGFFGIYKEASKIILSWRRIFTQITSTLILPLSFIFLIHMEISNLLFRKILINEIVMDETKPNTPQYNKLDHMISSEMVTLVVFKIAYFTLLLIFSLLSTSAVVCTIASIYTAKDVTFKRVMSVVPKVWKRLMLTFLCAFAAFFAYNIMTALVMFLSIVTIGLSSGGLAVLVSITVLYFIGFVYLTVVWQLASVVTVLEDSWGVRAMAKSKELIRGKMVLSIFIFFTLVASFVSIRVLFKVMVVDGWRVSSLDKTAYGVLCFLLLSCLFLFGLVLQTVLYFVCKSYHHENIDKSALADHLEGYRGEYVPLTAKDVQLEQYQV

SEQ ID NO: 60249 - protein, 283 aa, Glycine max
  peptide (1)..(283): Ceres Seq. ID no. 12777209
MEISNLLFRKILINEIVMDETKPNTPQYNKLDHMISSEMVTLVVFKIAYFTLLLIFSLLSTSAVVCTIASIYTAKDVTFKRVMSVVPKVWKRLMLTFLCAFAAFFAYNIMTALVMFLSIVTIGLSSGGLAVLVSITVLYFIGFVYLTVVWQLASVVTVLEDSWGVRAMAKSKELIRGKMVLSIFIFFTLVASFVSIRVLFKVMVVDGWRVSSLDKTAYGVLCFLLLSCLFLFGLVLQTVLYFVCKSYHHENIDKSALADHLEGYRGEYVPLTAKDVQLEQYQV

SEQ ID NO: 60250 - DNA, 904 bp, Glycine max
  misc_feature (1)..(904): Ceres Seq. ID no. 13594363
aatgactcacacgctggcaagaaacaacacgatgtgcacattagagaagagaggacccctcttcgtcctaaccctaaccagcgaattcgacgaccagcaccgcctcaaccccaccctcctatcttccctcctcgctgcgctctccgaagtcaagtcccaagccaccgccggctccgccctcctcaccgccgcgcacggcagattcttctgcaacggcttcgacttccgctgggcccaggccgccggcgaccagccctccgcccgcctccgcctccgccgcatgtccgacgccctccgccccgtcctcgccgcgctcctctccctccccatccccaccgttgccgccgtctccggccacgccgccgctgccggagcaatcttcgccctcgcgcacgactacgtcctcatgcgcgccgaccgcggtgtgatctactttccggaggtggacctgggaatcactcttccagaatacttcgccgccgtcgccggggcgaagatcccggcggcggcgctgcgtgacgttgtgttggccggaaggaaggttagggcggagggggcggtggagatggggatcgtgcactcggcgcacgatagcgcggagggcaccgtggaggctgcgatgcgcctgggggaggagttagcacggagaaagtgggttggggacgcttatgcggaaatcagaaagagtttgtaccctgaagtgtgtgctgctttgggattaacacccaaaaccatcgtttctaagatctgattacttgtaatttgaattgcacaaacaacaatttaacagtatgagaaaacaaaaaataaaaaatctatgttcgaagaatgaatttgaaatgtgatcaataatacagtgtgtatggttctacaatcatatgatacaagcatttatatttcttgt

SEQ ID NO: 60251 - protein, 249 aa, Glycine max
  peptide (1)..(249): Ceres Seq. ID no. 13594364
MTHTLARNNTMCTLEKRGPLFVLTLTSEFDDQHRLNPTLLSSLLAALSEVKSQATAGSALLTAAHGRFFCNGFDFRWAQAAGDQPSARLRLRRMSDALRPVLAALLSLPIPTVAAVSGHAAAAGAIFALAHDYVLMRADRGVIYFPEVDLGITLPEYFAAVAGAKIPAAALRDVVLAGRKVRAEGAVEMGIVHSAHDSAEGTVEAAMRLGEELARRKWVGDAYAEIRKSLYPEVCAALGLTPKTIVSKI

SEQ ID NO: 60252 - protein, 239 aa, Glycine max
  peptide (1)..(239): Ceres Seq. ID no. 13594365
MCTLEKRGPLFVLTLTSEFDDQHRLNPTLLSSLLAALSEVKSQATAGSALLTAAHGRFFCNGFDFRWAQAAGDQPSARLRLRRMSDALRPVLAALLSLPIPTVAAVSGHAAAAGAIFALAHDYVLMRADRGVIYFPEVDLGITLPEYFAAVAGAKIPAAALRDVVLAGRKVRAEGAVEMGIVHSAHDSAEGTVEAAMRLGEELARRKWVGDAYAEIRKSLYPEVCAALGLTPKTIVSKI

SEQ ID NO: 60253 - protein, 172 aa, Glycine max
  peptide (1)..(172): Ceres Seq. ID no. 13594366
NDSHAGKKQHDVHIREERTPLRPNPNQRIRRPAPPQPHPPIFPPRCALRSQVPSHRRLRPPHRRARQILLQRLRLPLGPGRRRPALRPPPPPPHVRRPPPRPRRAPLPPHPHRCRRLRPRRRCRSNLRPRARLRPHARRPRCDLLSGGGPGNHSSRILRRRRRGEDPGGGAA

SEQ ID NO: 60254 - DNA, 1473 bp, Glycine max
  misc_feature (1)..(1473): Ceres Seq. ID no. 12608490
gcctgttctacttctgggacttgttcttccacccaacgagtggagttaaattctaacccaacaaacaaacacaacaaattcaaattgtgcgaaaaataaaacagaaagtctcttgaacaaaaacttcgaactcaccaactcaaactcgctgctttcaaacttcaaagtaaaacccaactctatttccttctctcaggtctcagagtggcaaactgtaaagttttgatgcagaatggctgcaaccagggctcgagttagtagcttctctcgcaatgtatcaactgtgacttctcagaatcatggacttaagcatggccctaatgggacaatgttcatttcatctgggattccagatctggacaagattttaggtggtggtttttctctgggtagccttgtcatggttatggaagatcctgaagcacctcatcatatgcttctattgagaaattttatgtctcaaggacttgtgcaaaaacagccactcttgtatgctagtgcatctagagatcctaaaagttttctcggtactttgcctagtccggcgtcacccaaaggggataataaatcttcagatcttagccatgaaaaggatctaagaatcgcttggcaatacaaaaagtattttggtgagcctcagctaaatctgaacactaataatggtggtcagcatgattactgtaatgattttgacttgagaaagcccctggaccggcacttttttagtggcaataatgtagattgtgttagcatcaaagattctcctaaccttactgctcttcaagattgttgtgctggatttctagctaaattctcaagaaatgaaggcagcatttcctctgctggtcgtattgcaattcaatcattctgttctccacaatgcaagtattcaaatgaggagtggcatatgctttcttttattaggtccctaaagggcatggcccggtcttcaaacgctgttattgttgtaacctttccaccttcacttcttcctccatcttgttcaaaaagattgcagcatatggcagacaccttgctttctgtcaaagccattccagatgaggataaggaacttgcaaaactcctcactggttaccaggatatgattgggcttctaaatgtacacaaagttgcacggttaaatacacaggttcctgtgattctggaggccacaacattctccataaaattgcaaaaacgaaggtttttggttttagaatgtctaaatcaagccccagttgatggttcaagtggcagttcgtatggcacatctggcggttgttctgggtcaactaaagctggaccacttgatttttagactataccttatttataactgaaggcttttatcaaccaaaaatacgatatagccatagtgagtcaggctcaatgtttttcttagtgcttgaaatttagccttctaaattgtgttactccttttcttttttgttcttttgatgattaattggttgc

SEQ ID NO: 60255 - protein, 361 aa, Glycine max
  peptide (1)..(361): Ceres Seq. ID no. 12608491
MAATRARVSSFSRNVSTVTSQNHGLKHGPNGTMFISSGIPDLDKILGGGFSLGSLVMVMEDPEAPHHMLLLRNFMSQGLVQKQPLLYASASRDPKSFLGTLPSPASPKGDNKSSDLSHEKDLRIAWQYKKYFGEPQLNLNTNNGGQHDYCNDFDLRKPLDRHFFSGNNVDCVSIKDSPNLTALQDCCAGFLAKFSRNEGSISSAGRIAIQSFCSPQCKYSNEEWHMLSFIRSLKGMARSSNAVIVVTFPPSLLPPSCSKRLQHMADTLLSVKAIPDEDKELAKLLTGYQDMIGLLNVHKVARLNTQVPVILEATTFSIKLQKRRFLVLECLNQAPVDGSSGSSYGTSGGCSGSTKAGPLDF

SEQ ID NO: 60256 - protein, 329 aa, Glycine max
  peptide (1)..(329): Ceres Seq. ID no. 12608492
MFISSGIPDLDKILGGGFSLGSLVMVMEDPEAPHHMLLLRNFMSQGLVQKQPLLYASASRDPKSFLGTLPSPASPKGDNKSSDLSHEKDLRIAWQYKKYFGEPQLNLNTNNGGQHDYCNDFDLRKPLDRHFFSGNNVDCVSIKDSPNLTALQDCCAGFLAKFSRNEGSISSAGRIAIQSFCSPQCKYSNEEWHMLSFIRSLKGMARSSNAVIVVTFPPSLLPPSCSKRLQHMADTLLSVKAIPDEDKELAKLLTGYQDMIGLLNVHKVARLNTQVPVILEATTFSIKLQKRRFLVLECLNQAPVDGSSGSSYGTSGGCSGSTKAGPLDF

SEQ ID NO: 60257 - protein, 305 aa, Glycine max
  peptide (1)..(305): Ceres Seq. ID no. 12608493
MVMEDPEAPHHMLLLRNFMSQGLVQKQPLLYASASRDPKSFLGTLPSPASPKGDNKSSDLSHEKDLRIAWQYKKYFGEPQLNLNTNNGGQHDYCNDFDLRKPLDRHFFSGNNVDCVSIKDSPNLTALQDCCAGFLAKFSRNEGSISSAGRIAIQSFCSPQCKYSNEEWHMLSFIRSLKGMARSSNAVIVVTFPPSLLPPSCSKRLQHMADTLLSVKAIPDEDKELAKLLTGYQDMIGLLNVHKVARLNTQVPVILEATTFSIKLQKRRFLVLECLNQAPVDGSSGSSYGTSGGCSGSTKAGPLDF

SEQ ID NO: 60258 - DNA, 1454 bp, Glycine max
  misc_feature (1)..(1454): Ceres Seq. ID no. 15177935
aacgtacaaggccttttcttatctctctctttctttctcatcttttggggcctcaaaatagtaggtgccactacacaatatgggttccaaagtaaagaccttggttttgctctctttgttttgcttggctctatttgagtccttgcaccaagcaagagcagcaaagtcacataatgatcataatgtgactcgcttgaaggggagaaaggagttaaatagatgtaatttgttcattggaagttgggttattgacccttcacaccctctctatgactcctcaagctgcccctttatagatgctgagtttgattgccaaaagtatgggagacccgataagcagtatctcaaatactcttggaagcctgattcatgtgccttacccaggttcgatggagtgaatttcttgaccaagtggaagggtaagaagataatgtttgtgggagactcattgagtttgaacatgtgggaatcattgtcctgcatgcttcacgcgtcggtgccgaatgccaccaccagctttgtgaggagacaagcactctccactgtgaccttccaggactatggagtaaccatacaactatatcgcacaccatatttggtggacataattcaagaagatgctgggcgagtgctcacactagactccatacaagctggtaatgcttggacaggcatggacatgttgatcttcaactcctggcattggtggacccacaaaggagattctcaaggatgggattacataaggaacggttccaatctagtaaaggatatggatcgtttggatgcatttttcaaagggatgaccacatgggctggatgggttgatcaaaaggttgactctaccaaaactaaagttttctttcaaggcatttctcctactcattatcaaggtcaggagtggaatcaaccaagaaagagttgtagtggagaactagaaccatcagcagggtcaacatatcctgctggtctacctcctgcagcaaacatagtgaacaaagtgttaaagaacatgaagaatcaagtttatctacttgacataacacttctctcacaactacgaaaagatgcccacccttctgcctatggtggcttggatcatacgggtaatgactgcagtcattggtgcctaccaggagtacctgatacttggaatgaacttctatatgcagctctatttatgtgaagttatatattaatgttatattctagtaattaaaggaatggattcaattgtattataggactcttgaagaatagttatgacagacttgcaaactaagttagtcagggtgatcaaattgttacacgtgtccagaaattgggaaaagtactttagaaggggatagtaatgtttattggattacaaattggaattgtactaatgattgattgatgcataattcatattgaatctttcatattaataaaagcttgcaaatttcagttttaag

SEQ ID NO: 60259 - protein, 368 aa, Glycine max
  peptide (1)..(368): Ceres Seq. ID no. 15177936
MGSKVKTLVLLSLFCLALFESLHQARAAKSHNDHNVTRLKGRKELNRCNLFIGSWVIDPSHPLYDSSSCPFIDAEFDCQKYGRPDKQYLKYSWKPDSCALPRFDGVNFLTKWKGKKIMFVGDSLSLNMWESLSCMLHASVPNATTSFVRRQALSTVTFQDYGVTIQLYRTPYLVDIIQEDAGRVLTLDSIQAGNAWTGMDMLIFNSWHWWTHKGDSQGWDYIRNGSNLVKDMDRLDAFFKGMTTWAGWVDQKVDSTKTKVFFQGISPTHYQGQEWNQPRKSCSGELEPSAGSTYPAGLPPAANIVNKVLKNMKNQVYLLDITLLSQLRKDAHPSAYGGLDHTGNDCSHWCLPGVPDTWNELLYAALFM

SEQ ID NO: 60260 - protein, 251 aa, Glycine max
  peptide (1)..(251): Ceres Seq. ID no. 15177937
MFVGDSLSLNMWESLSCMLHASVPNATTSFVRRQALSTVTFQDYGVTIQLYRTPYLVDIIQEDAGRVLTLDSIQAGNAWTGMDMLIFNSWHWWTHKGDSQGWDYIRNGSNLVKDMDRLDAFFKGMTTWAGWVDQKVDSTKTKVFFQGISPTHYQGQEWNQPRKSCSGELEPSAGSTYPAGLPPAANIVNKVLKNMKNQVYLLDITLLSQLRKDAHPSAYGGLDHTGNDCSHWCLPGVPDTWNELLYAALFM

SEQ ID NO: 60261 - protein, 241 aa, Glycine max
  peptide (1)..(241): Ceres Seq. ID no. 15177938
MWESLSCMLHASVPNATTSFVRRQALSTVTFQDYGVTIQLYRTPYLVDIIQEDAGRVLTLDSIQAGNAWTGMDMLIFNSWHWWTHKGDSQGWDYIRNGSNLVKDMDRLDAFFKGMTTWAGWVDQKVDSTKTKVFFQGISPTHYQGQEWNQPRKSCSGELEPSAGSTYPAGLPPAANIVNKVLKNMKNQVYLLDITLLSQLRKDAHPSAYGGLDHTGNDCSHWCLPGVPDTWNELLYAALFM

SEQ ID NO: 60262 - DNA, 1743 bp, Glycine max
  misc_feature (1)..(1743): Ceres Seq. ID no. 15168476
atcaaattgggatgttcttctcaggaaggtccaaaaagtcagtgcagcgaaaacggacgatccgaagaatacccttttcatctctctctacaataatcatcatcttcctcttcttcttcagtaaattattgtacctgacgatcttctcggtttgatcttatatcaatggaatttttttagacagaactcggattcacagggaaatctgattgcataggaacaaaaaagacaacacctttttatctctacacaagtgattatggcggttgctgagaatgttggggccaaaatcggttcttccagtcaaaatttggaaaacaatgtagtgtcatcgaactcaggcgaggttgagcaatcaaaacccagaagtgggtccatcaacgacgatcagaagctgaacaacggtgtcttcaaccaccaagatagagttcctggcactatgccagtgcccaatagcaattataactacgaggcccaaatgggtcagatgcacacaaatggggtgaacaatgatgggtatggaatgaatggggtcatttgtggggagaatgggggtgagagtttcaagcgtgatatgagggatttggaagagcttttgtcaaagttgaatcccatggctgaggaatttgtgcccccatcactaaccaatactcatggctacctacctggacctggtgccggtgctggtgccgggtttggttaccctaataattttatactgctcaataactttggtgatgctaacggtcaaactaacagaaggaggaagaatggctataatcatgggaagcgaagagtgaatcataaaatggatatggagaagagagaagagatgattaggaggactgtttatgtgtcagacattgatcaactggttactgaagagcagttggcggggctctttcttaactgtggccaggtcgttgattgccgtgtttgtggggatcctaattctattctgaggtttgccttcgttgagtttacagatgaagatggtgcaagggctgctttgaacctgtctggaaccatgcttggatattacccgttgagagtactaccttcgaaaactgctattgcccctgttaatccaacatttttgcccaggtctgaagatgaaagggagatgtgttcaagaacaatttattgcacaaatattgacaagaagcttactcaagctgatgtcaaacacttctttgaatctatttgcggagaggttcaacggttgaggcttcttggagattaccatcattcaactcgaattgcttttgttgagttcacagtggctgagagtgcaattgcagctctaagctgtagtggggtgattttgggttcactgcccataagggtaagtccatcgaagacaccagttcgttcacgtgctcctcgtccttctatgcactgaatcaactttccatgtttctggggttgattgctgctgagatatatttacatatatacatacatagaaacagctatgttctaaggaacatgtggcatttagttggtacttttgtcctcatgtcttacagtatggttactttgctccccttgggggattatgggtctctgttttagcatgtagagtcgaatcgtacttcgaggatcttgatggcttaatttatgatgcacaatgtgtcgtgttgatcatgcaaggagagaagtttatggttgttgggtgtttctaacatctggaattcattttaaagaaacatgttacaaagccttcgttttcgttaaaaaaag

SEQ ID NO: 60263 - protein, 380 aa, Glycine max
  peptide (1)..(380): Ceres Seq. ID no. 15168477
MAVAENVGAKIGSSSQNLENNVVSSNSGEVEQSKPRSGSINDDQKLNNGVFNHQDRVPGTMPVPNSNYNYEAQMGQMHTNGVNNDGYGMNGVICGENGGESFKRDMRDLEELLSKLNPMAEEFVPPSLTNTHGYLPGPGAGAGAGFGYPNNFILLNNFGDANGQTNRRRKNGYNHGKRRVNHKMDMEKREEMIRRTVYVSDIDQLVTEEQLAGLFLNCGQVVDCRVCGDPNSILRFAFVEFTDEDGARAALNLSGTMLGYYPLRVLPSKTAIAPVNPTFLPRSEDEREMCSRTIYCTNIDKKLTQADVKHFFESICGEVQRLRLLGDYHHSTRIAFVEFTVAESAIAALSCSGVILGSLPIRVSPSKTPVRSRAPRPSMH

SEQ ID NO: 60264 - protein, 320 aa, Glycine max
  peptide (1)..(320): Ceres Seq. ID no. 15168478
MPVPNSNYNYEAQMGQMHTNGVNNDGYGMNGVICGENGGESFKRDMRDLEELLSKLNPMAEEFVPPSLTNTHGYLPGPGAGAGAGFGYPNNFILLNNFGDANGQTNRRRKNGYNHGKRRVNHKMDMEKREEMIRRTVYVSDIDQLVTEEQLAGLFLNCGQVVDCRVCGDPNSILRFAFVEFTDEDGARAALNLSGTMLGYYPLRVLPSKTAIAPVNPTFLPRSEDEREMCSRTIYCTNIDKKLTQADVKHFFESICGEVQRLRLLGDYHHSTRIAFVEFTVAESAIAALSCSGVILGSLPIRVSPSKTPVRSRAPRPSMH

SEQ ID NO: 60265 - protein, 307 aa, Glycine max
  peptide (1)..(307): Ceres Seq. ID no. 15168479
MGQMHTNGVNNDGYGMNGVICGENGGESFKRDMRDLEELLSKLNPMAEEFVPPSLTNTHGYLPGPGAGAGAGFGYPNNFILLNNFGDANGQTNRRRKNGYNHGKRRVNHKMDMEKREEMIRRTVYVSDIDQLVTEEQLAGLFLNCGQVVDCRVCGDPNSILRFAFVEFTDEDGARAALNLSGTMLGYYPLRVLPSKTAIAPVNPTFLPRSEDEREMCSRTIYCTNIDKKLTQADVKHFFESICGEVQRLRLLGDYHHSTRIAFVEFTVAESAIAALSCSGVILGSLPIRVSPSKTPVRSRAPRPSMH

SEQ ID NO: 60266 - DNA, 1600 bp, Glycine max
  misc_feature (1)..(1600): Ceres Seq. ID no. 15168496
aacacttacccatcccatggaatccgcaacatcatggagtaaccctctcccactttccagtctcccttccccttcgcattcacgccacccctccgccttcaaatttatggctttttcaactcttcacactttctcactcccttccctttcttctccctcttctttccacccatttcccctttcctctctctctccaaaacccacttctttcaaccctcgccctctcttccctcgcaccatgcacgcctcgcgcatccaagatgccgttggaggggcactggccctcgtccaatcgtcccccgctacgtggcagtccgcgcttctcagcaacgcgctgatctttttcttggggtctccgattttggtcagcgggttgtctctttccgggatcggtgctgcgtttctgctcggaacgctcacttggcgcgcttttgggccttctgggttcttccttgttgccacgtactttgttattggtactgctgctacaaaggtcaaaatggcacagaaagtggctcagggggttgctgagaaaaaaagaggaagaaggggtccgggcagtgttattggatccagtgctgctggttgcatttgtgctttcctcacgatttttggtgttgggggagaggcattttctcggctttggagacttggatttgttgccagtttctgcactaagttgagtgacactgtctcaagtgagattgggaaggcatatggcaaaacaacgtaccttgttacaacattcaaggtagtcccaagaggcacagaaggggctgttagtgttgaaggaaccttggcagggattttagcatccatagttctagcatttgtcagttttctcatcggtgaggttggttcacatgaagcaattatatgtgtactagctgctcagattgctaatcttggtgagagcataattggtgctgcacttcaagagaaggaaggatttaaatggcttaacaatgatgcagtcaatgtcatcaacatatcaatgggcagtatcatagcagtcttcatgcagcaagcactccagatctggggttcctaaacttgatgcagggttttcgaggagctcaatcatattaacatagtgaccatcttgataagtgcttatctagggcacggatttgaacaatggagcagtttggataaaatgattattcgtttatttgtcattgaaaactgacttggatatttatactcctggatgtttgagtgccatatgagaagcagccttctctgacacaagattcatctgcaaatttaaaatggctagaaacccgtccttctgatcatacccaaaccatgttggttgttacaaaggtgtggcaatggaaaccacaaaactcagtaagctgtagccatgattcaactcttgtatgggaagtagtggttcttccaaaatgtagatgtgaacttcttcttcttgatctagaacagtttcaaccaagcatttctgtctatcgttcttgtttgtcccttttattttctggctgttgggagggtaagattgggggggaggggtctttgtttctggccttgatccgtttttttaaatgcatgcactcactgaaatacagtcattgaaagaatagtt

SEQ ID NO: 60267 - protein, 349 aa, Glycine max
  peptide (1)..(349): Ceres Seq. ID no. 15168497
TLTHPMESATSWSNPLPLSSLPSPSHSRHPSAFKFMAFSTLHTFSLPSLSSPSSFHPFPLSSLSPKPTSFNPRPLFPRTMHASRIQDAVGGALALVQSSPATWQSALLSNALIFFLGSPILVSGLSLSGIGAAFLLGTLTWRAFGPSGFFLVATYFVIGTAATKVKMAQKVAQGVAEKKRGRRGPGSVIGSSAAGCICAFLTIFGVGGEAFSRLWRLGFVASFCTKLSDTVSSEIGKAYGKTTYLVTTFKVVPRGTEGAVSVEGTLAGILASIVLAFVSFLIGEVGSHEAIICVLAAQIANLGESIIGAALQEKEGFKWLNNDAVNVINISMGSIIAVFMQQALQIWGS

SEQ ID NO: 60268 - protein, 344 aa, Glycine max
  peptide (1)..(344): Ceres Seq. ID no. 15168498
MESATSWSNPLPLSSLPSPSHSRHPSAFKFMAFSTLHTFSLPSLSSPSSFHPFPLSSLSPKPTSFNPRPLFPRTMHASRIQDAVGGALALVQSSPATWQSALLSNALIFFLGSPILVSGLSLSGIGAAFLLGTLTWRAFGPSGFFLVATYFVIGTAATKVKMAQKVAQGVAEKKRGRRGPGSVIGSSAAGCICAFLTIFGVGGEAFSRLWRLGFVASFCTKLSDTVSSEIGKAYGKTTYLVTTFKVVPRGTEGAVSVEGTLAGILASIVLAFVSFLIGEVGSHEAIICVLAAQIANLGESIIGAALQEKEGFKWLNNDAVNVINISMGSIIAVFMQQALQIWGS

SEQ ID NO: 60269 - protein, 314 aa, Glycine max
  peptide (1)..(314): Ceres Seq. ID no. 15168499
MAFSTLHTFSLPSLSSPSSFHPFPLSSLSPKPTSFNPRPLFPRTMHASRIQDAVGGALALVQSSPATWQSALLSNALIFFLGSPILVSGLSLSGIGAAFLLGTLTWRAFGPSGFFLVATYFVIGTAATKVKMAQKVAQGVAEKKRGRRGPGSVIGSSAAGCICAFLTIFGVGGEAFSRLWRLGFVASFCTKLSDTVSSEIGKAYGKTTYLVTTFKVVPRGTEGAVSVEGTLAGILASIVLAFVSFLIGEVGSHEAIICVLAAQIANLGESIIGAALQEKEGFKWLNNDAVNVINISMGSIIAVFMQQALQIWGS

SEQ ID NO: 60270 - DNA, 772 bp, Glycine max
  misc_feature (1)..(772): Ceres Seq. ID no. 14316530
attctccaaccaacggcgacaacaacaaagattctttctagtttcttcctttcctttcctttttcgtcgccaacacggtaaacaaaaccccccaaatttcctcaattagggtttcaatccacattccaattccccaaccctcttcttccccatcctccaaatcccgaaactttccccaactgggtcctcaagtacgccacggcgagccctcgtagctcgcgatctcagaaaccaacgatgccgaaatcctcacgattcctcgtcgtcgcgatcgccgtcgccgcgctctgcgtgatcctccccgtcgcggcggcggcggatctcgaggaccccggcgtgctgcggctgccgtcggacagcctgtgcggcaaaacgacgccgtcttcgtgcccggcaaagtgcttccgcgccgaccccgtttgcggcgcggacggcgtgacgtactggtgcggttgcgcagaggcggcgtgcgcaggcgtggaggttgcgaaattggggttctgtgaagtcgggaatggtggctcggcgccgattcctgggcaagctctgcttttggtgcacattgtttggctcattgtgttggggttctccgtgttgttcggtcttttttagataattgggtttctttatgtatctaccatgatcagagggtgttatggttttggttctttgggattctttgagggttctttttgtaaattgatcaaacggccattcttgtattgtatgtatgattattcttattattgtaatttcacaactttcttgattc

SEQ ID NO: 60271 - protein, 124 aa, Glycine max
  peptide (1)..(124): Ceres Seq. ID no. 14316531
MPKSSRFLVVAIAVAALCVILPVAAAADLEDPGVLRLPSDSLCGKTTPSSCPAKCFRADPVCGADGVTYWCGCAEAACAGVEVAKLGFCEVGNGGSAPIPGQALLLVHIVWLIVLGFSVLFGLF

SEQ ID NO: 60272 - DNA, 1061 bp, Glycine max
  misc_feature (1)..(1061): Ceres Seq. ID no. 14316536
gaacaaattaagagtaattgtcaccaacatagtaacatttaaccacacctgtggccaaatgacatcctcagttcccttggtctccaccttattgctttgctctattgctcttctctactctgcatcatttggagctgaagcatggacctcgccctacatacccgtctcttccctcatcagcaaaagtctttatgacacatttttccttcacaaagatgacactgcatgccctgccaaagacttctacccctacgacgccttcattcgtgcatccaaatccttccctgcgtttggtaccaccggatgtttagcaacacgcaagcgtgagattgctgcgtttctcgctcagatttcccacgaaaccactggcggctgggccaccgcacccgacggcccatttgcatggggtctctgcttcaaggaagaaattagtcctcagagtaattactgtgattctactaacacccaatggccttgtttcccaggcaaaagctacaagggtcgaggacccattcaactttcttggaactacaactatggtccagcagggaaggctttgggatttgatgggctgaggaacccagagattgtggcgaacaattctgtgatagccttcaaaactgctatgtggttttggatgacagagcaaaagccaaaaccttcatgccacaatgtgatggttgggatatatgtgccgacagaagatgacatagcagcaaaccgaacagcgggttatggtttggtgactaacataatcaatggtggactggaatgtgggattcctggtgatgcaagagtgaatgatcggattgggtttttcgaaaggtatacgaagttgttcaacgtggacactggacctaacttggattgtgcatatcagaaacccttctaactctttcgttatgtttttgttttgtgtttttcttttcctttaatttaatttttttttctctgccaagactttaataatgtattgaaagaaagcaaatactacctgcttcatggaattttcctaatgtactcaaaacagaagttgacaaacaaagttttatattattctt

SEQ ID NO: 60273 - protein, 296 aa, Glycine max
  peptide (1)..(296): Ceres Seq. ID no. 14316537
NKLRVIVTNIVTFNHTCGQMTSSVPLVSTLLLCSIALLYSASFGAEAWTSPYIPVSSLISKSLYDTFFLHKDDTACPAKDFYPYDAFIRASKSFPAFGTTGCLATRKREIAAFLAQISHETTGGWATAPDGPFAWGLCFKEEISPQSNYCDSTNTQWPCFPGKSYKGRGPIQLSWNYNYGPAGKALGFDGLRNPEIVANNSVIAFKTAMWFWMTEQKPKPSCHNVMVGIYVPTEDDIAANRTAGYGLVTNIINGGLECGIPGDARVNDRIGFFERYTKLFNVDTGPNLDCAYQKPF

SEQ ID NO: 60274 - protein, 277 aa, Glycine max
  peptide (1)..(277): Ceres Seq. ID no. 14316538
MTSSVPLVSTLLLCSIALLYSASFGAEAWTSPYIPVSSLISKSLYDTFFLHKDDTACPAKDFYPYDAFIRASKSFPAFGTTGCLATRKREIAAFLAQISHETTGGWATAPDGPFAWGLCFKEEISPQSNYCDSTNTQWPCFPGKSYKGRGPIQLSWNYNYGPAGKALGFDGLRNPEIVANNSVIAFKTAMWFWMTEQKPKPSCHNVMVGIYVPTEDDIAANRTAGYGLVTNIINGGLECGIPGDARVNDRIGFFERYTKLFNVDTGPNLDCAYQKPF

SEQ ID NO: 60275 - DNA, 1562 bp, Glycine max
  misc_feature (1)..(1562): Ceres Seq. ID no. 15171152
attaagcgcattcccatgttcggtcactatcgcagggcattgctctgcttcaagcacaacccaaactccatcactgcaatctccacacccttctctattcttctccgatcattctccacttcctcttccgaccataaacagcaacactcattcaccttaaactacctcctcaacaccttcggcttctccccagaaaccgcctcaaaactctccacccgaatccgcctcgaaacctcccacgatcctgactcaatcctctccctcttcaaatcccacggcttctccgactcccatatccgccgcatcatccaaacatacccttacttcctctcctacaacgcccgcaaaaccatcctccccaaactcaccttcctcctctccaaaggcgcctccacctccgacctcgttcgcatcgtcaccaaaaaccctagaatcctccacttcgatctccacaacgccatcaccccgcgctacgacttcatcaaaaaattcatgctttccgatgattccaccctccgctccatcaaatcatgccccagcatcatcttttcgaacacccccctcctcaacattcaatttctcctccacaacgatgtcccggaatccaaggttgttatgttgcttcgctactgggcctgctcgctcgttgccaatgcccccacgtttcaggatgcggttcgggaggttatggaattgggcttcaggcccaacaaaacgttgttcttggtggcacttcgtgctaagcttgtgaggaaatcgttgtgggagaggaaggttgaggtgtataggaaatggggctggtctgaggagattctgctttccacgtttctgaggaacccctggtgtatgctggtctctgagaagaaaattgaggccatgatggagttttttattactcatttgggtttggattctttgtgttttgctaagcatcccgtgcttattgcgttgagcttggagaaaagggttgttcccagggcttctgtgttgcagtttcttttggcgaaaggtttgcttaaggatgttaattgggcgtccgcgtttatagttactgataagattttcttgcagaaatttgtggtttcctatgagaaggaagccgatcagctgttgaagctctatgaagagaagagagatgttcctagagaagagagatgttgaagctctctgaagccgatcagctgtcaaagggaactttgtaactggaatggaaccatatggattggtgtgatcatagagacttgttcatgatcatgactcttctaccatgttttgtcaggattcctgactttagtggtagactggtagtagaaggtttctctctatcattagctgaaattatatggtgaaacttgaggtatattatatcttgccttttcagttactattgctgaaataattggtatttcagtttaaacttaataaattctgttacttgattcagtagaattcccttaattgtttaaatccagggttgtggaaaccactattttcattttacaattaaagctatttctggctgtgatgccatcatcaatagtttgttctcaaccagttgatgt

SEQ ID NO: 60276 - protein, 386 aa, Glycine max
  peptide (1)..(386): Ceres Seq. ID no. 15171153
IKRIPMFGHYRRALLCFKHNPNSITAISTPFSILLRSFSTSSSDHKQQHSFTLNYLLNTFGFSPETASKLSTRIRLETSHDPDSILSLFKSHGFSDSHIRRIIQTYPYFLSYNARKTILPKLTFLLSKGASTSDLVRIVTKNPRILHFDLHNAITPRYDFIKKFMLSDDSTLRSIKSCPSIIFSNTPLLNIQFLLHNDVPESKVVMLLRYWACSLVANAPTFQDAVREVMELGFRPNKTLFLVALRAKLVRKSLWERKVEVYRKWGWSEEILLSTFLRNPWCMLVSEKKIEAMMEFFITHLGLDSLCFAKHPVLIALSLEKRVVPRASVLQFLLAKGLLKDVNWASAFIVTDKIFLQKFVVSYEKEADQLLKLYEEKRDVPREERC

SEQ ID NO: 60277 - protein, 381 aa, Glycine max
  peptide (1)..(381): Ceres Seq. ID no. 15171154
MFGHYRRALLCFKHNPNSITAISTPFSILLRSFSTSSSDHKQQHSFTLNYLLNTFGFSPETASKLSTRIRLETSHDPDSILSLFKSHGFSDSHIRRIIQTYPYFLSYNARKTILPKLTFLLSKGASTSDLVRIVTKNPRILHFDLHNAITPRYDFIKKFMLSDDSTLRSIKSCPSIIFSNTPLLNIQFLLHNDVPESKVVMLLRYWACSLVANAPTFQDAVREVMELGFRPNKTLFLVALRAKLVRKSLWERKVEVYRKWGWSEEILLSTFLRNPWCMLVSEKKIEAMMEFFITHLGLDSLCFAKHPVLIALSLEKRVVPRASVLQFLLAKGLLKDVNWASAFIVTDKIFLQKFVVSYEKEADQLLKLYEEKRDVPREERC

SEQ ID NO: 60278 - protein, 222 aa, Glycine max
  peptide (1)..(222): Ceres Seq. ID no. 15171155
MLSDDSTLRSIKSCPSIIFSNTPLLNIQFLLHNDVPESKVVMLLRYWACSLVANAPTFQDAVREVMELGFRPNKTLFLVALRAKLVRKSLWERKVEVYRKWGWSEEILLSTFLRNPWCMLVSEKKIEAMMEFFITHLGLDSLCFAKHPVLIALSLEKRVVPRASVLQFLLAKGLLKDVNWASAFIVTDKIFLQKFVVSYEKEADQLLKLYEEKRDVPREERC

SEQ ID NO: 60279 - DNA, 1278 bp, Glycine max
  misc_feature (1)..(1278): Ceres Seq. ID no. 15168580
aattacgaaaacccctcttccaattctgaattagcctctctaatccttcgcagcgccagaaaacttcaaactacagtcaacgtttcaaaatccgcttctctgttcatcttctccccacccctgcctaaccgactataattttttcataacccgcttctgaatggaagtcaatcccacccacgacggtggcgatgacacctcggaaacgccactgccgccaatggtggacccatctccgtctccgtctccgcaaatgaaagaagaggtgatggacgcggagcaaggcggtgacgtatcgcttccaatgagcgttgttccggcgtcgttgacagtgtcaactgaggcagcggcgaaacgatcgtcgaaggaccggcacacgaaggtggagggacgcggccggagaatccgtatgccggcgacgtgcgcggcgaggatctttcagctgacgcgggaactgggacacaagtccgacggagaaacaatccggtggttgctggagcacgcagagccggcgatcatcgaggccaccggaaccggcaccataccggcgatcgcggtctcggtcggcggcacactcaagattccgacatcctcggaagcgagagcccagggagaagaagacactccgaaaaagcgaaggagaagagcattaaagagcgaattcatcaacctgaacgaaaaccaggtttcggtgtcttcagggctggcaccaatcgcacaaagcagcgcatatggaagtggtggtggtggacttgttcctctgtggcatggtaacggtgctgctgctgggcctttcttcgtgtttccgaacgcttcaaacccacctcagtattgggccattccggcaaccgcggccccgtttttcaacgtccaggcccggcccatttcggggttcgtttccgccttgcagatgcaacatgataaccaccaccactctttaataaacgctgctgcctcgggttctgttaaatcttcgtccactgtgagtgtcactagcagtgctgcttccactcaaatgctcaaggatttctccttcgaaatttatgacaagaaagagcttcaatttttaggtcaaccaccacaaccctcttcatagccttgaactttaatacaatattcaaatactagtgtctattttttgttttttcaattttagttttagacatgtttgtttgtaatagttaggaggatttagggacaaattatattgtattttaattgaaaccttttaatttaagctgttgatattttttttaaagtaaaattgtatttttgacc

SEQ ID NO: 60280 - protein, 311 aa, Glycine max
  peptide (1)..(311): Ceres Seq. ID no. 15168581
MEVNPTHDGGDDTSETPLPPMVDPSPSPSPQMKEEVMDAEQGGDVSLPMSVVPASLTVSTEAAAKRSSKDRHTKVEGRGRRIRMPATCAARIFQLTRELGHKSDGETIRWLLEHAEPAIIEATGTGTIPAIAVSVGGTLKIPTSSEARAQGEEDTPKKRRRRALKSEFINLNENQVSVSSGLAPIAQSSAYGSGGGGLVPLWHGNGAAAGPFFVFPNASNPPQYWAIPATAAPFFNVQARPISGFVSALQMQHDNHHHSLINAAASGSVKSSSTVSVTSSAASTQMLKDFSFEIYDKKELQFLGQPPQPSS

SEQ ID NO: 60281 - protein, 291 aa, Glycine max
  peptide (1)..(291): Ceres Seq. ID no. 15168582
MVDPSPSPSPQMKEEVMDAEQGGDVSLPMSVVPASLTVSTEAAAKRSSKDRHTKVEGRGRRIRMPATCAARIFQLTRELGHKSDGETIRWLLEHAEPAIIEATGTGTIPAIAVSVGGTLKIPTSSEARAQGEEDTPKKRRRRALKSEFINLNENQVSVSSGLAPIAQSSAYGSGGGGLVPLWHGNGAAAGPFFVFPNASNPPQYWAIPATAAPFFNVQARPISGFVSALQMQHDNHHHSLINAAASGSVKSSSTVSVTSSAASTQMLKDFSFEIYDKKELQFLGQPPQPSS

SEQ ID NO: 60282 - protein, 280 aa, Glycine max
  peptide (1)..(280): Ceres Seq. ID no. 15168583
MKEEVMDAEQGGDVSLPMSVVPASLTVSTEAAAKRSSKDRHTKVEGRGRRIRMPATCAARIFQLTRELGHKSDGETIRWLLEHAEPAIIEATGTGTIPAIAVSVGGTLKIPTSSEARAQGEEDTPKKRRRRALKSEFINLNENQVSVSSGLAPIAQSSAYGSGGGGLVPLWHGNGAAAGPFFVFPNASNPPQYWAIPATAAPFFNVQARPISGFVSALQMQHDNHHHSLINAAASGSVKSSSTVSVTSSAASTQMLKDFSFEIYDKKELQFLGQPPQPSS

SEQ ID NO: 60283 - DNA, 1627 bp, Glycine max
  misc_feature (1)..(1627): Ceres Seq. ID no. 14315338
ttttccctttgttttatattctttattttaacttttttctgttttggttgaccagagaggatatatcctcctttgtacttttgtttctcttaatgaattttcttattatataaaggaaatctattgaaaatagtttaatcgtgcacatttctatcagaaaaatatatgcaacatcttaatgagttaggacagtcatgttgaacttggagagttcatatatttagaagcaacttagggggggtttggtgaatgtaatcttttttcattcttggaaatcatgtttcctaggaatcatatttcctgggaatatctaaaatattactggaattgaaggacataattgtgtttttgcattataaaaaacttccccccttcatgggaatcttggactccacccctcccataggaaaattttactgggaaacacagttaaaaaataatttctgggaatgttaaactcttaggaatgattattaaaattgtcataccaaacatgggaattcaacattcacaacctaagattcttgagaaacttaagaaatcttccttccgaacactgccttaatgtttgatttaattgtactgagacatagttgtttgcttttatcttgtgtccttttccctgttttctttttattggagtatgtaatttccttattcctcaaagttaaacagagagcacattctatatccactgagaaggctacagtttctgctaccgatgaagattccattgctgatgtgatggaacagcatgacgaatttcttagttcaatgctggctcgttcagctaagttacagatggtcttcagatgttgggaaagaaatgatgttaaggaggtcattggcataatggcaaggatggatgatcatgctgtgattgctgatgttgttagcattataatggaaaaaattgatatcattacacttgagatatgtgctggtcttctgccacttctaactgatcttctacaaagtgaaatggaaagacatctaggaatatccttggaaatgctattgaaactggtcagaatatttggttcagtaatctattcaaccgtatcagctacacaacctgttggtgtcgatatcgaggcagagaacaggctagagcgttgcaacctctgcttcacagagcttgaaaaagtcaaacgttttttgccttctctttcaagaagaggaggatcaattgcaaaatctgcacaagagttgaatctggctttgcaggatgtttcgtgatcttttcctgattcaattatttccgccgctcaagttttaccggtgctttttaggggttttgtgcattttaaagatttaaacctccatacaagccaccgaatagtttgatgcattgtcatttggcattgaatgaagccttttcctgtatgtacatttattgctgttaaaaattcatggtaattgattagtggaggcactgatagctgctaattctgcgacatatactcgaagccaaagcttgaggcatgtcaccctctgctgatggttgcacagctgactataacctgtcgatatctgcttaatgtgtagatctcagtcggttccataactaacctaatatgtggcgcaagatactactgcctatctaatcttatttcaaaatttcatg

SEQ ID NO: 60284 - protein, 224 aa, Glycine max
  peptide (1)..(224): Ceres Seq. ID no. 14315339
MFDLIVLRHSCLLLSCVLFPVFFLLEYVISLFLKVKQRAHSISTEKATVSATDEDSIADVMEQHDEFLSSMLARSAKLQMVFRCWERNDVKEVIGIMARMDDHAVIADVVSIIMEKIDIITLEICAGLLPLLTDLLQSEMERHLGISLEMLLKLVRIFGSVIYSTVSATQPVGVDIEAENRLERCNLCFTELEKVKRFLPSLSRRGGSIAKSAQELNLALQDVS

SEQ ID NO: 60285 - protein, 164 aa, Glycine max
  peptide (1)..(164): Ceres Seq. ID no. 14315340
MEQHDEFLSSMLARSAKLQMVFRCWERNDVKEVIGIMARMDDHAVIADVVSIIMEKIDIITLEICAGLLPLLTDLLQSEMERHLGISLEMLLKLVRIFGSVIYSTVSATQPVGVDIEAENRLERCNLCFTELEKVKRFLPSLSRRGGSIAKSAQELNLALQDVS

SEQ ID NO: 60286 - protein, 154 aa, Glycine max
  peptide (1)..(154): Ceres Seq. ID no. 14315341
MLARSAKLQMVFRCWERNDVKEVIGIMARMDDHAVIADVVSIIMEKIDIITLEICAGLLPLLTDLLQSEMERHLGISLEMLLKLVRIFGSVIYSTVSATQPVGVDIEAENRLERCNLCFTELEKVKRFLPSLSRRGGSIAKSAQELNLALQDVS

SEQ ID NO: 60287 - DNA, 717 bp, Glycine max
  misc_feature (1)..(717): Ceres Seq. ID no. 12612239
atctccatcgcagttcgcaacagttcaacacacttacacaaccacacgtatcacctctagatcgatcacatttcgtagtccgtaccacgtccgacgatatggagtaccaggggcagcacggccacgccaccgacaaggtggaggagtacggccagcccgtggccgggcacggcggcgccaccggcggccccacggggacgcacggagctgccggagccggaggcgcgcagctccaggcgacgcgggacgagcacaagaccgacggcgttctgcgccgctccggcagctccagctccagcagctcgtctgaggacgacggcgtgggcgggaggaggaagaaggggatgaaggagaagatcaaggagaagctccccggcggagcccacaaggacgccaccgccgggcagcagcacacggcggtggcgggcgagtacgcgggcacgcacggcaccgaggccaccggcgagaagaagggcgtcatggacaagatcaaggagaagcttcccggcggacaatactgagccagctatgcatgcgtgtctctatgttccgtcaaagctcggctagcatttgcagccatgctttactacggataataaataataagtacaatggactccgatgtacgttgtgtgtacgaccgcgtccgtgtgacgcatttgtgtattcgtatacggtatgatgtgtgtacatacatcgtaatagaaaaacgtttgt

SEQ ID NO: 60288 - protein, 172 aa, Glycine max
  peptide (1)..(172): Ceres Seq. ID no. 12612240
LHRSSQQFNTLTQPHVSPLDRSHFVVRTTSDDMEYQGQHGHATDKVEEYGQPVAGHGGATGGPTGTHGAAGAGGAQLQATRDEHKTDGVLRRSGSSSSSSSSEDDGVGGRRKKGMKEKIKEKLPGGAHKDATAGQQHTAVAGEYAGTHGTEATGEKKGVMDKIKEKLPGGQY

SEQ ID NO: 60289 - protein, 140 aa, Glycine max
  peptide (1)..(140): Ceres Seq. ID no. 12612241
MEYQGQHGHATDKVEEYGQPVAGHGGATGGPTGTHGAAGAGGAQLQATRDEHKTDGVLRRSGSSSSSSSSEDDGVGGRRKKGMKEKIKEKLPGGAHKDATAGQQHTAVAGEYAGTHGTEATGEKKGVMDKIKEKLPGGQY

SEQ ID NO: 60290 - protein, 102 aa, Glycine max
  peptide (1)..(102): Ceres Seq. ID no. 12612242
SPSQFATVQHTYTTTRITSRSITFRSPYHVRRYGVPGAARPRHRQGGGVRPARGRARRRHRRPHGDARSCRSRRRAAPGDAGRAQDRRRSAPLRQLQLQQLV

SEQ ID NO: 60291 - DNA, 661 bp, Glycine max
  misc_feature (1)..(661): Ceres Seq. ID no. 15173311
actaaatccagaaggggaaaaaaagagagaaaagaaatcaggggtaaactttctctctctcccttgcttattcctcccaaaagaaaaagacggtttccgttggaaggaagaaagaaagaaattgagtttgagatctgattgtgcggcgacgatggagaacaacgacagcatcatatcgcgggagaagatcgaccaggcagcggtgtggctcggctccgccgtctcttccgctttcttttcctcattggaacgcttttcctgcgtcaacgtcgccacctctgaccccgacaacgacgatgacgacgacgattattactccaccaccaccgccactcccacctccgcatccaccaccaccaccaccgccctcgccaccactcctccctccgttcaggtcaacgggcaaaaaacaaacgacgacgtctccaacctccccgtttgaggcaatataacgacgacgacgtcgttgctgcgctgtgtatagacctttttcccttttcctcctttcgtgtgtgtgttatgtaaggattctcgattttcgttgcttcatacttttgaagtcgtgaaaaagaaaaaacaagatgtgatgcaattttatgcctgtctatttaattaactaattacatgcttatatatttttattaaattgtattattagttc

SEQ ID NO: 60292 - protein, 146 aa, Glycine max
  peptide (1)..(146): Ceres Seq. ID no. 15173312
LNPEGEKKREKKSGVNFLSLPCLFLPKEKDGFRWKEERKKLSLRSDCAATMENNDSIISREKIDQAAVWLGSAVSSAFFSSLERFSCVNVATSDPDNDDDDDDYYSTTTATPTSASTTTTTALATTPPSVQVNGQKTNDDVSNLPV

SEQ ID NO: 60293 - protein, 96 aa, Glycine max
  peptide (1)..(96): Ceres Seq. ID no. 15173313
MENNDSIISREKIDQAAVWLGSAVSSAFFSSLERFSCVNVATSDPDNDDDDDDYYSTTTATPTSASTTTTTALATTPPSVQVNGQKTNDDVSNLPV

SEQ ID NO: 60294 - DNA, 1654 bp, Glycine max
  misc_feature (1)..(1654): Ceres Seq. ID no. 15227091
aatccattatcaaaatcaatcatacccaacaacatcctccgacaccatgttgcacatggaaaaccccctcctgcagtcaacaaactcaattaccttcacattctttgggctgttgttatttctctttgttctttcatccatattcagaaaccgcggtgctgcaacaagaaaagcaccaccagaagcaagaggcgcgtggcctttaattggtcacatccacctcttaggtggctcaaaaccaccccatgtcacgttgggccacatggcggacaaatatggtcccgtcttcaccttgcgtctgggtgctcacaaaacgttggttgtgagcaattgggaaatggccaaacagtgctttaccgtcaacgacaaagcgtttgctagccgtcctaaatcagtgtcctttgaattgttgggatacaactattccatgattgggttcatcccttacggttcttattggcgtcacgtgcgcaaaattatcacgctggagcttctctctactcactgcatagacatgctcaagcacgtgatggtggccgaggttaaggcggcagtgaaagagacttacaagaacctaaagggttccgaaaaggcaacaactgaaatgaagaggtggttcggggacataacgttaaacgttatgttcagaacggtggtaggaaaacgttttgttggtgagaatgaagagaacgaacggatccgaaaggcgctgagagaattttttgacctgacgggggcgttcaatgtgtctgatgctcttccttatttgagatggttggatttggatggcgcagagaagaaaatgaaaaagacggcgaaagagttagatgggtttgttcaagtttggctggaagaacacaaaagtaaaaggaatagtgaagctgaacccaaaagtaaccaggacttgatggacgtgcttcttagccttgttgaggagggtcaagagtttgacggccaggatgctgacaccacaatcaaagctacttgcctgggcttaattttagctggctctgatacgacaacaacaacattgtcttgggctctctcattacttctcaataatcgtgaagtcctaaataaggcaatccacgaattagacacacaaattgggagtgaaaaaattgtagagatatcagacttaaaaaagctagaatatctccaatctatcatcaaggaaacattacgtttgtacccagctgcaccacttaatgtgccacacgagtccttagaagattgcaccgtgggtggatatcatgtaccaactggcacgcgtctgttgactaatatttcaaaacttcaacgagacccttcattataccctaatccattagaattttggccagagagattcttgacaacccacaaggatgtagacatcaaaggtcaacattttgaattaattccatttggtgcaggtagaagaatgtgccctggactttctttcggtcttcaagtaatgcaactaacgcttgctactctattgcatgggtttgacattgtaactagtgatggggaacatgtcgatatgcttgaacaaattggactaaccaacattaaggcctctccactccaagtcattcttacaccacgtctttctggtcatatttatgatgaaatttaaatactaaaaaaataaagaaaaaaaaaaaaaaaa

SEQ ID NO: 60295 - protein, 539 aa, Glycine max
  peptide (1)..(539): Ceres Seq. ID no. 15227092
IHYQNQSYPTTSSDTMLHMENPLLQSTNSITFTFFGLLLFLFVLSSIFRNRGAATRKAPPEARGAWPLIGHIHLLGGSKPPHVTLGHMADKYGPVFTLRLGAHKTLVVSNWEMAKQCFTVNDKAFASRPKSVSFELLGYNYSMIGFIPYGSYWRHVRKIITLELLSTHCIDMLKHVMVAEVKAAVKETYKNLKGSEKATTEMKRWFGDITLNVMFRTVVGKRFVGENEENERIRKALREFFDLTGAFNVSDALPYLRWLDLDGAEKKMKKTAKELDGFVQVWLEEHKSKRNSEAEPKSNQDLMDVLLSLVEEGQEFDGQDADTTIKATCLGLILAGSDTTTTTLSWALSLLLNNREVLNKAIHELDTQIGSEKIVEISDLKKLEYLQSIIKETLRLYPAAPLNVPHESLEDCTVGGYHVPTGTRLLTNISKLQRDPSLYPNPLEFWPERFLTTHKDVDIKGQHFELIPFGAGRRMCPGLSFGLQVMQLTLATLLHGFDIVTSDGEHVDMLEQIGLTNIKASPLQVILTPRLSGHIYDEI

SEQ ID NO: 60296 - protein, 524 aa, Glycine max
  peptide (1)..(524): Ceres Seq. ID no. 15227093
MLHMENPLLQSTNSITFTFFGLLLFLFVLSSIFRNRGAATRKAPPEARGAWPLIGHIHLLGGSKPPHVTLGHMADKYGPVFTLRLGAHKTLVVSNWEMAKQCFTVNDKAFASRPKSVSFELLGYNYSMIGFIPYGSYWRHVRKIITLELLSTHCIDMLKHVMVAEVKAAVKETYKNLKGSEKATTEMKRWFGDITLNVMFRTVVGKRFVGENEENERIRKALREFFDLTGAFNVSDALPYLRWLDLDGAEKKMKKTAKELDGFVQVWLEEHKSKRNSEAEPKSNQDLMDVLLSLVEEGQEFDGQDADTTIKATCLGLILAGSDTTTTTLSWALSLLLNNREVLNKAIHELDTQIGSEKIVEISDLKKLEYLQSIIKETLRLYPAAPLNVPHESLEDCTVGGYHVPTGTRLLTNISKLQRDPSLYPNPLEFWPERFLTTHKDVDIKGQHFELIPFGAGRRMCPGLSFGLQVMQLTLATLLHGFDIVTSDGEHVDMLEQIGLTNIKASPLQVILTPRLSGHIYDEI

SEQ ID NO: 60297 - protein, 521 aa, Glycine max
  peptide (1)..(521): Ceres Seq. ID no. 15227094
MENPLLQSTNSITFTFFGLLLFLFVLSSIFRNRGAATRKAPPEARGAWPLIGHIHLLGGSKPPHVTLGHMADKYGPVFTLRLGAHKTLVVSNWEMAKQCFTVNDKAFASRPKSVSFELLGYNYSMIGFIPYGSYWRHVRKIITLELLSTHCIDMLKHVMVAEVKAAVKETYKNLKGSEKATTEMKRWFGDITLNVMFRTVVGKRFVGENEENERIRKALREFFDLTGAFNVSDALPYLRWLDLDGAEKKMKKTAKELDGFVQVWLEEHKSKRNSEAEPKSNQDLMDVLLSLVEEGQEFDGQDADTTIKATCLGLILAGSDTTTTTLSWALSLLLNNREVLNKAIHELDTQIGSEKIVEISDLKKLEYLQSIIKETLRLYPAAPLNVPHESLEDCTVGGYHVPTGTRLLTNISKLQRDPSLYPNPLEFWPERFLTTHKDVDIKGQHFELIPFGAGRRMCPGLSFGLQVMQLTLATLLHGFDIVTSDGEHVDMLEQIGLTNIKASPLQVILTPRLSGHIYDEI

SEQ ID NO: 60298 - DNA, 955 bp, Glycine max
  misc_feature (1)..(955): Ceres Seq. ID no. 15173314
caattatgctgtgcacaccctgcttactgaactgaagcgatgatggtgttctgtcctgtgttgaaggaaacgtcgaaacctgaaagcgaaccatgccagaacgagaatccaccaatggttactgcagcagtggcgaagaagacggtgacgccgcttggagagcagcaatcgattccattgctcaaaccaccacctatgtcgcttccaccaccaaacacaatcacccaaatcatcatattgatgatgatgaccacaaacccaacacacaacagcttaagcactaccaactcaaggcacaaaagcttctgaatgaaatattggaaaattcaatagagatagtgagaaaacctgtccctgtcgtggatgaggatcccgagagcaatgaatgcggcattcgcttgtttaaacatgctcagccaggaatagtgtttgatcacgtagatgaactccaaccaccaaggaaacggcctagactacttcctggaggagatattgatgagaaatcaaagaagcagtttagaaaacagattagatctgttgctgttaacgggatagatataatagctgcagcaaatgatgcatacaagaagtcattagctagactagaagctaaagatgccgcagcaaaagctaaagccaagagagaagaggaaagaattgaaaatttgaaaaagattaggggagaaaggtggctaccttccatggccaaggagatgcaggttaaaattcgacactgacatgttatgtctttccatgctcttaacttcgatgctagttttatgtgtaactctataactgattagctttttttatttgttagttgagcacttgagcttgttgtacacaataattttatagaattataacttggttatgaatttttttttcttctttttttctttaacttaactattctgttacattaccgttcacaagttcacatattgaaatatct

SEQ ID NO: 60299 - protein, 214 aa, Glycine max
  peptide (1)..(214): Ceres Seq. ID no. 15173315
MPERESTNGYCSSGEEDGDAAWRAAIDSIAQTTTYVASTTKHNHPNHHIDDDDHKPNTQQLKHYQLKAQKLLNEILENSIEIVRKPVPVVDEDPESNECGIRLFKHAQPGIVFDHVDELQPPRKRPRLLPGGDIDEKSKKQFRKQIRSVAVNGIDIIAAANDAYKKSLARLEAKDAAAKAKAKREEERIENLKKIRGERWLPSMAKEMQVKIRH

SEQ ID NO: 60300 - DNA, 1360 bp, Glycine max
  misc_feature (1)..(1360): Ceres Seq. ID no. 13638402
ataaaccctgcaccttccaacaatcacttctctcctccttccttctcacttctcacttctcaccaattacgttaccttgcactattattctatacaactgtaaacatccttaattgcaaaccctctctctctctccttaaataattctcataaaaaaataaaataaaaattaaaactaacaaagaaaccattttgcacaaacccaattgagagtttgagacccagatgatgatgatgaacaatactattattccatggtcaaccattggcgttgtgattgcatggtacacttccaacataggggttcttcttctgaacaagtacttgctaagcaactacggctttaggttccccgtgttcctcaccacgtgtcacatgctggtgtgctcgctcttcagctacgttattgtttccgttacggaagctgttccgctgcagcgcgtgcggtccaggagccagttttggaggatcgtggcgctcggcgtcgttttctgcttctccgtcgtttgcgggaacgtgtcgctcaggtacattccggtgtcgtttaatcaggccatcggcgccaccacgccgttcttcaccgccgttttcgcttatgctgtcagcgccaagagggaggcttgggttacgtacgccacgctcttgcccgttgttgcgggcgtcgtcatagctagtgggggtgaaccaagttttcatctgtttggatttataatctgtgtttcatcgactggtgccagagcatttaaatcagtgcttcaagatattttgttgtcctcagagggagaaaagttgaattctatgaacctgctgctttatatggctccaatagcagtgatggtcttacttcctacaatattgttgatggagggaaatgtgattcagatcactatggatcttgccagaaaggatataagaattttttggtatctgcttctcagttcttctcttgcatattttgtgaacctcactaattttttggtgaccaaacatacaagtgcacttacccttcaggttttaggaaatgcaaagggggcagttgctgtggtggtctcaattttgatattcaaaaaccccatttcaatgataggaatgcttggctatgcactcactatcattggagttatcttgtacagtgaaaccaagaagaggtatagcaaaaattagtaaaattaacaagattaccaatcaaagcagggtgtgatttaccacaagcgagagggccaacaagttatacttatgcatacaaaattatgagcttgcagcaaccacttttgttacacgtgaacaagaatatttcccccctaactatttcattcattgcaagcgttttgggagtagtcacactccccataaacccttt

SEQ ID NO: 60301 - protein, 312 aa, Glycine max
  peptide (1)..(312): Ceres Seq. ID no. 13638403
MMMMNNTIIPWSTIGVVIAWYTSNIGVLLLNKYLLSNYGFRFPVFLTTCHMLVCSLFSYVIVSVTEAVPLQRVRSRSQFWRIVALGVVFCFSVVCGNVSLRYIPVSFNQAIGATTPFFTAVFAYAVSAKREAWVTYATLLPVVAGVVIASGGEPSFHLFGFIICVSSTGARAFKSVLQDILLSSEGEKLNSMNLLLYMAPIAVMVLLPTILLMEGNVIQITMDLARKDIRIFWYLLLSSSLAYFVNLTNFLVTKHTSALTLQVLGNAKGAVAVVVSILIFKNPISMIGMLGYALTIIGVILYSETKKRYSKN

SEQ ID NO: 60302 - protein, 311 aa, Glycine max
  peptide (1)..(311): Ceres Seq. ID no. 13638404
MMMNNTIIPWSTIGVVIAWYTSNIGVLLLNKYLLSNYGFRFPVFLTTCHMLVCSLFSYVIVSVTEAVPLQRVRSRSQFWRIVALGVVFCFSVVCGNVSLRYIPVSFNQAIGATTPFFTAVFAYAVSAKREAWVTYATLLPVVAGVVIASGGEPSFHLFGFIICVSSTGARAFKSVLQDILLSSEGEKLNSMNLLLYMAPIAVMVLLPTILLMEGNVIQITMDLARKDIRIFWYLLLSSSLAYFVNLTNFLVTKHTSALTLQVLGNAKGAVAVVVSILIFKNPISMIGMLGYALTIIGVILYSETKKRYSKN

SEQ ID NO: 60303 - protein, 310 aa, Glycine max
  peptide (1)..(310): Ceres Seq. ID no. 13638405
MMNNTIIPWSTIGVVIAWYTSNIGVLLLNKYLLSNYGFRFPVFLTTCHMLVCSLFSYVIVSVTEAVPLQRVRSRSQFWRIVALGVVFCFSVVCGNVSLRYIPVSFNQAIGATTPFFTAVFAYAVSAKREAWVTYATLLPVVAGVVIASGGEPSFHLFGFIICVSSTGARAFKSVLQDILLSSEGEKLNSMNLLLYMAPIAVMVLLPTILLMEGNVIQITMDLARKDIRIFWYLLLSSSLAYFVNLTNFLVTKHTSALTLQVLGNAKGAVAVVVSILIFKNPISMIGMLGYALTIIGVILYSETKKRYSKN

SEQ ID NO: 60304 - DNA, 1237 bp, Glycine max
  misc_feature (1)..(1237): Ceres Seq. ID no. 14311207
gaaattctccaaggaatctctctctctctctctctttctttccctttttcactttctcattcattcttattagtatttctatttcacttcaccaacccactccaccgtttcccctttccttccatgctattatggcttcatcttccatcaaacacactcaccaccttaaccgcacaaaactcttcatgaaagaagaaacccttttgaaaaagaagcatcactatcccaaaatcatacgaatacgtgtcaccgacgccgacgctaccgactcctccagcgacgacgacgagccctccatgtcctccacgcgccgcagagtaaaaaacttcgtcaacgaaattaccatccaaggcggcggcggtggtggtggcgacgttaacgttgtttctaagaaaagaagattcaagtccggtgccggagctccgttatgtcggcggaagacgggggcgaagaagttccggggagtgaggcagcggccatgggggaagtgggcggcggagataagagacccgtcgcgccgcgtccggctgtggctgggaacctacgacaccgccgaggaagctgccattgtgtacgacaacgcggccattcagctgcgtggcgccgacgcgctcaccaatttcataacgccgccgccggagaacagaaaaaccggttactgctccggcgaggagtctcgcaacaacgacgacttgcgttcccccacttcggttcttgggcgctgttcggtgtccgaggaagctgtaactgcaaacgacgtatttggaggctctagtgagtgcgagtattcatgcgtttcggagtcagtgtttcctattcctaacgaggtggtgtttgactttgaaagcacgttagatatgtttgatgaagggattaataatgttgtggcagagactagtatattcttggcggaggatttagatttgggttttacgagttggcatagagagtgtgataatttccaagacattgggggggatttgtttgtttgggatcctcttgtcgctctttgattgagacacagacaccattctctcgtctttgtaattctattgccaacgaaaatgggttgctatcagttttgtttcttttgggggtttaggcaaaaaccttgtgtctaaggagaggttttctaattttttattctagcagtatatgtttattaaccactagttgtaaaaccgtgcttcccacggtgttgccgtctttttgtttcttatataaaattatgtctcat

SEQ ID NO: 60305 - protein, 336 aa, Glycine max
  peptide (1)..(336): Ceres Seq. ID no. 14311208
NSPRNLSLSLSFFPFFTFSFILISISISLHQPTPPFPLSFHAIMASSSIKHTHHLNRTKLFMKEETLLKKKHHYPKIIRIRVTDADATDSSSDDDEPSMSSTRRRVKNFVNEITIQGGGGGGGDVNVVSKKRRFKSGAGAPLCRRKTGAKKFRGVRQRPWGKWAAEIRDPSRRVRLWLGTYDTAEEAAIVYDNAAIQLRGADALTNFITPPPENRKTGYCSGEESRNNDDLRSPTSVLGRCSVSEEAVTANDVFGGSSECEYSCVSESVFPIPNEVVFDFESTLDMFDEGINNVVAETSIFLAEDLDLGFTSWHRECDNFQDIGGDLFVWDPLVAL

SEQ ID NO: 60306 - protein, 293 aa, Glycine max
  peptide (1)..(293): Ceres Seq. ID no. 14311209
MASSSIKHTHHLNRTKLFMKEETLLKKKHHYPKIIRIRVTDADATDSSSDDDEPSMSSTRRRVKNFVNEITIQGGGGGGGDVNVVSKKRRFKSGAGAPLCRRKTGAKKFRGVRQRPWGKWAAEIRDPSRRVRLWLGTYDTAEEAAIVYDNAAIQLRGADALTNFITPPPENRKTGYCSGEESRNNDDLRSPTSVLGRCSVSEEAVTANDVFGGSSECEYSCVSESVFPIPNEVVFDFESTLDMFDEGINNVVAETSIFLAEDLDLGFTSWHRECDNFQDIGGDLFVWDPLVAL

SEQ ID NO: 60307 - protein, 275 aa, Glycine max
  peptide (1)..(275): Ceres Seq. ID no. 14311210
MKEETLLKKKHHYPKIIRIRVTDADATDSSSDDDEPSMSSTRRRVKNFVNEITIQGGGGGGGDVNVVSKKRRFKSGAGAPLCRRKTGAKKFRGVRQRPWGKWAAEIRDPSRRVRLWLGTYDTAEEAAIVYDNAAIQLRGADALTNFITPPPENRKTGYCSGEESRNNDDLRSPTSVLGRCSVSEEAVTANDVFGGSSECEYSCVSESVFPIPNEVVFDFESTLDMFDEGINNVVAETSIFLAEDLDLGFTSWHRECDNFQDIGGDLFVWDPLVAL

SEQ ID NO: 60308 - DNA, 1510 bp, Glycine max
  misc_feature (1)..(1510): Ceres Seq. ID no. 15177947
aagagaaacaacaagaaagagatgagaacaaacaagaatcaagagagagaggtgttactacgttagtctatgaacagtcaccccgagagactgaaatttccagaccctcaaatcaaactcttctattctctcatcaatcaatcaatccagttccctctcggttccttcctacagttgaataatgaaatttctggaaaagtgctcgagtgaagaggcattcagcagcatctcaatttataatcgtttcagataggaatgggaatatatctcagcactccaaaaactgaaaagttttctgaagatggtgaaaatgactgtcttagatatggtttatcatccatgcaagggtggcgtgcaacaatggaagatgctcatgctgcatatactgatctggatgagtccacttcattttttggtgtctatgatggccatggaggtaaggtggttgcaaagttttgtgccaagtttcttcatcaacagttgttcaaaagtgagacatacttaactggagatataggagcctcccttcagaaagcctttttgagaatggatgaaatgatgcgtggtcaaaggggatggagggaattatcaatattgggggataagataaacaagtttactgggatgatagaagggttgatttggtctccacgaagcagtgatgggaattgccatgttgatgattgggcttttgaggaggggcctcattctgattttgctggaccaacttcaggaagcactgcctgtgttgcagttattagaaacaaccaacttgttgttgcaaatgctggtgattcgcgttgtgtgatatccaggaagggccaggcatacaatttgtctagagaccacaaacctgatcttgagattgagaaggaaagaatcttaaaagctggtggtttcattcacgtaggacgagtcaatggaagtttaaatcttgcaagagctattggtgacatggaatttaaacagaataagtttctttctgctgaaaaacaaattgtaactgccaatccagacatcaacactgttgagctttgtgacgaagatgagtttgtggtgttagcttgtgatggcatatgggattgcatgtcaagtcaacaactggttgattttgttcatgaacaattgcactcggaaacaaaactttctgccgtgtgtgaaagagtacttgatcggtgtttggcaccatcaactgccagtggtgaaggatgtgacaacatgaccatgattgtggtgcagttcaaaagacctgctcagtccagtgtaccagcagaagagtcctcttcaaactgacaagctgaacctgaaacaaaactagagagaagtgagagttagcattattcctcagtgacagttcaaatattgtatcatatatatatatataatatatatgtgtgtgtttagtgtgcaacagtgattagaatgcgtccgcatggtcatcttcctttcatcccacattatacacaactgctattccaattaccgtaaagaatagtaccagtttttctcc

SEQ ID NO: 60309 - protein, 345 aa, Glycine max
  peptide (1)..(345): Ceres Seq. ID no. 15177948
MGIYLSTPKTEKFSEDGENDCLRYGLSSMQGWRATMEDAHAAYTDLDESTSFFGVYDGHGGKVVAKFCAKFLHQQLFKSETYLTGDIGASLQKAFLRMDEMMRGQRGWRELSILGDKINKFTGMIEGLIWSPRSSDGNCHVDDWAFEEGPHSDFAGPTSGSTACVAVIRNNQLVVANAGDSRCVISRKGQAYNLSRDHKPDLEIEKERILKAGGFIHVGRVNGSLNLARAIGDMEFKQNKFLSAEKQIVTANPDINTVELCDEDEFVVLACDGIWDCMSSQQLVDFVHEQLHSETKLSAVCERVLDRCLAPSTASGEGCDNMTMIVVQFKRPAQSSVPAEESSSN

SEQ ID NO: 60310 - protein, 317 aa, Glycine max
  peptide (1)..(317): Ceres Seq. ID no. 15177949
MQGWRATMEDAHAAYTDLDESTSFFGVYDGHGGKVVAKFCAKFLHQQLFKSETYLTGDIGASLQKAFLRMDEMMRGQRGWRELSILGDKINKFTGMIEGLIWSPRSSDGNCHVDDWAFEEGPHSDFAGPTSGSTACVAVIRNNQLVVANAGDSRCVISRKGQAYNLSRDHKPDLEIEKERILKAGGFIHVGRVNGSLNLARAIGDMEFKQNKFLSAEKQIVTANPDINTVELCDEDEFVVLACDGIWDCMSSQQLVDFVHEQLHSETKLSAVCERVLDRCLAPSTASGEGCDNMTMIVVQFKRPAQSSVPAEESSSN

SEQ ID NO: 60311 - protein, 310 aa, Glycine max
  peptide (1)..(310): Ceres Seq. ID no. 15177950
MEDAHAAYTDLDESTSFFGVYDGHGGKVVAKFCAKFLHQQLFKSETYLTGDIGASLQKAFLRMDEMMRGQRGWRELSILGDKINKFTGMIEGLIWSPRSSDGNCHVDDWAFEEGPHSDFAGPTSGSTACVAVIRNNQLVVANAGDSRCVISRKGQAYNLSRDHKPDLEIEKERILKAGGFIHVGRVNGSLNLARAIGDMEFKQNKFLSAEKQIVTANPDINTVELCDEDEFVVLACDGIWDCMSSQQLVDFVHEQLHSETKLSAVCERVLDRCLAPSTASGEGCDNMTMIVVQFKRPAQSSVPAEESSSN

SEQ ID NO: 60312 - DNA, 682 bp, Glycine max
  misc_feature (1)..(682): Ceres Seq. ID no. 15225303
tgttgacaatgccaatcttgaatatagctgacgattcagaagtgttcttcaggaatatagtggcatttgaggaatgtcacctttcagatgatacaaacatcattactcaataccgaaagattctagattttcttatcaacactgaaaaagatgtgaatgtactagttgataagaaaattattgtcaattggatgggtgatgctaatgcagtggctacaatggttaacagtctgggctcaaatattgggatgccacgtttcaatccagtgtatttctctctctgcaatagcttaaatgatttctatgaaagtccttgcaacaagtacaaggctatcttcaaacacgattacttcaacactccttggaaaatagcatctacagttgctgcaattgtgcttcttttgctcacattgattcagactatatgttcaataaactcactgttttaattaaggtagctgaggatttgggccgttaacagggaagtggaagtcaattgggggaaggaaacttctgtaatgtgatttagtaccttgttgcttttctttcatcaaataattaaaattctactatccttcttaacattaattatttgttgcaatataacttttatttactctctatattgatctgtattaattttgtatacgctttatatatatagctacttattattattgtt

SEQ ID NO: 60313 - protein, 148 aa, Glycine max
  peptide (1)..(148): Ceres Seq. ID no. 15225304
LTMPILNIADDSEVFFRNIVAFEECHLSDDTNIITQYRKILDFLINTEKDVNVLVDKKIIVNWMGDANAVATMVNSLGSNIGMPRFNPVYFSLCNSLNDFYESPCNKYKAIFKHDYFNTPWKIASTVAAIVLLLLTLIQTICSINSLF

SEQ ID NO: 60314 - protein, 146 aa, Glycine max
  peptide (1)..(146): Ceres Seq. ID no. 15225305
MPILNIADDSEVFFRNIVAFEECHLSDDTNIITQYRKILDFLINTEKDVNVLVDKKIIVNWMGDANAVATMVNSLGSNIGMPRFNPVYFSLCNSLNDFYESPCNKYKAIFKHDYFNTPWKIASTVAAIVLLLLTLIQTICSINSLF

SEQ ID NO: 60315 - protein, 85 aa, Glycine max
  peptide (1)..(85): Ceres Seq. ID no. 15225306
MGDANAVATMVNSLGSNIGMPRFNPVYFSLCNSLNDFYESPCNKYKAIFKHDYFNTPWKIASTVAAIVLLLLTLIQTICSINSLF

SEQ ID NO: 60316 - DNA, 1486 bp, Glycine max
  misc_feature (1)..(1486): Ceres Seq. ID no. 15172495
gagggcgcatgtgtatgtagcgtgcacccttccacattctttctcgttctcgatctctctcgatttttccttcccttttctccataaacgaggtgcttcagatttgctcacaataggagggaatcgaatcgaatcgaatcgaaaggaaagtgcagaatggatgacatgccgttgccggcgctctttgagcaagcccgcaagatccacgccgcagccaccgattccggcgccgaccaggaggttgtgaagaaggggtgcgaggctctgcatagatgcgaggacatggtcaataatctaggtttgttctctcccaacgagaccaaagaagatatcagcaccacgaatctcaaatacattctggtgccattttatcttgcggagttgacagaaaaaatagcacaggatgacaggatacagattctaaagtcttcccaggcaaaacttaaggagtttatctcattttgtgaagcaatggagctggtcccaaaagaggagttagaatcttacattgatggggcaccaaaaactgttgctgatcagagggccaggaagatcgctaggttcaaacgtcagagagctgcagaatcaaagttgttggaaataaaagagcgaaaggaacgacgtgggcgttctactaaagcagctgccctgtccacccctgttgaggcaggagaggaagaagtattggatgatgatggggaagaagaaagagaggcttggatcactaccatatctttggcaatctgtaaggcactagatatgctggatatgttgaagaaagaggaagagatgctttctgctgtaaaggatagacaatccaaggatggggataaggagttctctaaggatgttcttgatgaacgtgccaagaaagcagaagcttggcatcgtgattctgcagttcgtgcacagtacactaggccatcaccaccaatcacatgtgccactttcgcccaagatgttctagaaggaagagcaaaggcttcacaagaacacgatcacaagcatcaacccctaatatttggaccagctagccttgtaaatggaaacataacaactgagagagaaagaatggcagctcaggtcttccaacctagtcataggatgccaactatgagcattgaggaggccgggctaaaagaaatggaaataatgaacaaatggcaagagagaaatgtcaaactcatggaagaagtcaattcatcttggcacaatgataggaagtcaaagctaggagaagacgatgatgatgaagatgatgatgctgcacaggagaaagcaagggcttgggatgactggaaggatgataatccacgtggtgctggaaataagaaacttaccccttgtgggtaaactgaggtcttccctggcttaagtaacgggcttaggataaaactgtttttaacgaaatcccgtaatttggagttgatatactacttgtagttagattgtgttaagattatatgtataccaggattttcatttg

SEQ ID NO: 60317 - protein, 398 aa, Glycine max
  peptide (1)..(398): Ceres Seq. ID no. 15172496
MDDMPLPALFEQARKIHAAATDSGADQEVVKKGCEALHRCEDMVNNLGLFSPNETKEDISTTNLKYILVPFYLAELTEKIAQDDRIQILKSSQAKLKEFISFCEAMELVPKEELESYIDGAPKTVADQRARKIARFKRQRAAESKLLEIKERKERRGRSTKAAALSTPVEAGEEEVLDDDGEEEREAWITTISLAICKALDMLDMLKKEEEMLSAVKDRQSKDGDKEFSKDVLDERAKKAEAWHRDSAVRAQYTRPSPPITCATFAQDVLEGRAKASQEHDHKHQPLIFGPASLVNGNITTERERMAAQVFQPSHRMPTMSIEEAGLKEMEIMNKWQERNVKLMEEVNSSWHNDRKSKLGEDDDDEDDDAAQEKARAWDDWKDDNPRGAGNKKLTPCG

SEQ ID NO: 60318 - protein, 395 aa, Glycine max
  peptide (1)..(395): Ceres Seq. ID no. 15172497
MPLPALFEQARKIHAAATDSGADQEVVKKGCEALHRCEDMVNNLGLFSPNETKEDISTTNLKYILVPFYLAELTEKIAQDDRIQILKSSQAKLKEFISFCEAMELVPKEELESYIDGAPKTVADQRARKIARFKRQRAAESKLLEIKERKERRGRSTKAAALSTPVEAGEEEVLDDDGEEEREAWITTISLAICKALDMLDMLKKEEEMLSAVKDRQSKDGDKEFSKDVLDERAKKAEAWHRDSAVRAQYTRPSPPITCATFAQDVLEGRAKASQEHDHKHQPLIFGPASLVNGNITTERERMAAQVFQPSHRMPTMSIEEAGLKEMEIMNKWQERNVKLMEEVNSSWHNDRKSKLGEDDDDEDDDAAQEKARAWDDWKDDNPRGAGNKKLTPCG

SEQ ID NO: 60319 - protein, 356 aa, Glycine max
  peptide (1)..(356): Ceres Seq. ID no. 15172498
MVNNLGLFSPNETKEDISTTNLKYILVPFYLAELTEKIAQDDRIQILKSSQAKLKEFISFCEAMELVPKEELESYIDGAPKTVADQRARKIARFKRQRAAESKLLEIKERKERRGRSTKAAALSTPVEAGEEEVLDDDGEEEREAWITTISLAICKALDMLDMLKKEEEMLSAVKDRQSKDGDKEFSKDVLDERAKKAEAWHRDSAVRAQYTRPSPPITCATFAQDVLEGRAKASQEHDHKHQPLIFGPASLVNGNITTERERMAAQVFQPSHRMPTMSIEEAGLKEMEIMNKWQERNVKLMEEVNSSWHNDRKSKLGEDDDDEDDDAAQEKARAWDDWKDDNPRGAGNKKLTPCG

SEQ ID NO: 60320 - DNA, 1953 bp, Glycine max
  misc_feature (1)..(1953): Ceres Seq. ID no. 14308493
aaaattttcaaagtcgaagcgagaacttgccatttcgagggttttagggttagggttttctaaaattgcaagaacatgggtttcaacattcaaccctatgggattcagtccatgctcaaggaaggccataagcacctttctggcctggatgaagcggttctcaagaacatcgacgcctgcaaacaactttccactatcactcgaacttccctcggtcccaatgggatgaataagatggttataaatcacttggacaagctttttgtcacgaacgatgctgggacgattgtgaatgaacttgaagttcagcatcctgctgccaaggttttggttttggctgggaaggctcaacaagaggagattggggatggagctaatttaactatttcatttgctggggagctcctgcagggtgccgaggaacttatcaggatgggtttgcatccgagcgagatcatcagtggatacactaaagcaatcaacaagactgttcaaatattggatgaactagttgaggatggttctgagaatatggatgttcgtgataaggaacaagttatttcaagaatgaaagcagccgttgccagcaagcaatttggtcaagaagatatcatatgttcgcttgttgctgatgcatgcatccaagtgtgccccaaaaaccctgcaaactttaatgtggacaacgttcgtgttgcaaagctcttgggagggggcttgcataacagtactgtagttcgaggattggttctgaaaagtgatgctgtcgggactataaagcaagcagaaaaggcgaaggttgctgtgtttgctagtggtgttgatacatctgcaactgagactaaaggaactgtcctcatacatacagctgagcagctagaaaattattcaaaaactgaagaggctaaagtagaggagctcatcaaggcagtagcagattctggcgccaaagtgattgtcagtggaggagcagtaggagaaatggctttgcatttctgtgagcgttacaagcttatggttctgaaaatcagctcaaagtttgaactacgtcgattttgccggacaaccggctctgttgccatgctaaaactttgccaaccaaacccagatgatcttggatatgtagattccgtttcagttcaggaaattggtggtgtcagggtgaccattgtgaaaaatgaagagggtggaaattctgtagccactgttgttttacgaggaagtactgatagtatactagatgatcttgaaagagcagtggatgatggagtgaacacttacaaggcaatgtgcagggatagccgctttgtacctggagctgcagctactgaaattgagttagctaaaagggtgaaagacttttccttcaaggagacagggttggatcagtatgctattgcaaaatttgctgaaagttttgaaatgattcctagaactttggctgagaatgctggcctaaatgcaatggagatcatatcttctctgtatgcagaacatgcatctggaaatgccaaagttggcattgatttggaagaaggcatatgcaaggatgtctcaaccctgagcatttgggatctccatgtgactaagttatttgctcttaaatatgctgcagatgctgcatgcactgtactacgtgtggaccagattattatggcaaaaccagctggtggtccaaggagagaacagcctgctggtggtatggatgaagactaaaattattgtgggaattgatggtttgctttggtcatgtttgtatctcagcatgatggcttgaatttgccttaggcatgttttcttgatttagactttttagtagtggtggcgatcttaacaaattttgaattttgttttgctatgaaatactaagagatgtggtctgtaaatttacattttattcatagcgttattgtgagtgatgttaatttgctgagcatggcctttgtttgagatttc

SEQ ID NO: 60321 - protein, 545 aa, Glycine max
  peptide (1)..(545): Ceres Seq. ID no. 14308494
MGFNIQPYGIQSMLKEGHKHLSGLDEAVLKNIDACKQLSTITRTSLGPNGMNKMVINHLDKLFVTNDAGTIVNELEVQHPAAKVLVLAGKAQQEEIGDGANLTISFAGELLQGAEELIRMGLHPSEIISGYTKAINKTVQILDELVEDGSENMDVRDKEQVISRMKAAVASKQFGQEDIICSLVADACIQVCPKNPANFNVDNVRVAKLLGGGLHNSTVVRGLVLKSDAVGTIKQAEKAKVAVFASGVDTSATETKGTVLIHTAEQLENYSKTEEAKVEELIKAVADSGAKVIVSGGAVGEMALHFCERYKLMVLKISSKFELRRFCRTTGSVAMLKLCQPNPDDLGYVDSVSVQEIGGVRVTIVKNEEGGNSVATVVLRGSTDSILDDLERAVDDGVNTYKAMCRDSRFVPGAAATEIELAKRVKDFSFKETGLDQYAIAKFAESFEMIPRTLAENAGLNAMEIISSLYAEHASGNAKVGIDLEEGICKDVSTLSIWDLHVTKLFALKYAADAACTVLRVDQIIMAKPAGGPRREQPAGGMDED

SEQ ID NO: 60322 - protein, 533 aa, Glycine max
  peptide (1)..(533): Ceres Seq. ID no. 14308495
MLKEGHKHLSGLDEAVLKNIDACKQLSTITRTSLGPNGMNKMVINHLDKLFVTNDAGTIVNELEVQHPAAKVLVLAGKAQQEEIGDGANLTISFAGELLQGAEELIRMGLHPSEIISGYTKAINKTVQILDELVEDGSENMDVRDKEQVISRMKAAVASKQFGQEDIICSLVADACIQVCPKNPANFNVDNVRVAKLLGGGLHNSTVVRGLVLKSDAVGTIKQAEKAKVAVFASGVDTSATETKGTVLIHTAEQLENYSKTEEAKVEELIKAVADSGAKVIVSGGAVGEMALHFCERYKLMVLKISSKFELRRFCRTTGSVAMLKLCQPNPDDLGYVDSVSVQEIGGVRVTIVKNEEGGNSVATVVLRGSTDSILDDLERAVDDGVNTYKAMCRDSRFVPGAAATEIELAKRVKDFSFKETGLDQYAIAKFAESFEMIPRTLAENAGLNAMEIISSLYAEHASGNAKVGIDLEEGICKDVSTLSIWDLHVTKLFALKYAADAACTVLRVDQIIMAKPAGGPRREQPAGGMDED

SEQ ID NO: 60323 - protein, 495 aa, Glycine max
  peptide (1)..(495): Ceres Seq. ID no. 14308496
MNKMVINHLDKLFVTNDAGTIVNELEVQHPAAKVLVLAGKAQQEEIGDGANLTISFAGELLQGAEELIRMGLHPSEIISGYTKAINKTVQILDELVEDGSENMDVRDKEQVISRMKAAVASKQFGQEDIICSLVADACIQVCPKNPANFNVDNVRVAKLLGGGLHNSTVVRGLVLKSDAVGTIKQAEKAKVAVFASGVDTSATETKGTVLIHTAEQLENYSKTEEAKVEELIKAVADSGAKVIVSGGAVGEMALHFCERYKLMVLKISSKFELRRFCRTTGSVAMLKLCQPNPDDLGYVDSVSVQEIGGVRVTIVKNEEGGNSVATVVLRGSTDSILDDLERAVDDGVNTYKAMCRDSRFVPGAAATEIELAKRVKDFSFKETGLDQYAIAKFAESFEMIPRTLAENAGLNAMEIISSLYAEHASGNAKVGIDLEEGICKDVSTLSIWDLHVTKLFALKYAADAACTVLRVDQIIMAKPAGGPRREQPAGGMDED

SEQ ID NO: 60324 - DNA, 1552 bp, Glycine max
  misc_feature (1)..(1552): Ceres Seq. ID no. 15176106
tctgttttttggagtcagcttcactgcacaggatttatgtgatcgcaacatgggagtttgtttgagcgcccaaattaaagctgaaagcccatataacactgggttcaattcaaagtatgtgagtacggatggaaatgatttcggcagcacaaacgataaggtttcagcaaactcaattcctcaaactcctcggagtgagggtgagatcttgcggtcatccaatttgaagagctttcccttgtcagaacttaagacggccactagaaatttccgtccagatagcgtgttaggagaaggtggttttggatcagtttttaaggggtggatcgatgagaattcattgactgctaccaaacctggcactggcattgttattgctgttaaaagacttaatcaagatggcatccagggtcacagggagtggttggctgaagtcaactatcttggacagctttctcatcctcatctagtgagattgattgggttttgccttgaagatgaacatcgccttctcgtctacgaatttatgccacgtggaagcttggaaaaccatttgttcaggagaggctcatattttcaaccactttcttggagcttacgtttgaaggtagctcttgatgctgccaaagggcttgcatttctccacagtgcagaagcaaaagtgatatatagagattttaagacttcaaatatcttgctggattcaaaatataatgcaaaactttctgattttgggctggcaaaggatggaccaacaggtgacaaaagtcatgtctccattagggtaatgggaacctacggatacgcagcacctgaatatctagccacaggtcatcttactgctaagagcgatgtctatagttttggggttgtcctgctggaaatgttgtctggcaagagggctgttgacaagaatagaccatctggacaacacaatttggtggaatgggctaaaccttacctggcaaacaagcgtaagatatttcgtgtgttggacacccggctcgaaggacaatattcaacagatgatgcctgtaagctagccacccttgccttgcggtgcctatcaatagaatccaagttcaggccaaacatggatgaagtggttacaacattggagcagctgcaagttcctaatgtaaatggaggccatcaaaatgggtctcgtgttcgtagaagaagtgctgatgtgaatagaggctatcaaaatccttctgttaatggatctcgagttcgtagaagaagtgccgatgatattagccctatggagactcccacagcttatccccggccttctgcatcccctctctatacttgatattgcaaacttatcatcatgcatctgttgctggtgatctcatccaccaactcagtcacctcagtagctattagcctattgcactctagtattgtacatatcttatttcacataatgtattcagtattgctagtaccaattaatattttcggagttctgttttaagtgtttgtaactactaaactagatgcgaaggcaggtacattatatttgtatgatagctctgattagctc

SEQ ID NO: 60325 - protein, 438 aa, Glycine max
  peptide (1)..(438): Ceres Seq. ID no. 15176107
LFFGVSFTAQDLCDRNMGVCLSAQIKAESPYNTGFNSKYVSTDGNDFGSTNDKVSANSIPQTPRSEGEILRSSNLKSFPLSELKTATRNFRPDSVLGEGGFGSVFKGWIDENSLTATKPGTGIVIAVKRLNQDGIQGHREWLAEVNYLGQLSHPHLVRLIGFCLEDEHRLLVYEFMPRGSLENHLFRRGSYFQPLSWSLRLKVALDAAKGLAFLHSAEAKVIYRDFKTSNILLDSKYNAKLSDFGLAKDGPTGDKSHVSIRVMGTYGYAAPEYLATGHLTAKSDVYSFGVVLLEMLSGKRAVDKNRPSGQHNLVEWAKPYLANKRKIFRVLDTRLEGQYSTDDACKLATLALRCLSIESKFRPNMDEVVTTLEQLQVPNVNGGHQNGSRVRRRSADVNRGYQNPSVNGSRVRRRSADDISPMETPTAYPRPSASPLYT

SEQ ID NO: 60326 - protein, 422 aa, Glycine max
  peptide (1)..(422): Ceres Seq. ID no. 15176108
MGVCLSAQIKAESPYNTGFNSKYVSTDGNDFGSTNDKVSANSIPQTPRSEGEILRSSNLKSFPLSELKTATRNFRPDSVLGEGGFGSVFKGWIDENSLTATKPGTGIVIAVKRLNQDGIQGHREWLAEVNYLGQLSHPHLVRLIGFCLEDEHRLLVYEFMPRGSLENHLFRRGSYFQPLSWSLRLKVALDAAKGLAFLHSAEAKVIYRDFKTSNILLDSKYNAKLSDFGLAKDGPTGDKSHVSIRVMGTYGYAAPEYLATGHLTAKSDVYSFGVVLLEMLSGKRAVDKNRPSGQHNLVEWAKPYLANKRKIFRVLDTRLEGQYSTDDACKLATLALRCLSIESKFRPNMDEVVTTLEQLQVPNVNGGHQNGSRVRRRSADVNRGYQNPSVNGSRVRRRSADDISPMETPTAYPRPSASPLYT

SEQ ID NO: 60327 - protein, 263 aa, Glycine max
  peptide (1)..(263): Ceres Seq. ID no. 15176109
MPRGSLENHLFRRGSYFQPLSWSLRLKVALDAAKGLAFLHSAEAKVIYRDFKTSNILLDSKYNAKLSDFGLAKDGPTGDKSHVSIRVMGTYGYAAPEYLATGHLTAKSDVYSFGVVLLEMLSGKRAVDKNRPSGQHNLVEWAKPYLANKRKIFRVLDTRLEGQYSTDDACKLATLALRCLSIESKFRPNMDEVVTTLEQLQVPNVNGGHQNGSRVRRRSADVNRGYQNPSVNGSRVRRRSADDISPMETPTAYPRPSASPLYT

SEQ ID NO: 60328 - DNA, 1140 bp, Glycine max
  misc_feature (1)..(1140): Ceres Seq. ID no. 15169727
atacaccacagtttccaatttccatcaatctcaatctcatcctctcctaacattctccctataaaatcgccacatccaactcccaacaacacaacaccaacaacctcaaaaaacataattaagcattaacattccacaccttttcacacacacacaaaaaaaacaaccctctaaaatctaagcctcaaagagtgctaaactttgttacaatgaacatgttaggccttagagacctagttttcatagctccaactccttctcaacttcaccaccatcaacaacaccaacccatttcagcagaacaccattcaaacctccctttgccttcacaagcctctctcagtgttggtcttggcattttccctctcctaacagtgccacacaccaatgatgttcaagttcaggttcaagactgtgccaacaacaacaacaacaccaacaccaactattggaacctgaagatgtgtggtgccactgaagtgaattccacaagaaaaggtgttatgaacatggaggatgagggaagcaataagcaaatgatggagagtgaggaaggtgggggtgagtttagggtgtgccaggattgtggcaatagagccaagagagattgcagcttcagaaggtgcaggacttgctgcaagggacgtggctttgattgcagcactcacgtgaagagcacgtgggtccccgcgtctatgagacggggtggtggtggtgatagtagtggtggtgatggcaacagcgatgctggtgcttctaagaggctaagaactttggggtcatcaaagaatgttgctgctagtgctacctctcatagttccacttccaatgctaccccaacaaagagctttgataccagttcttgtcaacaaggtgatttcatttttctcttttaattcaaagatgtttactacaatttcacaaatagtttaattaagtacttgtttaattaaggtttttaattgcactggtattgtcgtgttcttggatattgtgagaaattgcaacaaatacaactcatgcagtcacaattgtaaacactcggataggccaaaatcgcagctgcagaccatttttcaaaaccttgatttccaggttttaaattatggtcgcagtcgcaaattcattgtaattcttgac

SEQ ID NO: 60329 - protein, 228 aa, Glycine max
  peptide (1)..(228): Ceres Seq. ID no. 15169728
MNMLGLRDLVFIAPTPSQLHHHQQHQPISAEHHSNLPLPSQASLSVGLGIFPLLTVPHTNDVQVQVQDCANNNNNTNTNYWNLKMCGATEVNSTRKGVMNMEDEGSNKQMMESEEGGGEFRVCQDCGNRAKRDCSFRRCRTCCKGRGFDCSTHVKSTWVPASMRRGGGGDSSGGDGNSDAGASKRLRTLGSSKNVAASATSHSSTSNATPTKSFDTSSCQQGDFIFLF

SEQ ID NO: 60330 - protein, 226 aa, Glycine max
  peptide (1)..(226): Ceres Seq. ID no. 15169729
MLGLRDLVFIAPTPSQLHHHQQHQPISAEHHSNLPLPSQASLSVGLGIFPLLTVPHTNDVQVQVQDCANNNNNTNTNYWNLKMCGATEVNSTRKGVMNMEDEGSNKQMMESEEGGGEFRVCQDCGNRAKRDCSFRRCRTCCKGRGFDCSTHVKSTWVPASMRRGGGGDSSGGDGNSDAGASKRLRTLGSSKNVAASATSHSSTSNATPTKSFDTSSCQQGDFIFLF

SEQ ID NO: 60331 - protein, 144 aa, Glycine max
  peptide (1)..(144): Ceres Seq. ID no. 15169730
MCGATEVNSTRKGVMNMEDEGSNKQMMESEEGGGEFRVCQDCGNRAKRDCSFRRCRTCCKGRGFDCSTHVKSTWVPASMRRGGGGDSSGGDGNSDAGASKRLRTLGSSKNVAASATSHSSTSNATPTKSFDTSSCQQGDFIFLF

SEQ ID NO: 60332 - DNA, 1346 bp, Glycine max
  misc_feature (1)..(1346): Ceres Seq. ID no. 15171453
atcatggccgcatcgattcaggacgccaagaaccgcatctcgcagatcgagcgtgtcttttgctctaagctccaccctctctttaaatccgacatcgcattgaaacgccgccgcatccagtacctcgaggagttgctgcactccaaagagtccgcgctccgcgactcctaggcgaagcgaaacgccgcgttttcgaagctcgagagctgcgagggcgagaaggcgacgctgctggcgagaattgacgagttggacgagaaattgagattgaagacgcgggagattgaggaggcggacgggaagctactcgagcgcgtggaggcgctgacgtgcgagttaagggatgagaaattgaagaggaatcgcgtgacggaggcgtataagaggcttaagtctcagcacgtttaccttcggagaaaggttggtctcggtgaagagaatgtggttcaggaaaacaaattggagtgtgcaagtgaattggagatgcttcagagtccaatcgtaaaacctggtcttgcattttagaacccaaatatgactatggatcctagtgatagcgatacagctgaagtgaggaaccaaatcccagaggaagattttggaggccttgaaacgaaaactccagatgtgtttgttgccacatgtgtcataaagagagtcaaggagaagccatctgagattgacagagggtgtaatttgagttctccatcttctggttttcgtgatgtcccaaaatgtccatccaatacaaaattagtctctgtatctagtacaaagcgccctgtatcttcctggaggcaaacccggtcccatcaaagtcgagtaggtcctgatcttcatgatgattttcttgatacttctcttgagaatatcagagaaaatttaaataaggatttgaacaaggaagaccaaccatgcctgattcagaaagacattagtgcggacagctcagatgacgaaacacacgatatgaatgccaaaagcagtcctcagaagaagcaaaagcaatcttctgttacagtggccaacacaagaagtttcaagtacgttgaaccagttaggaagaaagctgagcgtgaaaatttaaaaggagttgaatgcaaacaatgcaggaagttctatgatgctgttcttcctaatgctgatggcaaggatgctgacagtaagcagagcttccgctgtgaacaccttgatggtgtttctaggcatcgatataggtatgttcctcccatgactcctgaaggattttggaatattgggtttgaatctgaaatgtaagaatatattttagagagatcagagattactatttgatttataaatggattctgtatccaattaaaaag

SEQ ID NO: 60333 - protein, 247 aa, Glycine max
  peptide (1)..(247): Ceres Seq. ID no. 15171454
MTMDPSDSDTAEVRNQIPEEDFGGLETKTPDVFVATCVIKRVKEKPSEIDRGCNLSSPSSGFRDVPKCPSNTKLVSVSSTKRPVSSWRQTRSHQSRVGPDLHDDFLDTSLENIRENLNKDLNKEDQPCLIQKDISADSSDDETHDMNAKSSPQKKQKQSSVTVANTRSFKYVEPVRKKAERENLKGVECKQCRKFYDAVLPNADGKDADSKQSFRCEHLDGVSRHRYRYVPPMTPEGFWNIGFESEM

SEQ ID NO: 60334 - protein, 245 aa, Glycine max
  peptide (1)..(245): Ceres Seq. ID no. 15171455
MDPSDSDTAEVRNQIPEEDFGGLETKTPDVFVATCVIKRVKEKPSEIDRGCNLSSPSSGFRDVPKCPSNTKLVSVSSTKRPVSSWRQTRSHQSRVGPDLHDDFLDTSLENIRENLNKDLNKEDQPCLIQKDISADSSDDETHDMNAKSSPQKKQKQSSVTVANTRSFKYVEPVRKKAERENLKGVECKQCRKFYDAVLPNADGKDADSKQSFRCEHLDGVSRHRYRYVPPMTPEGFWNIGFESEM

SEQ ID NO: 60335 - DNA, 824 bp, Glycine max
  misc_feature (1)..(824): Ceres Seq. ID no. 13581380
aattcctctgagccagatgttattcttctagaacctgatcaaattcatgaaaacactccatttgtttcttcgaaaacatatgattcatcttggttcgaaactgaaaagaatcccaaagacaactggcaattacctgcttacggtaattctcagtttaggagaagacttatgaatgatcttcaaaggccttatgaccaagaagaatgtgatagacttctgcttgaagtacgtcagaaaaaacaaaaggaacgtcatagagaaacacgtcatggggtggtcaagttttgtcgcactaggggtgtcagcgaatcatatcttgacttgtaccctgatctagctaaagcaattgccgaattcaaaaaaccggaaaaggttttgtttctcttgcgtggatttattttctggttgcaaaatgtgacccacgaaggaaaatttcgaccttggcttgacaagcattgtttggactttttacgacaaatgaaaaattggaatcttgctaaatttggaagcaagagtttaactaacatagtcaacaaagtttacatacgtacagttaaatctatcttggaactttgacctagttgtagaaagaaagatagctagagttgtggttctcatcaggagttctttcatttctgttaaaccgtggttctctttttgtccaccgttttttgtaccattgagaagatggtgataaactgataattgaggggcttaggtggctagcatatgctgtaatataatgttatattcttcctaagctagtttttgttgagcccaaatgcaagatatctaggactctgttcaaaaagactaatttttat

SEQ ID NO: 60336 - protein, 191 aa, Glycine max
  peptide (1)..(191): Ceres Seq. ID no. 13581381
NSSEPDVILLEPDQIHENTPFVSSKTYDSSWFETEKNPKDNWQLPAYGNSQFRRRLMNDLQRPYDQEECDRLLLEVRQKKQKERHRETRHGVVKFCRTRGVSESYLDLYPDLAKAIAEFKKPEKVLFLLRGFIFWLQNVTHEGKFRPWLDKHCLDFLRQMKNWNLAKFGSKSLTNIVNKVYIRTVKSILEL

SEQ ID NO: 60337 - protein, 135 aa, Glycine max
  peptide (1)..(135): Ceres Seq. ID no. 13581382
MNDLQRPYDQEECDRLLLEVRQKKQKERHRETRHGVVKFCRTRGVSESYLDLYPDLAKAIAEFKKPEKVLFLLRGFIFWLQNVTHEGKFRPWLDKHCLDFLRQMKNWNLAKFGSKSLTNIVNKVYIRTVKSILEL

SEQ ID NO: 60338 - DNA, 1943 bp, Glycine max
  misc_feature (1)..(1943): Ceres Seq. ID no. 14308477
tctctatccttctcccccttcctccaaaactgaccaagtcccatactcttccgccatatcactacttttcaacacgctctaatttaaacaatactcccactaccgcacatggatattttcacttcctatacataaccctattccgccatctcttttttcacacttcatttccttcttcttctctgattttggttcatggcgtgggcgaagaagccaggtgactcaaataatgtaggctttatgagatggttagcgttggtgttggtgttggtgttgttatcgggcttttggtgtgtttcgggtgtgaaagaaggaaaaaggaatgcgtacgcgacaatgatgtacgtaggtacgccgagggactacgaattctacatagccatacgcgtgcttctgaaatcgctggctacgctcgacgctcaagccgatcttgttgtcattgcttcccttgatgttcctcctcgctggattcgtgctcttgaaaaggaagatggtgcgaaagtagtgagagtggaaaatctggacaacccctacaagcatcaagataattttgacaagaggttcaagttatcgttgaacaaactctacgcatggagcttagtggactatgacagggtggtgatgttggacgctgataacctcttccttcaaaacacggacgagttgtttcaatgtggacaattctgtgcggtctttatcaatccttgtgtgttccacacaggactcttcgtcttgcagccatcgatgaccgtgttcaaggacatggttcatgaattacgtaatgggagagaaaatcctgatggtgcagaccagggtttcatagctagctatttcccagagttacttgataagccaatgtttcacccaccacctaatggcaccaagcttgatggaacatataggcttcctttgggttatcagatggatgcttcttactattatcttaaacttcgctggagcataccctgtggaccaaatagtgtgatcacattcccaggggcaccatggttgaagccatggtattggtggtcctggcctgttctgccattaggcctccagtggcatgataaacgtcgccaaactttagggtatggtgcggagatggctgtgatacttattcaatcggcaatatatttgggaataatagcaatgactcgttttgcaaggccaagtctctcaaagctatgctataggcgctctgacaagagcatcaacttggtgcagaacatcctcaaattggtggcattgtggagcatccttgcggcttacacaacacccttcttcatcattcctcacacggttcaccctttgttaggatggcctctctacttgcttggtgtctttgcattgtgctctattgcagtcaatgcctttctgctgccaatgttgccggttctgatgccgtggctcgggatcaccggtgctttgattgtcatggcttttccttggtattcagatggggtggtgagagcattgtgcgtttttggttatgcattctgtgctgcaccgtgtgtgtgggcatctatgactaggataatggcagggcttcaccagtctctagaaagggaagcttttttgccaagattaggagaatcttcaccaccctcttggtttaacaagttatattgagctgtctgattgagcatgattgaatgcttggggacatagatgacaagctcattggaaactgaaggggaggaagtgccatggatttagaaccattatgatgttacggtcgaaattatatacatttttcttggagcgagatggccatgttgcacttactaggaggaggaacaacgcggagttagtgtgtgtatataaagataaagattgttttgctatttttcacatacatatgtatcaattattgcacgattggttcttgtattcaaatttttaaacttgttagacagtgagataagatcagagagttcggcatc

SEQ ID NO: 60339 - protein, 477 aa, Glycine max
  peptide (1)..(477): Ceres Seq. ID no. 14308478
MAWAKKPGDSNNVGFMRWLALVLVLVLLSGFWCVSGVKEGKRNAYATMMYVGTPRDYEFYIAIRVLLKSLATLDAQADLVVIASLDVPPRWIRALEKEDGAKVVRVENLDNPYKHQDNFDKRFKLSLNKLYAWSLVDYDRVVMLDADNLFLQNTDELFQCGQFCAVFINPCVFHTGLFVLQPSMTVFKDMVHELRNGRENPDGADQGFIASYFPELLDKPMFHPPPNGTKLDGTYRLPLGYQMDASYYYLKLRWSIPCGPNSVITFPGAPWLKPWYWWSWPVLPLGLQWHDKRRQTLGYGAEMAVILIQSAIYLGIIAMTRFARPSLSKLCYRRSDKSINLVQNILKLVALWSILAAYTTPFFIIPHTVHPLLGWPLYLLGVFALCSIAVNAFLLPMLPVLMPWLGITGALIVMAFPWYSDGVVRALCVFGYAFCAAPCVWASMTRIMAGLHQSLEREAFLPRLGESSPPSWFNKLY

SEQ ID NO: 60340 - protein, 462 aa, Glycine max
  peptide (1)..(462): Ceres Seq. ID no. 14308479
MRWLALVLVLVLLSGFWCVSGVKEGKRNAYATMMYVGTPRDYEFYIAIRVLLKSLATLDAQADLVVIASLDVPPRWIRALEKEDGAKVVRVENLDNPYKHQDNFDKRFKLSLNKLYAWSLVDYDRVVMLDADNLFLQNTDELFQCGQFCAVFINPCVFHTGLFVLQPSMTVFKDMVHELRNGRENPDGADQGFIASYFPELLDKPMFHPPPNGTKLDGTYRLPLGYQMDASYYYLKLRWSIPCGPNSVITFPGAPWLKPWYWWSWPVLPLGLQWHDKRRQTLGYGAEMAVILIQSAIYLGIIAMTRFARPSLSKLCYRRSDKSINLVQNILKLVALWSILAAYTTPFFIIPHTVHPLLGWPLYLLGVFALCSIAVNAFLLPMLPVLMPWLGITGALIVMAFPWYSDGVVRALCVFGYAFCAAPCVWASMTRIMAGLHQSLEREAFLPRLGESSPPSWFNKLY

SEQ ID NO: 60341 - protein, 430 aa, Glycine max
  peptide (1)..(430): Ceres Seq. ID no. 14308480
MMYVGTPRDYEFYIAIRVLLKSLATLDAQADLVVIASLDVPPRWIRALEKEDGAKVVRVENLDNPYKHQDNFDKRFKLSLNKLYAWSLVDYDRVVMLDADNLFLQNTDELFQCGQFCAVFINPCVFHTGLFVLQPSMTVFKDMVHELRNGRENPDGADQGFIASYFPELLDKPMFHPPPNGTKLDGTYRLPLGYQMDASYYYLKLRWSIPCGPNSVITFPGAPWLKPWYWWSWPVLPLGLQWHDKRRQTLGYGAEMAVILIQSAIYLGIIAMTRFARPSLSKLCYRRSDKSINLVQNILKLVALWSILAAYTTPFFIIPHTVHPLLGWPLYLLGVFALCSIAVNAFLLPMLPVLMPWLGITGALIVMAFPWYSDGVVRALCVFGYAFCAAPCVWASMTRIMAGLHQSLEREAFLPRLGESSPPSWFNKLY

SEQ ID NO: 60342 - DNA, 1827 bp, Glycine max
  misc_feature (1)..(1827): Ceres Seq. ID no. 13502573
ttttttgccatatttcccaaataaaattccccgattaaccttcgtgctacccacgaaatctatttttcttcccatttttttctgagcatttagctgtcgcttctttttgtttgtttttgtcatcctcggcagatcaggttttgtttttgcttctgctccagctttggaagatccacaatctctctctgagtggatggtttagtgtatatttttaagatactgatataaaagtatgggaagcagtgagatggataaaactacaaaagagaaggagtcaaagacgccgccaccacctacatcacaggagcagtcttcgaccaccggcactggaacaattaatcctgagtggcctggctttcaggcatattctcctatacctccacatggtttcttggcatcaagtccccaggctcacccttatatgtggggtgtccagcaatttatgcctccctatggtactccaccacatccctatgttgcaatgtatccccctggtggcatttatgctcatccatccatgcctccgggatcttatccttttaatccttttgccatgccttctcctaatggcattgctgaggcttcaggaaacactcctggcagcatggaagctgatggcaagccttctgaggtgaaggaaaaattgccaatcaaaagatcaaaaggaagtttgggtagtttgaatatgatcacagggaaaaataatgaacatggtaaaacactggggacatctgctaatggaattcattcaaagagtggtgagagtgctagtgaaggtgaaggtaccagtgaaggaagtgatgcaaattctcagaatgactctcaattaaaatcagggggccggcaggattcttttgaagatgaaccctctcaaaatggcagttcagcatatactcctcaaaatgggggactaaatatacctcatacagtggtcaatcaaaccatgtctatcatacctatctctgcaggtggtgctcctggagctgttcctggtcccacgacaaacttaaatataggaatggattattggggtacaccaggttcatccaacattcctggacttggcagaaaggttccatctactgcagttgctggagggatggttactgttggatcacgggatagtgctcagtcacaactctggctacaggatgaaagagagcttaaaaggcaaaggcggaagcagtctaacagggaatctgctcgcaggtccaggttgcgcaagcaggccgagtgtgatgagttagctcagcgtgctgaggctttgaaggaagaaaatgcttctctccggtcagaagtaaatcgaatcaggagtgattatgagcagctactctccgagaatgcagctctcaaggagagacttggggaactacctccgaatgatgatcatcatcataggtctggcaggaatgatcagcatgtgggtaatgacactcaacagagtgggcagacagaggccgtgcagggtggtcattagcaccaaccaaccacttcatgctgcctttcagggagataatctaacttaaatagcaagagcaagatcttgtttcggataggttgtagttcaaattgtattaatgctgaccatttatcgtcttaagatctgtttaatgttatgtgatccttcattcctaatttaccttttttttaactcattcaaaacgacctggattgtatgtagtgtgtgaattctgtgtcataccttatctgcagcttcaaagttagtgttctcattaagtaagcaatatagttaacgaacctgggtgttgtccattatatcatttcctgtacaaataatttatcgggaaaataaataaaagagaaaat

SEQ ID NO: 60343 - protein, 414 aa, Glycine max
  peptide (1)..(414): Ceres Seq. ID no. 13502574
MGSSEMDKTTKEKESKTPPPPTSQEQSSTTGTGTINPEWPGFQAYSPIPPHGFLASSPQAHPYMWGVQQFMPPYGTPPHPYVAMYPPGGIYAHPSMPPGSYPFNPFAMPSPNGIAEASGNTPGSMEADGKPSEVKEKLPIKRSKGSLGSLNMITGKNNEHGKTLGTSANGIHSKSGESASEGEGTSEGSDANSQNDSQLKSGGRQDSFEDEPSQNGSSAYTPQNGGLNIPHTVVNQTMSIIPISAGGAPGAVPGPTTNLNIGMDYWGTPGSSNIPGLGRKVPSTAVAGGMVTVGSRDSAQSQLWLQDERELKRQRRKQSNRESARRSRLRKQAECDELAQRAEALKEENASLRSEVNRIRSDYEQLLSENAALKERLGELPPNDDHHHRSGRNDQHVGNDTQQSGQTEAVQGGH

SEQ ID NO: 60344 - protein, 409 aa, Glycine max
  peptide (1)..(409): Ceres Seq. ID no. 13502575
MDKTTKEKESKTPPPPTSQEQSSTTGTGTINPEWPGFQAYSPIPPHGFLASSPQAHPYMWGVQQFMPPYGTPPHPYVAMYPPGGIYAHPSMPPGSYPFNPFAMPSPNGIAEASGNTPGSMEADGKPSEVKEKLPIKRSKGSLGSLNMITGKNNEHGKTLGTSANGIHSKSGESASEGEGTSEGSDANSQNDSQLKSGGRQDSFEDEPSQNGSSAYTPQNGGLNIPHTVVNQTMSIIPISAGGAPGAVPGPTTNLNIGMDYWGTPGSSNIPGLGRKVPSTAVAGGMVTVGSRDSAQSQLWLQDERELKRQRRKQSNRESARRSRLRKQAECDELAQRAEALKEENASLRSEVNRIRSDYEQLLSENAALKERLGELPPNDDHHHRSGRNDQHVGNDTQQSGQTEAVQGGH

SEQ ID NO: 60345 - protein, 351 aa, Glycine max
  peptide (1)..(351): Ceres Seq. ID no. 13502576
MWGVQQFMPPYGTPPHPYVAMYPPGGIYAHPSMPPGSYPFNPFAMPSPNGIAEASGNTPGSMEADGKPSEVKEKLPIKRSKGSLGSLNMITGKNNEHGKTLGTSANGIHSKSGESASEGEGTSEGSDANSQNDSQLKSGGRQDSFEDEPSQNGSSAYTPQNGGLNIPHTVVNQTMSIIPISAGGAPGAVPGPTTNLNIGMDYWGTPGSSNIPGLGRKVPSTAVAGGMVTVGSRDSAQSQLWLQDERELKRQRRKQSNRESARRSRLRKQAECDELAQRAEALKEENASLRSEVNRIRSDYEQLLSENAALKERLGELPPNDDHHHRSGRNDQHVGNDTQQSGQTEAVQGGH

SEQ ID NO: 60346 - DNA, 1812 bp, Glycine max
  misc_feature (1)..(1812): Ceres Seq. ID no. 15175762
ttttcaaattctttagaatttatcatttcctaagtattatgtttatatgctgtcataaaaaaatgtttatatgctcaatatttgctgtcagcatgacatgatgaaacaagttgcaacgatagtttagtttatcctattatatagctgcaactaagtgattcttaagcatgatattggctatttaatcattttttgtttatcgctactcttgaagttggcttaatgtgaatattcactgccaaacaaaaatgtgaactgaatttcatatgactggagctttgagaatcccgcgtataacggaatcctggttaactttgatgttgatctgagtttcaaaatattacaccatgttcttcatcttgatcaaactctttatcacttgttgagacttgagaaggttcctcatactctgtcgaaaaaatagttgtatagagagaacagcccacatgcatgaagagacatagaaagcccttagtgtctcataatgtactgacattgagaacataattttattcatacatttggaaagtgttcattgtcatatacaacatggcttacaaaacgttgatcagaaaattgttgccttgctgataatataaaattgagttctcttgatcttaacatgagaaaacttatgtctctagctttctggacctatgtaagtcctcatggtacaagcataccagttatatttgagtgagcgtacaagaagttgtctgactttggcagggtgaaactctgcggataatgatgattcttggcctgctttattttgatgctcagaagcatcctacttgttcatcttatctgttccatgcctggtggttgactatcaggaatgttttagttttgacacttgacagcagtgtggaggattgagttatatactacaaatatgcatgaattccgaagtttattactagacgacatagtattagatgtcacctgtatgttaagtggtcgccatgctttgagaaagcgacttgaagagcttggttatgaacttaatgacgaccaagttcagactttattttggtgttttaaagcagtggctgagcaaaaaaagagggttactgatgctgacctcagagcattggtatcagatgaagtttttcaagcagagcctgtctggaaacttggtgatttgcaggtgacttgtggaactcttggcctttctacagcaactgtcaaacttttgagtagtgatggtagcacacacgttgcctgttccattggtacaggaccagtggattcggcttacaaggctgttgatctgattgtgaaggagcaagtaacacttcttgagtactcgatgaatgcagtgacagaaggcattgatgcaattgccactacccgggttgtaattcgtggggagagtgaaacaagtactattactacccatgctttaacgggagaaactgttattcgaacatttagtgggactggagcgggaatggatgttgttgtttccagtgtcaaggcctatattgctgcactaaacaagatgtcgggtttcaaggaatcctctcaatctgctgaaaaaatttcaatttcttcattgaagatttgagaattgtgtggtgcttctttggtaacaattgtttgtgttaaaccacgaagaggaagacaatgttgcagcagcatccttgcctctcgcagttctccatattaagggttgtccctgtattttgaccggaatatatttgcaacctgtaatttattgattcacccaagtagcctttgcaaagaatgtaacttaagtccgttttaaatattcagactacagggattctttcccttttcattttncat

SEQ ID NO: 60347 - protein, 224 aa, Glycine max
  peptide (1)..(224): Ceres Seq. ID no. 15175763
MHEFRSLLLDDIVLDVTCMLSGRHALRKRLEELGYELNDDQVQTLFWCFKAVAEQKKRVTDADLRALVSDEVFQAEPVWKLGDLQVTCGTLGLSTATVKLLSSDGSTHVACSIGTGPVDSAYKAVDLIVKEQVTLLEYSMNAVTEGIDAIATTRVVIRGESETSTITTHALTGETVIRTFSGTGAGMDVVVSSVKAYIAALNKMSGFKESSQSAEKISISSLKI

SEQ ID NO: 60348 - protein, 206 aa, Glycine max
  peptide (1)..(206): Ceres Seq. ID no. 15175764
MLSGRHALRKRLEELGYELNDDQVQTLFWCFKAVAEQKKRVTDADLRALVSDEVFQAEPVWKLGDLQVTCGTLGLSTATVKLLSSDGSTHVACSIGTGPVDSAYKAVDLIVKEQVTLLEYSMNAVTEGIDAIATTRVVIRGESETSTITTHALTGETVIRTFSGTGAGMDVVVSSVKAYIAALNKMSGFKESSQSAEKISISSLKI

SEQ ID NO: 60349 - DNA, 1153 bp, Glycine max
  misc_feature (1)..(1153): Ceres Seq. ID no. 14308467
gaaccaaaacaaaaccattaattccatttgtttccttcatatggctaacaacattcttaccatgacaaacctcaatttcgaacttgattgcaagagaactcatgattctttggggagtttgagtcaattgaccacatctctggcttgtgtaacccaccatgaaagacaacaactcagggagacctttaaggcagtgaatggagaagacttgataagtcatcttcaaagatatgaagatgcgttttattctccttcttcttcttcttcttcttcttcttcttcttcttcttcttcttcttcttcttctatgaactgttctgctatttccttgtggatgcttgacacacatgacagggatgctgttgtggctagagaagctctccaacaagatgagaccaatttcaaggctcttgtggagatttttgtgggtagaaaatcaagtcatgttcttctcatctcacaggcctaccagaaaatgttcaaaagacacttggaccaagatattatcaatttggaccctccacacccctttcaaaagattattgtggcattggctgcatcacacaaagctcatcaagcagatgtcaaccatcatatatccaagtgtgatgctaggaggctctatgagactggggagggaagcttaggaactgtaattgaagctgttgtgttagaaattttaagcaagaggagcattccccaactgaagctaacattttttagttataaacacatttatggacatgactacacaaagtctatcaagagggggaaatacggtcaatttggtaaagctttaaaggtggttgtgaaatgcatttgtaatccagcacactattatgcaaagatactgtactcaagcatcaaaggggaaacaagggacagaagagttttggcacgaacattggtaagcagggctgagatagacatagatgaaattagaagggttttcaaagaaaagtatgggaaggaacttgctgatgctatatgtgaaggctttccatctggtgactactacagagactttcttgttgccttggctacaagatctaagtagaccctgttgcatctgatcttaacttgtattgcaacaaaatttgttgagaatagtataattcatatcaactttttgagtttcttttgtgggtaaaat

SEQ ID NO: 60350 - protein, 351 aa, Glycine max
  peptide (1)..(351): Ceres Seq. ID no. 14308468
NQNKTINSICFLHMANNILTMTNLNFELDCKRTHDSLGSLSQLTTSLACVTHHERQQLRETFKAVNGEDLISHLQRYEDAFYSPSSSSSSSSSSSSSSSSSSMNCSAISLWMLDTHDRDAVVAREALQQDETNFKALVEIFVGRKSSHVLLISQAYQKMFKRHLDQDIINLDPPHPFQKIIVALAASHKAHQADVNHHISKCDARRLYETGEGSLGTVIEAVVLEILSKRSIPQLKLTFFSYKHIYGHDYTKSIKRGKYGQFGKALKVVVKCICNPAHYYAKILYSSIKGETRDRRVLARTLVSRAEIDIDEIRRVFKEKYGKELADAICEGFPSGDYYRDFLVALATRSK

SEQ ID NO: 60351 - protein, 338 aa, Glycine max
  peptide (1)..(338): Ceres Seq. ID no. 14308469
MANNILTMTNLNFELDCKRTHDSLGSLSQLTTSLACVTHHERQQLRETFKAVNGEDLISHLQRYEDAFYSPSSSSSSSSSSSSSSSSSSMNCSAISLWMLDTHDRDAVVAREALQQDETNFKALVEIFVGRKSSHVLLISQAYQKMFKRHLDQDIINLDPPHPFQKIIVALAASHKAHQADVNHHISKCDARRLYETGEGSLGTVIEAVVLEILSKRSIPQLKLTFFSYKHIYGHDYTKSIKRGKYGQFGKALKVVVKCICNPAHYYAKILYSSIKGETRDRRVLARTLVSRAEIDIDEIRRVFKEKYGKELADAICEGFPSGDYYRDFLVALATRSK

SEQ ID NO: 60352 - protein, 331 aa, Glycine max
  peptide (1)..(331): Ceres Seq. ID no. 14308470
MTNLNFELDCKRTHDSLGSLSQLTTSLACVTHHERQQLRETFKAVNGEDLISHLQRYEDAFYSPSSSSSSSSSSSSSSSSSSMNCSAISLWMLDTHDRDAVVAREALQQDETNFKALVEIFVGRKSSHVLLISQAYQKMFKRHLDQDIINLDPPHPFQKIIVALAASHKAHQADVNHHISKCDARRLYETGEGSLGTVIEAVVLEILSKRSIPQLKLTFFSYKHIYGHDYTKSIKRGKYGQFGKALKVVVKCICNPAHYYAKILYSSIKGETRDRRVLARTLVSRAEIDIDEIRRVFKEKYGKELADAICEGFPSGDYYRDFLVALATRSK

SEQ ID NO: 60353 - DNA, 1411 bp, Glycine max
  misc_feature (1)..(1411): Ceres Seq. ID no. 13594180
aaaagcgtcgatttagcttcatccctagctactagctagcactttcacttccgttaatttaacagtagaccattaacttgaaaatttcaaaacaccgcatcaaaattttcttctgaaggcactaccgaagaatggctgtttttgcatcttcatcatctttacaaacccatttgcattcctcgctcttggcaccttcttttgaaggtgcacatgatcacaactcgtggtgggtgcgagcgagatcacagaaacgcattggtcaaagattacacacacaggacatagctagagggctgagaataaaagtccagagtgcagcaacaaaaccagcaaaatctccagctgaagaagattggaaggttaagcgagaatttctgcttcagaaaagggtaagaagtgtggaagtaaaggaagctctgcgccttcagaaagaaaacagttttgtattacttgatgtaagaccagaagcagagttcaaggaggcacatcctccaggtgcaatcaatgtgcaaatatataggctcataaaagagtggacagcatgggacattgcaagacgtgctgcatttttgttttttggtattttttctgggacagaagagaaccctgagttcatcaagaatgttgaagcaaaaatagataaagatgcaaagataatagtagcttgcacatcagggggtacattgagaccatcacaaaatttgcccgaaggtcaacaatcaaggtactaaattttctctctctcacccgaacatccggaatatatttatatagggctatttttatatgatactaagtggaagaaataaattttgatcctagatggataatctagattgaaggttaatatgacttttttgtttaatttctccattcatttaaatgtttaatgtttattgcagaccatactaataaattgttaatcattaaagtctgataatagtatctatcaatgtacatagagatgcaaaatcatggagtattgtaaagttgtataactgcttgatctaaactgcatcaattccatctacagaccgcaatttacaagtagctcttaaatctaaattattctgcaacagctaaaatacgccaccgcatttgtccatttgatattaccaagaatgtttactttcatgtcaaaagcttaaattgtcagtgaaaacacaactcttgacattaaacacatggaaacatgtcaaacctagaatatgaaccaaaacaccatctaaagccaaatgatatgaccaagagcgtttaccattatgttaaaaatttaagttgttaacagggacaaaatagttgagatataacactatgttctaaacataggcttttttctatttaagctattgggcatggaccactaaattgaacttgagttgggtttaagactgaaaaatatgaaatagat

SEQ ID NO: 60354 - protein, 199 aa, Glycine max
  peptide (1)..(199): Ceres Seq. ID no. 15221316
MAVFASSSSLQTHLHSSLLAPSFEGAHDHNSWWVRARSQKRIGQRLHTQDIARGLRIKVQSAATKPAKSPAEEDWKVKREFLLQKRVRSVEVKEALRLQKENSFVLLDVRPEAEFKEAHPPGAINVQIYRLIKEWTAWDIARRAAFLFFGIFSGTEENPEFIKNVEAKIDKDAKIIVACTSGGTLRPSQNLPEGQQSRY

SEQ ID NO: 60355 - DNA, 1386 bp, Glycine max
  misc_feature (1)..(1386): Ceres Seq. ID no. 15177987
aatttcggtcgcaaaagtttctaataccacaaagtcgtcatttttaattggggaccgtattcgtagggttgctagtaaacttactggttcaccctctatggtgaagagttctggtgatcggtctcagaagaccgatggaagcgctgatggtttttctgggaatggacctgatttttcttttgaggaggctcagaggtcaaatatggttgccccaacagagtattcatctctggacgatttgctatcttcacttcgtttggtggctcaagaaccccttggagattacagcttcctgaatcctattgtaagcttcttctatgatttcaggaattcgatagttgtggctgatgattctgtaaaagatatattttgtaaagaaaaagttggtactaaaaggaagaaaccgctcacggctggattgcccgaaacatttgaatttgaggatatgagtgacacatattggacagacagggtcattgacaatggtagtgaagcacaaccagcgcaaccgtgtcaaccaccacaaccagcacggagaaaccggaaaaaagaccatcaacttgttcctactgagccagggaagcctgttcaagttagtcgtaggccatattccaggaaacagtattctaacaacaatcacattgaggctcctgcaaaacctcctggttatatagatgagaatgcccctgctgaacttgttatgaactttgctgagttgggttctgttccctcagaaacaaaccttaataaaatgtttaggcgttttggacctctaaaggaagcagagacagaagttgatacagtaagcagccgagcaagagtggtttttaaaaagtgtgttgatgcagaggttgcttgtagtagtgctcaaaagttcaacatatttggcccaatacttgtaaattaccagcttaattatactcctagtgcattgttcaaagcttcatctgttgccacaacacaggaccaggagatgcatcttgatctctccaattttgaggttaatataattgggagtgttgacgatgatgtggcggctaagtttggctgaatgaattgctgaagcaaaattttacctagtggctgctgaagtaggtaggtaaccagaatgttaattcatctggtcatccatttttctgttaagagatatttttggttgtaggattcctttagttgtagttctggtagttttgtaattcattttctagttttctgtatagccttgtcaactgaccctcttttgtagttgccatcattctccatccggatcattttgaattttctagtctgaacactggttctatatcaagatctttcgaattctctagtctgaacactggttctgtatcaaaatcaatagtcattcggcaattatagttaacaaag

SEQ ID NO: 60356 - protein, 349 aa, Glycine max
  peptide (1)..(349): Ceres Seq. ID no. 15177988
ISVAKVSNTTKSSFLIGDRIRRVASKLTGSPSMVKSSGDRSQKTDGSADGFSGNGPDFSFEEAQRSNMVAPTEYSSLDDLLSSLRLVAQEPLGDYSFLNPIVSFFYDFRNSIVVADDSVKDIFCKEKVGTKRKKPLTAGLPETFEFEDMSDTYWTDRVIDNGSEAQPAQPCQPPQPARRNRKKDHQLVPTEPGKPVQVSRRPYSRKQYSNNNHIEAPAKPPGYIDENAPAELVMNFAELGSVPSETNLNKMFRRFGPLKEAETEVDTVSSRARVVFKKCVDAEVACSSAQKFNIFGPILVNYQLNYTPSALFKASSVATTQDQEMHLDLSNFEVNIIGSVDDDVAAKFG

SEQ ID NO: 60357 - protein, 317 aa, Glycine max
  peptide (1)..(317): Ceres Seq. ID no. 15177989
MVKSSGDRSQKTDGSADGFSGNGPDFSFEEAQRSNMVAPTEYSSLDDLLSSLRLVAQEPLGDYSFLNPIVSFFYDFRNSIVVADDSVKDIFCKEKVGTKRKKPLTAGLPETFEFEDMSDTYWTDRVIDNGSEAQPAQPCQPPQPARRNRKKDHQLVPTEPGKPVQVSRRPYSRKQYSNNNHIEAPAKPPGYIDENAPAELVMNFAELGSVPSETNLNKMFRRFGPLKEAETEVDTVSSRARVVFKKCVDAEVACSSAQKFNIFGPILVNYQLNYTPSALFKASSVATTQDQEMHLDLSNFEVNIIGSVDDDVAAKFG

SEQ ID NO: 60358 - protein, 282 aa, Glycine max
  peptide (1)..(282): Ceres Seq. ID no. 15177990
MVAPTEYSSLDDLLSSLRLVAQEPLGDYSFLNPIVSFFYDFRNSIVVADDSVKDIFCKEKVGTKRKKPLTAGLPETFEFEDMSDTYWTDRVIDNGSEAQPAQPCQPPQPARRNRKKDHQLVPTEPGKPVQVSRRPYSRKQYSNNNHIEAPAKPPGYIDENAPAELVMNFAELGSVPSETNLNKMFRRFGPLKEAETEVDTVSSRARVVFKKCVDAEVACSSAQKFNIFGPILVNYQLNYTPSALFKASSVATTQDQEMHLDLSNFEVNIIGSVDDDVAAKFG

SEQ ID NO: 60359 - DNA, 2182 bp, Glycine max
  misc_feature (1)..(2182): Ceres Seq. ID no. 13594171
acatctaactaccctccttcaaaactcatctcgaaaccctaagcactcgctcgggttcgtgtagtgccaaaccctagggctcattttccagatctattcagtttttctctcctctcttttccgatccaccgttggagatcgaagatggtgtccgacgccagcaagaagaaggccgcacagaagaaggccgccgccgccgccaagagaggtggcaaagctgccgccgctgccgttatggccgccacctcttccaaagccgccgacaaggtcgccaacggaatcgccgatattcagatttcggatcggacctgcaccggcgtcctctgttcgcatcctctctccagagatattcgaatagagtctctatccgtcacattccatggacatgatctcattgttgattctgaattggagctgaattatggaaggcgttatggcttactcggattaaatggttgtggaaaatctacactgcttacagccatcggttgtcgggaacttccaattcccgaccacatggacatatatcatctaaccagggagattgatgcctctgatatgtctgcattggaagctgtcataagctgtgacgaagaaagattgaaattggagaaagaagcagaagctttagctgcacaggatgatggaggtggtgaatcccttgaacgcatttatgaacgattggatgccctagatgcagccactgcagaaaagcgtgctgctgaaatcttacatggtcttggctttgacaagcaaatgcaggcaaagaagacacgtgatttttccggtggctggagaatgaggattgcattagcgcgagctctatttatgaacccaaccattcttctacttgatgaaccaaccaatcaccttgatttggaagcttgtgtgtggctggaggagagtttgaagaagtttgaacgtattctggttgtgatttcacactctcaggactttcttaatggtgtctgcacaaatattatccacatgcaaagcaaaaaactgaagctctacactggtaattatgatcaatatgttcagacacgttctgagctagaagagaaccagatgaaacagtacaagtgggagcaggagcagattgcctcaatgaaggaatacattgcccgatttggccatggttcggctaaactagctcgccaggcacagagtaaggagaaaacactggcaaaaatggaacgtggtggacttgcagagaaggtggtcagagacaaagttttggtatttcgttttactgatgttgggaaacttccccctccagttctccagtttgttgaggtgtcatttggttatactcctgataatctcatctacaagaacattgactttggggttgatttagattctcgggttgcgctggttgggcccaatggtgctgggaagagtacactactgaagctaatgacaggtgacttgatgcctagtgatggcatggtccgacgtcataatcatcttcgaattgcacaatatcaccagcatttggccgaaaagctagacatggaaatgtctgctctccagtttatgattaaagaataccctggaaacgaggaagagaagatgagggcggcgattgggaagtttgggctgtcaggtaaagcgcaggtgatgccaatgaagaacttgtcagatggacagaggagccgagttatatttgcttggttagcttggagacagcctcagatgcttcttttggatgagccaactaatcatttggatattgagacaattgactcgttggccgaggcattgaatgaatgggacggtggcttggtgcttgtcagccatgattttaggctcataaatcaggtggcgcatgagatatgggtatgtgctaatcaatctgtgaccagatgggagggtgacattatggaattcaaggcgcatctaaagtcgaaggcgggtttatctgactgaaacaatacgagtgtggatgctgccggtgtgtagtagtattacattaaaaggttatgatttttgttcgagcagagatccgtaataattttttttagttactatttcttgtgcttatcatttatttgcctggttgttaacaagcgtggatgaatgggatttcaccttgaggaaacgaagcttattctacaaatgaactatttcaaccgagaatattattatttgtggtattataattacgttaattcctctc

SEQ ID NO: 60360 - protein, 595 aa, Glycine max
  peptide (1)..(595): Ceres Seq. ID no. 15221313
MVSDASKKKAAQKKAAAAAKRGGKAAAAAVMAATSSKAADKVANGIADIQISDRTCTGVLCSHPLSRDIRIESLSVTFHGHDLIVDSELELNYGRRYGLLGLNGCGKSTLLTAIGCRELPIPDHMDIYHLTREIDASDMSALEAVISCDEERLKLEKEAEALAAQDDGGGESLERIYERLDALDAATAEKRAAEILHGLGFDKQMQAKKTRDFSGGWRMRIALARALFMNPTILLLDEPTNHLDLEACVWLEESLKKFERILVVISHSQDFLNGVCTNIIHMQSKKLKLYTGNYDQYVQTRSELEENQMKQYKWEQEQIASMKEYIARFGHGSAKLARQAQSKEKTLAKMERGGLAEKVVRDKVLVFRFTDVGKLPPPVLQFVEVSFGYTPDNLIYKNIDFGVDLDSRVALVGPNGAGKSTLLKLMTGDLMPSDGMVRRHNHLRIAQYHQHLAEKLDMEMSALQFMIKEYPGNEEEKMRAAIGKFGLSGKAQVMPMKNLSDGQRSRVIFAWLAWRQPQMLLLDEPTNHLDIETIDSLAEALNEWDGGLVLVSHDFRLINQVAHEIWVCANQSVTRWEGDIMEFKAHLKSKAGLSD

SEQ ID NO: 60361 - protein, 565 aa, Glycine max
  peptide (1)..(565): Ceres Seq. ID no. 15221314
MAATSSKAADKVANGIADIQISDRTCTGVLCSHPLSRDIRIESLSVTFHGHDLIVDSELELNYGRRYGLLGLNGCGKSTLLTAIGCRELPIPDHMDIYHLTREIDASDMSALEAVISCDEERLKLEKEAEALAAQDDGGGESLERIYERLDALDAATAEKRAAEILHGLGFDKQMQAKKTRDFSGGWRMRIALARALFMNPTILLLDEPTNHLDLEACVWLEESLKKFERILVVISHSQDFLNGVCTNIIHMQSKKLKLYTGNYDQYVQTRSELEENQMKQYKWEQEQIASMKEYIARFGHGSAKLARQAQSKEKTLAKMERGGLAEKVVRDKVLVFRFTDVGKLPPPVLQFVEVSFGYTPDNLIYKNIDFGVDLDSRVALVGPNGAGKSTLLKLMTGDLMPSDGMVRRHNHLRIAQYHQHLAEKLDMEMSALQFMIKEYPGNEEEKMRAAIGKFGLSGKAQVMPMKNLSDGQRSRVIFAWLAWRQPQMLLLDEPTNHLDIETIDSLAEALNEWDGGLVLVSHDFRLINQVAHEIWVCANQSVTRWEGDIMEFKAHLKSKAGLSD

SEQ ID NO: 60362 - protein, 471 aa, Glycine max
  peptide (1)..(471): Ceres Seq. ID no. 15221315
MDIYHLTREIDASDMSALEAVISCDEERLKLEKEAEALAAQDDGGGESLERIYERLDALDAATAEKRAAEILHGLGFDKQMQAKKTRDFSGGWRMRIALARALFMNPTILLLDEPTNHLDLEACVWLEESLKKFERILVVISHSQDFLNGVCTNIIHMQSKKLKLYTGNYDQYVQTRSELEENQMKQYKWEQEQIASMKEYIARFGHGSAKLARQAQSKEKTLAKMERGGLAEKVVRDKVLVFRFTDVGKLPPPVLQFVEVSFGYTPDNLIYKNIDFGVDLDSRVALVGPNGAGKSTLLKLMTGDLMPSDGMVRRHNHLRIAQYHQHLAEKLDMEMSALQFMIKEYPGNEEEKMRAAIGKFGLSGKAQVMPMKNLSDGQRSRVIFAWLAWRQPQMLLLDEPTNHLDIETIDSLAEALNEWDGGLVLVSHDFRLINQVAHEIWVCANQSVTRWEGDIMEFKAHLKSKAGLSD

SEQ ID NO: 60363 - DNA, 1817 bp, Glycine max
  misc_feature (1)..(1817): Ceres Seq. ID no. 14308221
agtcacaacacacacacacatagcaatggcatctatggcggctataggttctctcaatgttccacgttctgcttcttcccgttcatcctttgtgggaagaaaaagcgttccacgcagcctttccttctctgcatcacaactttgtggagacaagattcccacagattcagttttattggcaccaaaaataggtcgcagtccagttatcgttactcctaaagcagtttctgattcccaaaactcacaaacgtgccttgatcccgatgctagcagaagtgtgcttggcattatacttggaggtggtgctgggactcggctttatccactcaccaagaagagggcaaagccagctgttcctcttggagctaactataggcttattgatattcctgttagcaactgcttgaatagcaatgtctccaagatctatgttctcactcaattcaattctgcgtcgttaaaccgacacctttctcgtgcttatgcaagcaacatgggtggctacaaaaatgagggatttgttgaggttcttgctgctcagcagagtcctgagaatcctaattggttccagggtactgcagatgctgtgaggcagtatttgtggctttttgaagagcacaatgttttggaattcttggttctggctggtgaccatttgtatcgaatggattacgagaaatttatccaagcgcatagggaaactgatgctgatatcactgtggctgcattgccaatggatgaagcgcgtgccactgcatttggtttgatgaagattgatgaagaggggcgtataattgaatttgctgaaaagccaaaaggagaacagttgaaagctatgaaggttgatactacaattttgggtcttgatgacgagagagcaaaagaaatgccttatattgctagcatgggtatatatgttgttagcaaaaatgtgatgttagacctgctccgtgagaagtttcctggtgcaaatgactttgggagtgaagtgattcctggtgctacttctattggaatgagagtgcaagcttacttgtatgatggctactgggaagacattggtacaatcgaggctttctataatgcaaatctgggaatcaccaaaaagcctgtgcctgacttcagtttctatgatcgttcatctccaatctacacccaaccacgatatttgcctccctctaagatgcttgatgctgatgtcactgatagtgttattggtgaaggatgtgtgactaagaactgcaaaattcaccattctgtggttgggctgcgatcttgcatatcagaaggtgcaattattgaagacacgttattaatgggggcagattattacgagacggaggctgataagaggtttctggctgccaaaggcagtgttccaattggtataggcaggaactctcatatcaaaagggcaattattgacaagaatgctcgaattggggaaaatgtcaagattattaacagtgacaatgtccaagaagctgcaagggaaacagatgggtatttcataaaaagtgggattgtcacagtaatcaaggatgctttaattcctagtggaacagtcatctaaacacaaccacctccccaaaaaatttcttgtaccccaaatcctaatggtgactgcgaagctcattaccaccgcaggagagtttatcaagctctgcttccacgtctaagataggcttttgtgtttcatgatatatatttttgggcagtggcttgtaaataatagcggaagagaaggcccgctatgagcaatcacgctgtaaagttcgttaatcaattcaataaaacaagtttctttatttcgtacc

SEQ ID NO: 60364 - protein, 523 aa, Glycine max
  peptide (1)..(523): Ceres Seq. ID no. 14308222
VTTHTHIAMASMAAIGSLNVPRSASSRSSFVGRKSVPRSLSFSASQLCGDKIPTDSVLLAPKIGRSPVIVTPKAVSDSQNSQTCLDPDASRSVLGIILGGGAGTRLYPLTKKRAKPAVPLGANYRLIDIPVSNCLNSNVSKIYVLTQFNSASLNRHLSRAYASNMGGYKNEGFVEVLAAQQSPENPNWFQGTADAVRQYLWLFEEHNVLEFLVLAGDHLYRMDYEKFIQAHRETDADITVAALPMDEARATAFGLMKIDEEGRIIEFAEKPKGEQLKAMKVDTTILGLDDERAKEMPYIASMGIYVVSKNVMLDLLREKFPGANDFGSEVIPGATSIGMRVQAYLYDGYWEDIGTIEAFYNANLGITKKPVPDFSFYDRSSPIYTQPRYLPPSKMLDADVTDSVIGEGCVTKNCKIHHSVVGLRSCISEGAIIEDTLLMGADYYETEADKRFLAAKGSVPIGIGRNSHIKRAIIDKNARIGENVKIINSDNVQEAARETDGYFIKSGIVTVIKDALIPSGTVI

SEQ ID NO: 60365 - protein, 515 aa, Glycine max
  peptide (1)..(515): Ceres Seq. ID no. 14308223
MASMAAIGSLNVPRSASSRSSFVGRKSVPRSLSFSASQLCGDKIPTDSVLLAPKIGRSPVIVTPKAVSDSQNSQTCLDPDASRSVLGIILGGGAGTRLYPLTKKRAKPAVPLGANYRLIDIPVSNCLNSNVSKIYVLTQFNSASLNRHLSRAYASNMGGYKNEGFVEVLAAQQSPENPNWFQGTADAVRQYLWLFEEHNVLEFLVLAGDHLYRMDYEKFIQAHRETDADITVAALPMDEARATAFGLMKIDEEGRIIEFAEKPKGEQLKAMKVDTTILGLDDERAKEMPYIASMGIYVVSKNVMLDLLREKFPGANDFGSEVIPGATSIGMRVQAYLYDGYWEDIGTIEAFYNANLGITKKPVPDFSFYDRSSPIYTQPRYLPPSKMLDADVTDSVIGEGCVTKNCKIHHSVVGLRSCISEGAIIEDTLLMGADYYETEADKRFLAAKGSVPIGIGRNSHIKRAIIDKNARIGENVKIINSDNVQEAARETDGYFIKSGIVTVIKDALIPSGTVI

SEQ ID NO: 60366 - protein, 512 aa, Glycine max
  peptide (1)..(512): Ceres Seq. ID no. 14308224
MAAIGSLNVPRSASSRSSFVGRKSVPRSLSFSASQLCGDKIPTDSVLLAPKIGRSPVIVTPKAVSDSQNSQTCLDPDASRSVLGIILGGGAGTRLYPLTKKRAKPAVPLGANYRLIDIPVSNCLNSNVSKIYVLTQFNSASLNRHLSRAYASNMGGYKNEGFVEVLAAQQSPENPNWFQGTADAVRQYLWLFEEHNVLEFLVLAGDHLYRMDYEKFIQAHRETDADITVAALPMDEARATAFGLMKIDEEGRIIEFAEKPKGEQLKAMKVDTTILGLDDERAKEMPYIASMGIYVVSKNVMLDLLREKFPGANDFGSEVIPGATSIGMRVQAYLYDGYWEDIGTIEAFYNANLGITKKPVPDFSFYDRSSPIYTQPRYLPPSKMLDADVTDSVIGEGCVTKNCKIHHSVVGLRSCISEGAIIEDTLLMGADYYETEADKRFLAAKGSVPIGIGRNSHIKRAIIDKNARIGENVKIINSDNVQEAARETDGYFIKSGIVTVIKDALIPSGTVI

SEQ ID NO: 60367 - DNA, 1234 bp, Glycine max
  misc_feature (1)..(1234): Ceres Seq. ID no. 15177588
gaaagggatgataattgggctagtggagtgacagagagaaaccggagcagagcagagaagagaaacaaaaggtggggtcagtggaaattatcatcatacaatttcacttaacccttcaagctcaagacagcacagcaatcacatcgcatgtcccttatatatatacttattcattgcctctgaaccttatcaaaacacttctcaatctctctctctccaatggccaaagacctcgaaacggagattcaaagtgggttgcctcacaaggactaccacgacccaccccccgccccattctacgaccccgccgagctccgaaagtggtccttcttccgagccctcatcgccgagttcgtcgccaccctcctcttcctctacgtcaccatcctcaccgtcatcggctacaaccaccagacagccaccgccgccgagccctgcagcggcgtcggcgtcctcggcatcgcttgggcctttggaggcatgatttttgtcctcgtctattgcaccgccggcatatcagggggacacataaacccggcggtgacgttcgggttgtttttggcgaggaaggtgtcgctgacaagagctgttgggtacatggtggctcaggtgttgggggccataagtggggtggggcttgtgaaggctttgcagaagagctactacaacaggtacaaaggtggcgtgaacatgctcgctgatggttacagcaaaggaaccggtttgggcgctgagattattggcacctttattcttgtctacaccgtcttctctgctaccgatcccaagagagtagcaagagactcccatgttcccgtgttggcaccacttccaattgggtttgcggtgttcatggttcacttggccaccatccctatcaccggcactggcatcaacccagctagaagccttgggcctgctgtcatattcaacaacgagaaggcttgggatgaccagtggatcttctgggttggacccttcatcggtgctgctcttgctgcattctaccaccagtccgtgttgatggcccaagcagcaaaggctctagggtctttcaggagctcctcaaacctgtaattctggccaagctatttgagctacgagagacatgcttcatttaattgtgttcttaattaatttgcttatacatggtggattggaataatctgtatatcctcgtcactatgtttatttaatttatgtttactatatttgtggtgacgtccatctcaac

SEQ ID NO: 60368 - protein, 285 aa, Glycine max
  peptide (1)..(285): Ceres Seq. ID no. 15177589
MAKDLETEIQSGLPHKDYHDPPPAPFYDPAELRKWSFFRALIAEFVATLLFLYVTILTVIGYNHQTATAAEPCSGVGVLGIAWAFGGMIFVLVYCTAGISGGHINPAVTFGLFLARKVSLTRAVGYMVAQVLGAISGVGLVKALQKSYYNRYKGGVNMLADGYSKGTGLGAEIIGTFILVYTVFSATDPKRVARDSHVPVLAPLPIGFAVFMVHLATIPITGTGINPARSLGPAVIFNNEKAWDDQWIFWVGPFIGAALAAFYHQSVLMAQAAKALGSFRSSSNL

SEQ ID NO: 60369 - protein, 198 aa, Glycine max
  peptide (1)..(198): Ceres Seq. ID no. 15177590
MIFVLVYCTAGISGGHINPAVTFGLFLARKVSLTRAVGYMVAQVLGAISGVGLVKALQKSYYNRYKGGVNMLADGYSKGTGLGAEIIGTFILVYTVFSATDPKRVARDSHVPVLAPLPIGFAVFMVHLATIPITGTGINPARSLGPAVIFNNEKAWDDQWIFWVGPFIGAALAAFYHQSVLMAQAAKALGSFRSSSNL

SEQ ID NO: 60370 - protein, 159 aa, Glycine max
  peptide (1)..(159): Ceres Seq. ID no. 15177591
MVAQVLGAISGVGLVKALQKSYYNRYKGGVNMLADGYSKGTGLGAEIIGTFILVYTVFSATDPKRVARDSHVPVLAPLPIGFAVFMVHLATIPITGTGINPARSLGPAVIFNNEKAWDDQWIFWVGPFIGAALAAFYHQSVLMAQAAKALGSFRSSSNL

SEQ ID NO: 60371 - DNA, 1317 bp, Glycine max
  misc_feature (1)..(1317): Ceres Seq. ID no. 14311993
gttttaaaaatgttcatattccgttcttcacttttggacatgtataaaaaaatacattacaccttttgatgaggtagtaattctctaggagaaagaaataaagaagtagctttttggagggttgacatggaagaacggtatgagccattgaaggagcttggtgctgggaattttggtgtggcaaggttggcaaaagacaagaaaactggagagcttgttgcggtcaaatacatagagaggggcaaaaagattgatgagaatgttcagagggagataattaaccaccgatctttaaggcatccaaatataatcaggtttaaagaggtgttactgacccctacacatttagctatcgtcttggagtatgcttcaggtggtgaactttttgagaggatttgtactgctggtcgatttagcgaagatgaggcaagatatttcttccagcagctaatatctggggttagctactgtcattcaatggaaatttgtcatagagatctaaaattggaaaacactctcttggatggaaatccatctcctcggcttaaaatttgtgactttggttattccaagtctgctctactgcactctcaacctaaatcaacagttggaactcctgcatacattgctccggaggttctgtcgcgaaaggagtatgatggaaagatttcagatgtttggtcctgtggagtgactctttatgtcatgttagttggtgcatacccatttgaagatccagaagatcctagaaatttcagaaagactattgggagaataatcggtattcagtactccatacccgactatgttcgtgtttcttctgactgtaggaatcttctctctcgcatctttgttgctgatcctgccaagaggatcaccatcccagagataaaacagtatccttggtttctgaagaatatgcctaaagagatcatcgaagctgaaagaaaaggattcgaggaaacaaccaaagaccaaccaaaccagaaggtggaggaaatcatgaggataattcaagcggcaaggataccaggacaaggatccaaagctggagaaggtggacaagctggcactggatcattagatattgaggatgatgaggaaattgatgttagtggtgactatgaacaagtgtgatcgagaacttgattagttgatatggctagattgtctataagacatagtcagcattattaacatctatcacagtgtgcaacactggtgttctaaagatacttgttataccaggcttgaaataggattttgtgtttatttaaatgaataatattaagaaaaggctgctatttcagtttcagt

SEQ ID NO: 60372 - protein, 336 aa, Glycine max
  peptide (1)..(336): Ceres Seq. ID no. 14311994
MEERYEPLKELGAGNFGVARLAKDKKTGELVAVKYIERGKKIDENVQREIINHRSLRHPNIIRFKEVLLTPTHLAIVLEYASGGELFERICTAGRFSEDEARYFFQQLISGVSYCHSMEICHRDLKLENTLLDGNPSPRLKICDFGYSKSALLHSQPKSTVGTPAYIAPEVLSRKEYDGKISDVWSCGVTLYVMLVGAYPFEDPEDPRNFRKTIGRIIGIQYSIPDYVRVSSDCRNLLSRIFVADPAKRITIPEIKQYPWFLKNMPKEIIEAERKGFEETTKDQPNQKVEEIMRIIQAARIPGQGSKAGEGGQAGTGSLDIEDDEEIDVSGDYEQV

SEQ ID NO: 60373 - protein, 219 aa, Glycine max
  peptide (1)..(219): Ceres Seq. ID no. 14311995
MEICHRDLKLENTLLDGNPSPRLKICDFGYSKSALLHSQPKSTVGTPAYIAPEVLSRKEYDGKISDVWSCGVTLYVMLVGAYPFEDPEDPRNFRKTIGRIIGIQYSIPDYVRVSSDCRNLLSRIFVADPAKRITIPEIKQYPWFLKNMPKEIIEAERKGFEETTKDQPNQKVEEIMRIIQAARIPGQGSKAGEGGQAGTGSLDIEDDEEIDVSGDYEQV

SEQ ID NO: 60374 - DNA, 1544 bp, Glycine max
  misc_feature (1)..(1544): Ceres Seq. ID no. 15176012
actaccaccatagcagctggaaagcaagagaggaacatgatgaaagttgcacctacgagtccgcttcccacgaggcacgtgcggtttctgtttcaccgcacgtgccttgagcattcaataattaccaccaactcgccaaagtcacttaattataaacgcggaacgcatttcaccaggagaagcagaaccatcgctcaagctcacactcacagtaaaatccaaaccaaaatggcggaaaataaagccattgaagaagctcagagcaagttccgttcagagttccttcaagttctgcgtagtaggcgacccgctcaagttccattaacagtcgaattcgcgaagccagtggtgaatcctttgcatcagaactctcctccatcgatcgaagagatcaagataatggagtcgtgtccgagaactgatatagagaaccttgaagacttgctcgaggaggagaatctctatttgaatatagaggaaggagagcaaggacggttgcctttgttgattttgaagttgaaggaaagcgataagcagagaaaaaggcctgcagttgtttttcttcacagtacgaacaaatacaaagaagtcctacgtccattgcttaaggcgtatgcttcgcgaggatatatagcaatttctgttgattctcgttaccatggagaacgtgctaccagcgcaaccacctatcgcgatgcacttatttctgcatggaaaactggtgagacgatgccattcatatttgacacggtctgggacttgattagattggcagattatctaacacagagagaggatatagacccttctaggataggaatcactggaatatcacttggaggaatgcatgcatggtttgctgcagttgctgatactcgctatgctgtggttgctcctctgattggcattcagggatttcaatgggccataggcaacgataaatggcaggctcgagttgatagtataaagcctctttttgaggcggctcgtgatgatttgggtaaaggtgctattgacaaagaagtggtggagaaggtgtgggaccgaattgctcctggtttagcttcccaatttgactcaccttattcagttccaactatcgcaccacgtcctttgcttattgttaatggtgcggaagatcctcggtgtcccgttgcaggcttggaaattccaagggcacaagcaagccaggcatatggacagtttgactgtttagataatttcaagattattacagaacctggagttggacaccaattaacgagacttcaagtgaaagaatcatcttattggtttgacaggttcttgaacccttagcccgtgccctcatatgtgttcatcaagccctgtgtggttgttgctctagctcattgcctcatttctattgtcattgtgtcatgatatcaaagtcaataaattgtcaaatagaaatcatcatcatgatgactcttaaggtacagtcaataaatttattatgtatgatggtgtgtaattgaatgatagtaaaaaaaaaattatattgtcattgcatatattatttattc

SEQ ID NO: 60375 - protein, 438 aa, Glycine max
  peptide (1)..(438): Ceres Seq. ID no. 15176013
TTTIAAGKQERNMMKVAPTSPLPTRHVRFLFHRTCLEHSIITTNSPKSLNYKRGTHFTRRSRTIAQAHTHSKIQTKMAENKAIEEAQSKFRSEFLQVLRSRRPAQVPLTVEFAKPVVNPLHQNSPPSIEEIKIMESCPRTDIENLEDLLEEENLYLNIEEGEQGRLPLLILKLKESDKQRKRPAVVFLHSTNKYKEVLRPLLKAYASRGYIAISVDSRYHGERATSATTYRDALISAWKTGETMPFIFDTVWDLIRLADYLTQREDIDPSRIGITGISLGGMHAWFAAVADTRYAVVAPLIGIQGFQWAIGNDKWQARVDSIKPLFEAARDDLGKGAIDKEVVEKVWDRIAPGLASQFDSPYSVPTIAPRPLLIVNGAEDPRCPVAGLEIPRAQASQAYGQFDCLDNFKIITEPGVGHQLTRLQVKESSYWFDRFLNP

SEQ ID NO: 60376 - protein, 426 aa, Glycine max
  peptide (1)..(426): Ceres Seq. ID no. 15176014
MMKVAPTSPLPTRHVRFLFHRTCLEHSIITTNSPKSLNYKRGTHFTRRSRTIAQAHTHSKIQTKMAENKAIEEAQSKFRSEFLQVLRSRRPAQVPLTVEFAKPVVNPLHQNSPPSIEEIKIMESCPRTDIENLEDLLEEENLYLNIEEGEQGRLPLLILKLKESDKQRKRPAVVFLHSTNKYKEVLRPLLKAYASRGYIAISVDSRYHGERATSATTYRDALISAWKTGETMPFIFDTVWDLIRLADYLTQREDIDPSRIGITGISLGGMHAWFAAVADTRYAVVAPLIGIQGFQWAIGNDKWQARVDSIKPLFEAARDDLGKGAIDKEVVEKVWDRIAPGLASQFDSPYSVPTIAPRPLLIVNGAEDPRCPVAGLEIPRAQASQAYGQFDCLDNFKIITEPGVGHQLTRLQVKESSYWFDRFLNP

SEQ ID NO: 60377 - protein, 425 aa, Glycine max
  peptide (1)..(425): Ceres Seq. ID no. 15176015
MKVAPTSPLPTRHVRFLFHRTCLEHSIITTNSPKSLNYKRGTHFTRRSRTIAQAHTHSKIQTKMAENKAIEEAQSKFRSEFLQVLRSRRPAQVPLTVEFAKPVVNPLHQNSPPSIEEIKIMESCPRTDIENLEDLLEEENLYLNIEEGEQGRLPLLILKLKESDKQRKRPAVVFLHSTNKYKEVLRPLLKAYASRGYIAISVDSRYHGERATSATTYRDALISAWKTGETMPFIFDTVWDLIRLADYLTQREDIDPSRIGITGISLGGMHAWFAAVADTRYAVVAPLIGIQGFQWAIGNDKWQARVDSIKPLFEAARDDLGKGAIDKEVVEKVWDRIAPGLASQFDSPYSVPTIAPRPLLIVNGAEDPRCPVAGLEIPRAQASQAYGQFDCLDNFKIITEPGVGHQLTRLQVKESSYWFDRFLNP

SEQ ID NO: 60378 - DNA, 731 bp, Glycine max
  misc_feature (1)..(731): Ceres Seq. ID no. 15226667
ccgggccccccctcgagtcagctacgtaggccccccccccccctaataaaattttgaattaataatcagcataagttactaaaataaaatttcaatattgattgaagaacaacactaaaaacaattaagaaactactagcccacttcgtatcaaagatataaataatatcagtcttcttaatgattctaaaaattaagtataaggttagtaaccaggtatgattgttactgcagattggctggaattgccaggtgctttgattcttcttatcgtcgtagctccttctctaattgcaagcacttttagagacaacattgttggggtggtggtgtgcctcatcattgcatgctatttgctgcaagaacacattcgggcttctggtggtttcagaaactccttcactaaagctcacggcgtatcaaattccatcggcataatacttctgttggtttatcccatctgggcactggttgtcatacttttttaggcaccaccatttggacttgttgattcgtgtgaattaaaccaattgttttctgtaccattcatttgttggaacttgatatctataaacaccccgccattgttttgcgattcatctttgtcctaaagttagcatgtgtaaaaaagtggaataaaatctcagttgtagtcttctggtttcgtagaatgtaaaaaaaacaaaatatgaagaggattggtgtggtgtctttctagctgtcgtgtattc

SEQ ID NO: 60379 - protein, 89 aa, Glycine max
  peptide (1)..(89): Ceres Seq. ID no. 15226668
MIVTADWLELPGALILLIVVAPSLIASTFRDNIVGVVVCLIIACYLLQEHIRASGGFRNSFTKAHGVSNSIGIILLLVYPIWALVVILF

SEQ ID NO: 60380 - DNA, 1438 bp, Glycine max
  misc_feature (1)..(1438): Ceres Seq. ID no. 15178046
aaaactgaaggctgtgctttgctctgcttctgaatgaagaaaatgaagacacatagtcgttaccaggacaatttggattctgattcaaagagtaagagatcatgcttctgtggaatcgttccagcggtttctttactttgtgttgtcttgcttttctcgactttattctttgcacaacgctacaacgagaaactattaaggtggaaaatgaacatcaagaaattgaaaaatgacaattgcaagaaccagtgcaggactggtggaagtcatgcattacctgaaggcataatctccaacacttctgatttggaaatgcggcatttgtgggatcttcctatgactaagacaatagagaataaggaaaatgcatcaaccaatttgtttgcaatggcagttgggataaagcagaaagatcttgtgaacaaattggtcaaaaagtttctatcaagcaatttcgttgtaatgctcttccactacgatggtattgttgacgaatggaatgactttgaatggaataatcatgtcattcatgtggctgtagccaatcaaagtaaatggtggtttgcaaagcgtttcttacaccctgacatagttgcagaatatggttatattttcctatgggatgaggatcttggagttgaacacttccacccggataggtatgtttctattataaaaagtgaaggactggaaatatcacaaccagcacttgatagtaacaaatcagaggtacatcatcagattactgcacgtgggaggaggtcgaatgtgcacagaaggatttacaaaactggtggtagtggcaaacgttgtgatgaaagtagcactgctcctccttgcacagggtgggttgaaatgatggcctttgttttctcaagagctgcatggcgttgcgtttggtatatgatccagaatgacttgatccatgcatggggtctagatatgcagctaggctactgtgctcagggtgatcgaacaaaaaatgttggtgttgtggatgctgaatacatagtccactacggtcatcctactcttggaggcttagatgtgaatgaggtttcatctcggacaaaggatcatagagttgatgtgaggagactgtcttaccgtgaattacaagtttttagaaaacgatggcagaaggcagttgaggaggatgattgttgggtcgatccatttcaataacaaatactgatagtcaaaattgtgtatagattttatgaaaatacacaaatatgtaaggagaagcaaattcaattggcagataaaacaaatgttgatcatggagaggggagtagttaaaaaagcctagaggagtttttttagcatctcaagggcaagcatgacttcatggggaaaaaattcttctcaattgagtttggtgcatttttgtttaacctttcattttttaatagtttccaaatggaattgtttattc

SEQ ID NO: 60381 - protein, 383 aa, Glycine max
  peptide (1)..(383): Ceres Seq. ID no. 15178047
MKKMKTHSRYQDNLDSDSKSKRSCFCGIVPAVSLLCVVLLFSTLFFAQRYNEKLLRWKMNIKKLKNDNCKNQCRTGGSHALPEGIISNTSDLEMRHLWDLPMTKTIENKENASTNLFAMAVGIKQKDLVNKLVKKFLSSNFVVMLFHYDGIVDEWNDFEWNNHVIHVAVANQSKWWFAKRFLHPDIVAEYGYIFLWDEDLGVEHFHPDRYVSIIKSEGLEISQPALDSNKSEVHHQITARGRRSNVHRRIYKTGGSGKRCDESSTAPPCTGWVEMMAFVFSRAAWRCVWYMIQNDLIHAWGLDMQLGYCAQGDRTKNVGVVDAEYIVHYGHPTLGGLDVNEVSSRTKDHRVDVRRLSYRELQVFRKRWQKAVEEDDCWVDPFQ

SEQ ID NO: 60382 - protein, 380 aa, Glycine max
  peptide (1)..(380): Ceres Seq. ID no. 15178048
MKTHSRYQDNLDSDSKSKRSCFCGIVPAVSLLCVVLLFSTLFFAQRYNEKLLRWKMNIKKLKNDNCKNQCRTGGSHALPEGIISNTSDLEMRHLWDLPMTKTIENKENASTNLFAMAVGIKQKDLVNKLVKKFLSSNFVVMLFHYDGIVDEWNDFEWNNHVIHVAVANQSKWWFAKRFLHPDIVAEYGYIFLWDEDLGVEHFHPDRYVSIIKSEGLEISQPALDSNKSEVHHQITARGRRSNVHRRIYKTGGSGKRCDESSTAPPCTGWVEMMAFVFSRAAWRCVWYMIQNDLIHAWGLDMQLGYCAQGDRTKNVGVVDAEYIVHYGHPTLGGLDVNEVSSRTKDHRVDVRRLSYRELQVFRKRWQKAVEEDDCWVDPFQ

SEQ ID NO: 60383 - protein, 325 aa, Glycine max
  peptide (1)..(325): Ceres Seq. ID no. 15178049
MNIKKLKNDNCKNQCRTGGSHALPEGIISNTSDLEMRHLWDLPMTKTIENKENASTNLFAMAVGIKQKDLVNKLVKKFLSSNFVVMLFHYDGIVDEWNDFEWNNHVIHVAVANQSKWWFAKRFLHPDIVAEYGYIFLWDEDLGVEHFHPDRYVSIIKSEGLEISQPALDSNKSEVHHQITARGRRSNVHRRIYKTGGSGKRCDESSTAPPCTGWVEMMAFVFSRAAWRCVWYMIQNDLIHAWGLDMQLGYCAQGDRTKNVGVVDAEYIVHYGHPTLGGLDVNEVSSRTKDHRVDVRRLSYRELQVFRKRWQKAVEEDDCWVDPFQ

SEQ ID NO: 60384 - DNA, 1450 bp, Glycine max
  misc_feature (1)..(1450): Ceres Seq. ID no. 14308594
accgatattcaaaagatgggcatccaacatgtgctggttttgccatttcctgctcaagggcatgtcaatcctctgatgctcttgtcaaaaaaactagctgaacatggcttcaaagtcacttttgtcaacacagatttcaaccacaagagagtgttgagtgcaacaaatgaggagggatcagcagtgagattaatctcaatcccagatggtttaggccctgaggatgacagaaataacgtggtcaatttatgttcggaatccttaagcagtaccatgacttctgcccttgagaaggtcataaaggatattgatgcacttgatagtgctagtgagaaaatcacaggtatagtggctgatgtgaacatggcatgggccttggaactcacagataagctaggaatcaaaggtgctgtcttctgccctgcttcagcagctgttttagtcttgggtgagaacattccaaacctcattcaagatgggatcataaataccgaagggttcccgattataaaagggaaatttcaactatccccagaaatgccaattatggacacagctgacattccatggtgcagcttaggtgacccaaccatgcacaaggttatatataatcatgcgtcaaagattatacgatattcacatttaacagattggtggcttggaaacaccacaagtgaccttgaacctggtgctatatctttgtctccaaagatcctaccaattggtccactcatagggagtggtaatgacattagatcattggggcaattctgggaagaagacgtctcttgcttgacctggcttgatcaacaaccaccttgttctgtcatatacgttgcctttggtagctctactatttttgaccctcatcaactcaaggaactagctcttggacttgacctcacaaacaggccttttctgtgggttgttcgtgaggatgccagtggaagcaccaaaatcacatacccagatgaattccaaggcacttgtggtaaaattgttaaatgggcacctcaacaaaaggtgttaagccaccctgcaatagcttgttttattagtcactgtggttggaattctaccttggaaggtgtgtccaatggggtacctttcttgtgttggccatattatactgaccaattagttgacaaggcttacatttgtgatatgtggaaggtgggtttgggattcgatttggatgacaaagggctgatatcacgttgggagataaagaagaaagtagaccaaatccttggagatgagaacataaggggaaggtctcaaaaactgaaggaaatggttctaagtaacattgcagaagggggacaatcctatgagaattttaacaagtttgtggagtggctcaaggaataaaaatgtatttgttgatgccctgatgttgtgaacaatgtttatgatgttcctgaaaaatattgaacatttaaatttagcc

SEQ ID NO: 60385 - protein, 456 aa, Glycine max
  peptide (1)..(456): Ceres Seq. ID no. 14308595
TDIQKMGIQHVLVLPFPAQGHVNPLMLLSKKLAEHGFKVTFVNTDFNHKRVLSATNEEGSAVRLISIPDGLGPEDDRNNVVNLCSESLSSTMTSALEKVIKDIDALDSASEKITGIVADVNMAWALELTDKLGIKGAVFCPASAAVLVLGENIPNLIQDGIINTEGFPIIKGKFQLSPEMPIMDTADIPWCSLGDPTMHKVIYNHASKIIRYSHLTDWWLGNTTSDLEPGAISLSPKILPIGPLIGSGNDIRSLGQFWEEDVSCLTWLDQQPPCSVIYVAFGSSTIFDPHQLKELALGLDLTNRPFLWVVREDASGSTKITYPDEFQGTCGKIVKWAPQQKVLSHPAIACFISHCGWNSTLEGVSNGVPFLCWPYYTDQLVDKAYICDMWKVGLGFDLDDKGLISRWEIKKKVDQILGDENIRGRSQKLKEMVLSNIAEGGQSYENFNKFVEWLKE

SEQ ID NO: 60386 - protein, 451 aa, Glycine max
  peptide (1)..(451): Ceres Seq. ID no. 14308596
MGIQHVLVLPFPAQGHVNPLMLLSKKLAEHGFKVTFVNTDFNHKRVLSATNEEGSAVRLISIPDGLGPEDDRNNVVNLCSESLSSTMTSALEKVIKDIDALDSASEKITGIVADVNMAWALELTDKLGIKGAVFCPASAAVLVLGENIPNLIQDGIINTEGFPIIKGKFQLSPEMPIMDTADIPWCSLGDPTMHKVIYNHASKIIRYSHLTDWWLGNTTSDLEPGAISLSPKILPIGPLIGSGNDIRSLGQFWEEDVSCLTWLDQQPPCSVIYVAFGSSTIFDPHQLKELALGLDLTNRPFLWVVREDASGSTKITYPDEFQGTCGKIVKWAPQQKVLSHPAIACFISHCGWNSTLEGVSNGVPFLCWPYYTDQLVDKAYICDMWKVGLGFDLDDKGLISRWEIKKKVDQILGDENIRGRSQKLKEMVLSNIAEGGQSYENFNKFVEWLKE

SEQ ID NO: 60387 - protein, 431 aa, Glycine max
  peptide (1)..(431): Ceres Seq. ID no. 14308597
MLLSKKLAEHGFKVTFVNTDFNHKRVLSATNEEGSAVRLISIPDGLGPEDDRNNVVNLCSESLSSTMTSALEKVIKDIDALDSASEKITGIVADVNMAWALELTDKLGIKGAVFCPASAAVLVLGENIPNLIQDGIINTEGFPIIKGKFQLSPEMPIMDTADIPWCSLGDPTMHKVIYNHASKIIRYSHLTDWWLGNTTSDLEPGAISLSPKILPIGPLIGSGNDIRSLGQFWEEDVSCLTWLDQQPPCSVIYVAFGSSTIFDPHQLKELALGLDLTNRPFLWVVREDASGSTKITYPDEFQGTCGKIVKWAPQQKVLSHPAIACFISHCGWNSTLEGVSNGVPFLCWPYYTDQLVDKAYICDMWKVGLGFDLDDKGLISRWEIKKKVDQILGDENIRGRSQKLKEMVLSNIAEGGQSYENFNKFVEWLKE

SEQ ID NO: 60388 - DNA, 1290 bp, Glycine max
  misc_feature (1)..(1290): Ceres Seq. ID no. 15176294
gtatggatgtagaagtgtacagaaagactaggaccccacaagagggtcacacgcaagatttctctctatcttctcatccaccatttctccaattggaagcacacgccaacgatcctattgctctactattttcaccactattcagtgttgttcatagccataccattccacaccacaacccttcttcttctaccttgcttttcctattatctatccattgagacccccaaatggcctctgccactgccaccactctcttcacccctaaccccatgttttcaactgaacaccactctctctctccatctccaaccattcccaaatcctttactggcctctgcaagcccttccattcaagggttcccacttccatccccttcttccactgcagaagacccaagttctttgtcagggccacagttataaagtggagatgtccaaagcaaactatccctcccaatgataccggttttcaaaagaaactcctgtatctggaatccatcggtattgactctttcttgcttattgaaaaccatccaacagtgatcacaacctctcttgctgacataagatccaccgtggagtacattacctccttggatttcactgcaattgagtttcggcgtatggttggcatgtgccccgagattctgaccacccaagtctcagacctcatacctgtcttcaccttccttcatcgtgaggttcatgtgcctggctcggatattaagcgtgtaataaatcgtcgtcccaggttgcttgtcagcagtgttagtaagcgacttcgtcctaccctgtacttcctccaaagtattggcatagaagaggtaaacaagcacactgacttgctatcatgtagtgttgaggaaaagttcatgcccaggattgattactttgagaatattgggttttctcgccgtgatgcaacttcaatgttccgaagatttcctcagctattttgttatagtattaaaaataacttggagcctaaatacagttactttgtggtggagatggggagagatctgaaggagctgaaagaattcccacagtatttctcatttagcctagagaataggattaagcctaggcataaacagtgtgtagaaatgggggtgtgttttcctctccctgccttgttaaaaacaagtgaagtgaaatttcaaagtagattagacgtatgtgtaaattcttcaacccccttgaaaacatcccctctgtggtctgctggctgtgatgtttatgacgtatagaataacatttgcattgtatatttaattgcttttgtgc

SEQ ID NO: 60389 - protein, 340 aa, Glycine max
  peptide (1)..(340): Ceres Seq. ID no. 15176295
MASATATTLFTPNPMFSTEHHSLSPSPTIPKSFTGLCKPFHSRVPTSIPFFHCRRPKFFVRATVIKWRCPKQTIPPNDTGFQKKLLYLESIGIDSFLLIENHPTVITTSLADIRSTVEYITSLDFTAIEFRRMVGMCPEILTTQVSDLIPVFTFLHREVHVPGSDIKRVINRRPRLLVSSVSKRLRPTLYFLQSIGIEEVNKHTDLLSCSVEEKFMPRIDYFENIGFSRRDATSMFRRFPQLFCYSIKNNLEPKYSYFVVEMGRDLKELKEFPQYFSFSLENRIKPRHKQCVEMGVCFPLPALLKTSEVKFQSRLDVCVNSSTPLKTSPLWSAGCDVYDV

SEQ ID NO: 60390 - protein, 326 aa, Glycine max
  peptide (1)..(326): Ceres Seq. ID no. 15176296
MFSTEHHSLSPSPTIPKSFTGLCKPFHSRVPTSIPFFHCRRPKFFVRATVIKWRCPKQTIPPNDTGFQKKLLYLESIGIDSFLLIENHPTVITTSLADIRSTVEYITSLDFTAIEFRRMVGMCPEILTTQVSDLIPVFTFLHREVHVPGSDIKRVINRRPRLLVSSVSKRLRPTLYFLQSIGIEEVNKHTDLLSCSVEEKFMPRIDYFENIGFSRRDATSMFRRFPQLFCYSIKNNLEPKYSYFVVEMGRDLKELKEFPQYFSFSLENRIKPRHKQCVEMGVCFPLPALLKTSEVKFQSRLDVCVNSSTPLKTSPLWSAGCDVYDV

SEQ ID NO: 60391 - protein, 208 aa, Glycine max
  peptide (1)..(208): Ceres Seq. ID no. 15176297
MVGMCPEILTTQVSDLIPVFTFLHREVHVPGSDIKRVINRRPRLLVSSVSKRLRPTLYFLQSIGIEEVNKHTDLLSCSVEEKFMPRIDYFENIGFSRRDATSMFRRFPQLFCYSIKNNLEPKYSYFVVEMGRDLKELKEFPQYFSFSLENRIKPRHKQCVEMGVCFPLPALLKTSEVKFQSRLDVCVNSSTPLKTSPLWSAGCDVYDV

SEQ ID NO: 60392 - DNA, 1642 bp, Glycine max
  misc_feature (1)..(1642): Ceres Seq. ID no. 15172446
aaatccctacagagagagagaaagatgcagaagagagagcagggcaagtccggcggatccgccggaggaggggcggcgccacctgcgaagagaggccgtcccttcggcagcggtaacaacagttcctctgccgcggcttcagccgcggattcggcggctccgtcaaccctccttggtccttcccttcacgttcacaactccttcgccgatcagaacaacaaaagaattgtcttggctcttcaaagtggtctgaagaatgagctaacatgggctttgaatacacttacgctgctctcctttaaagaaaaggatgacatgcgcaaggatgcgactccccttgcgaaaattcccggcttgcttgatgcgctcctacaagttatagatgattggcgtgatatagcactcccgaaggaatttgccaagacaacgaggatcaggactttaggtgcaaattctgttgtaagtggatttgggagtgaatatcaggcgctgggctcaactggtactccccaccgccctggtgtaggatctggctctgctggtatagaatcaacgcaacagaatggcatgacaaaatctcgtttttctgagttgtggcttgatgaagatagtttatttaatttagatgatgaagggcgagcagaaaagcagcaatgtgctgttgctgcttcaaatatcatcaggaacttctctttcatgccagataatgaagttataatggcccaacatcgccattgtttggaaacagccttccaatgcatagaagatcatcttgtagaggatgaggaacttgtaacaaatgctctagagacaattgttaacttagctccacttctggatcttcgaatatttagctcttccaaaccttcatttattaaaataacagaaaaacgtgcagttcaggccatcatggggatgttggaatctgcagtcaaagcatggcattgtgctgctgctgaattacttgggcgtttgatcattaatcctgacaatgaacctttcttgcttccattttttccacagatacacaaacgcttaattgatctcatcagcatgccagctctagatgctcaggcagctgctataggtgcactctataaccttgctgaagttaatatggactgcagattgaagattgctaacgagagatgggctattgatcggttgcttaaagtgataaagatgccacatccagttccagaagtttgccggaaatctgccatgatattggagagtcttgtgtctgagccgcaaaacagaagtttgctgctagcatatgagaatgcttttgcagagatagttttcactgatggaagatattccgatacatttgcgaggatattgtatgaactaacatctagaccaagtaacaaagtggcagcggctcgtggcatatggggtatgtaaacatcaaactgtgaaatgactttgattagtgatcagtgctatatatagttttgcgacttggatggcttttggacgacttttgaagattcaaaatgtacatgtcttctgtgtaggattgtactataccttaagcatattcaagttgtcatgtactccagttgtatgatgataacttcagaattattcttgtgtttaagacgatgtgaagattagaaacttcatttcctagataaag

SEQ ID NO: 60393 - protein, 468 aa, Glycine max
  peptide (1)..(468): Ceres Seq. ID no. 15172447
KSLQRERKMQKREQGKSGGSAGGGAAPPAKRGRPFGSGNNSSSAAASAADSAAPSTLLGPSLHVHNSFADQNNKRIVLALQSGLKNELTWALNTLTLLSFKEKDDMRKDATPLAKIPGLLDALLQVIDDWRDIALPKEFAKTTRIRTLGANSVVSGFGSEYQALGSTGTPHRPGVGSGSAGIESTQQNGMTKSRFSELWLDEDSLFNLDDEGRAEKQQCAVAASNIIRNFSFMPDNEVIMAQHRHCLETAFQCIEDHLVEDEELVTNALETIVNLAPLLDLRIFSSSKPSFIKITEKRAVQAIMGMLESAVKAWHCAAAELLGRLIINPDNEPFLLPFFPQIHKRLIDLISMPALDAQAAAIGALYNLAEVNMDCRLKIANERWAIDRLLKVIKMPHPVPEVCRKSAMILESLVSEPQNRSLLLAYENAFAEIVFTDGRYSDTFARILYELTSRPSNKVAAARGIWGM

SEQ ID NO: 60394 - protein, 460 aa, Glycine max
  peptide (1)..(460): Ceres Seq. ID no. 15172448
MQKREQGKSGGSAGGGAAPPAKRGRPFGSGNNSSSAAASAADSAAPSTLLGPSLHVHNSFADQNNKRIVLALQSGLKNELTWALNTLTLLSFKEKDDMRKDATPLAKIPGLLDALLQVIDDWRDIALPKEFAKTTRIRTLGANSVVSGFGSEYQALGSTGTPHRPGVGSGSAGIESTQQNGMTKSRFSELWLDEDSLFNLDDEGRAEKQQCAVAASNIIRNFSFMPDNEVIMAQHRHCLETAFQCIEDHLVEDEELVTNALETIVNLAPLLDLRIFSSSKPSFIKITEKRAVQAIMGMLESAVKAWHCAAAELLGRLIINPDNEPFLLPFFPQIHKRLIDLISMPALDAQAAAIGALYNLAEVNMDCRLKIANERWAIDRLLKVIKMPHPVPEVCRKSAMILESLVSEPQNRSLLLAYENAFAEIVFTDGRYSDTFARILYELTSRPSNKVAAARGIWGM

SEQ ID NO: 60395 - protein, 363 aa, Glycine max
  peptide (1)..(363): Ceres Seq. ID no. 15172449
MRKDATPLAKIPGLLDALLQVIDDWRDIALPKEFAKTTRIRTLGANSVVSGFGSEYQALGSTGTPHRPGVGSGSAGIESTQQNGMTKSRFSELWLDEDSLFNLDDEGRAEKQQCAVAASNIIRNFSFMPDNEVIMAQHRHCLETAFQCIEDHLVEDEELVTNALETIVNLAPLLDLRIFSSSKPSFIKITEKRAVQAIMGMLESAVKAWHCAAAELLGRLIINPDNEPFLLPFFPQIHKRLIDLISMPALDAQAAAIGALYNLAEVNMDCRLKIANERWAIDRLLKVIKMPHPVPEVCRKSAMILESLVSEPQNRSLLLAYENAFAEIVFTDGRYSDTFARILYELTSRPSNKVAAARGIWGM

SEQ ID NO: 60396 - DNA, 1315 bp, Glycine max
  misc_feature (1)..(1315): Ceres Seq. ID no. 14308339
gtttggtcattgccttattctcttgtgctaagacatactactgaggaggtactagatgcatgcatggaagcaattgagccggaacatgctgcaataacatctgaactccggaagaaagtaatgaatgatcttatggagggtttgaaggaccacaattggtttaccgggtttgatattgctgatgatctgcctgtgaaattttcattaaggcagtggatcaagctagccaaggaagtccaagcaacagtttttattgcagtgcatggaggcattggagaagatggtacacttcaatctttgctggatgctgaaggagtgccctacacaggtcctggtgcaatggcatcaaagatttgtatggacaaagttgcaacctctgtggctttaaaacatcttgcaaattcgggagttcttaccataaataaggatgtcaggcaaaaagatgatctctctaataagcccataaatgatacatggcatgacctcaccagaaagctacagtgccaaacattatgtgtcaaaccagcaaaagatggatgctcaactggggtagcaagactatgctgtcccgaggaccttgcaatatatgtcaaagctctggaggactgtctactaagaattcctccaaattgcttatcaaaggcacatggtatgattgagatgccaaaccctcctccagaacacttaatcttcgaacctttcatagagacggatgaaataattgtgacatccaaatttgaggatgcaactggtcatggcctcacttggaaaggacacagcagatgggtggaaataactgttggcgtcataggaaaacgtggatcaatgcactcgctaagtcctagtgtaactgtcaaggaatctggtgatattttgtcacttgaggagaagttccaaggtgggactggcatcaatctgactccgcctcccttgtcaattatgagtgagaatgctttgaagagatgtaaacagcatattgaactgattgcaaacactcttcaattggaaggattttcacgcattgatgcatttgtaaatgttgacagtggagaggttttgattatagaggtaaatactgtgcctggaatgacaccttccactgttctgattcatcaggcactagtagagcaaccaccgttgtatcctcatcaattcttccgtaagcttcttgatttggcatctgaaaggtccatgtaaatctatttaatagaatgtttacattgtctatcaaatgttgttaccacttgaagttattgtgaaactttaatttcctatctggaacttgcgtccctttataatgtgaaactttaatttc

SEQ ID NO: 60397 - protein, 398 aa, Glycine max
  peptide (1)..(398): Ceres Seq. ID no. 14308340
VWSLPYSLVLRHTTEEVLDACMEAIEPEHAAITSELRKKVMNDLMEGLKDHNWFTGFDIADDLPVKFSLRQWIKLAKEVQATVFIAVHGGIGEDGTLQSLLDAEGVPYTGPGAMASKICMDKVATSVALKHLANSGVLTINKDVRQKDDLSNKPINDTWHDLTRKLQCQTLCVKPAKDGCSTGVARLCCPEDLAIYVKALEDCLLRIPPNCLSKAHGMIEMPNPPPEHLIFEPFIETDEIIVTSKFEDATGHGLTWKGHSRWVEITVGVIGKRGSMHSLSPSVTVKESGDILSLEEKFQGGTGINLTPPPLSIMSENALKRCKQHIELIANTLQLEGFSRIDAFVNVDSGEVLIIEVNTVPGMTPSTVLIHQALVEQPPLYPHQFFRKLLDLASERSM

SEQ ID NO: 60398 - protein, 377 aa, Glycine max
  peptide (1)..(377): Ceres Seq. ID no. 14308341
MEAIEPEHAAITSELRKKVMNDLMEGLKDHNWFTGFDIADDLPVKFSLRQWIKLAKEVQATVFIAVHGGIGEDGTLQSLLDAEGVPYTGPGAMASKICMDKVATSVALKHLANSGVLTINKDVRQKDDLSNKPINDTWHDLTRKLQCQTLCVKPAKDGCSTGVARLCCPEDLAIYVKALEDCLLRIPPNCLSKAHGMIEMPNPPPEHLIFEPFIETDEIIVTSKFEDATGHGLTWKGHSRWVEITVGVIGKRGSMHSLSPSVTVKESGDILSLEEKFQGGTGINLTPPPLSIMSENALKRCKQHIELIANTLQLEGFSRIDAFVNVDSGEVLIIEVNTVPGMTPSTVLIHQALVEQPPLYPHQFFRKLLDLASERSM

SEQ ID NO: 60399 - protein, 358 aa, Glycine max
  peptide (1)..(358): Ceres Seq. ID no. 14308342
MNDLMEGLKDHNWFTGFDIADDLPVKFSLRQWIKLAKEVQATVFIAVHGGIGEDGTLQSLLDAEGVPYTGPGAMASKICMDKVATSVALKHLANSGVLTINKDVRQKDDLSNKPINDTWHDLTRKLQCQTLCVKPAKDGCSTGVARLCCPEDLAIYVKALEDCLLRIPPNCLSKAHGMIEMPNPPPEHLIFEPFIETDEIIVTSKFEDATGHGLTWKGHSRWVEITVGVIGKRGSMHSLSPSVTVKESGDILSLEEKFQGGTGINLTPPPLSIMSENALKRCKQHIELIANTLQLEGFSRIDAFVNVDSGEVLIIEVNTVPGMTPSTVLIHQALVEQPPLYPHQFFRKLLDLASERSM

SEQ ID NO: 60400 - DNA, 1369 bp, Glycine max
  misc_feature (1)..(1369): Ceres Seq. ID no. 14313591
aaaaaagaagagtgtatttggaggaaggaaggtaaaggaagccagaggagatggaagaagagggttctcagcagccacagttggtgcttgccgagaagctattccttctccgacaacccgttcaagacattgacaaggttcgctacaaggaggatgttttcactcacatcaaggaaaacgagatggtccctttgtacgagaccctagtcgccgattccgtgttggacttggatcgtgcccttttggacttcatgcgcgctaaaattgaagacgagctcaccaagctcgacgaaaagattgctgatgctgaggaaaacttaggagagagtgaagttcgtgaggctcacttggcaaaatccttgttttttatccggattatggacaaggagaaagccttggaacatctcaagataacagaaaccaagacagttgcagttggccagaaaatggacttggtgttttatacattgcagcttggtttcttcgacatggattttgatctcgtttccaaaagcattgacaaagccaaaaacttgtttgaagaaggtggtgattgggaaaggaagaataggctgaaagtgtacgaaggcctgtactgcatgtccactcgaaatttcaagaaggctgccaagttgtttttggattctatttcaacctttaccacctgtgaactttttccctatgacacctttatattttatacagttttgaccagcattatatcattggatagagtttccctaaagcaaaaggtagtggatgctccagagatcttgacagtgattggcaaaatcccatatctttcagagtttttgaactccttatatgattgtcaatacaagtcttttttctcagcatttgctggcctgacagagcaaattaagttggaccgctatctgcatccacacttccgatattacatgagggaggtcagaaccgttgtttattcccaatttttggaatcttacaagagtgtgacaattgaagccatggcaaaagcctttggagtgacagaggatttcattgatgtggagctatcacgctttattgcagcagggaagcttcattgtaagattgataaagttgaaggtgttcttgaaactaatcgccctgatgctaagaatgctctttaccaagcaactattaagcaaggggacttcctattgaatcggatccagaaattgtcacgtgtgatagatctttaggtcattttttgcattttagactaaaagtttattggaaaggcagagataacgacaatttcacggtattttactacgagggtgaggcacggcatttctgtagtccatttgatgtgcaaatatgattaattaaatttgccaaatccaaatatatcaatcagttttcg

SEQ ID NO: 60401 - protein, 384 aa, Glycine max
  peptide (1)..(384): Ceres Seq. ID no. 14313592
MEEEGSQQPQLVLAEKLFLLRQPVQDIDKVRYKEDVFTHIKENEMVPLYETLVADSVLDLDRALLDFMRAKIEDELTKLDEKIADAEENLGESEVREAHLAKSLFFIRIMDKEKALEHLKITETKTVAVGQKMDLVFYTLQLGFFDMDFDLVSKSIDKAKNLFEEGGDWERKNRLKVYEGLYCMSTRNFKKAAKLFLDSISTFTTCELFPYDTFIFYTVLTSIISLDRVSLKQKVVDAPEILTVIGKIPYLSEFLNSLYDCQYKSFFSAFAGLTEQIKLDRYLHPHFRYYMREVRTVVYSQFLESYKSVTIEAMAKAFGVTEDFIDVELSRFIAAGKLHCKIDKVEGVLETNRPDAKNALYQATIKQGDFLLNRIQKLSRVIDL

SEQ ID NO: 60402 - protein, 340 aa, Glycine max
  peptide (1)..(340): Ceres Seq. ID no. 14313593
MVPLYETLVADSVLDLDRALLDFMRAKIEDELTKLDEKIADAEENLGESEVREAHLAKSLFFIRIMDKEKALEHLKITETKTVAVGQKMDLVFYTLQLGFFDMDFDLVSKSIDKAKNLFEEGGDWERKNRLKVYEGLYCMSTRNFKKAAKLFLDSISTFTTCELFPYDTFIFYTVLTSIISLDRVSLKQKVVDAPEILTVIGKIPYLSEFLNSLYDCQYKSFFSAFAGLTEQIKLDRYLHPHFRYYMREVRTVVYSQFLESYKSVTIEAMAKAFGVTEDFIDVELSRFIAAGKLHCKIDKVEGVLETNRPDAKNALYQATIKQGDFLLNRIQKLSRVIDL

SEQ ID NO: 60403 - protein, 317 aa, Glycine max
  peptide (1)..(317): Ceres Seq. ID no. 14313594
MRAKIEDELTKLDEKIADAEENLGESEVREAHLAKSLFFIRIMDKEKALEHLKITETKTVAVGQKMDLVFYTLQLGFFDMDFDLVSKSIDKAKNLFEEGGDWERKNRLKVYEGLYCMSTRNFKKAAKLFLDSISTFTTCELFPYDTFIFYTVLTSIISLDRVSLKQKVVDAPEILTVIGKIPYLSEFLNSLYDCQYKSFFSAFAGLTEQIKLDRYLHPHFRYYMREVRTVVYSQFLESYKSVTIEAMAKAFGVTEDFIDVELSRFIAAGKLHCKIDKVEGVLETNRPDAKNALYQATIKQGDFLLNRIQKLSRVIDL

SEQ ID NO: 60404 - DNA, 1299 bp, Glycine max
  misc_feature (1)..(1299): Ceres Seq. ID no. 13637958
agatgaagtaggcgaaggctgaaggaaacctctggaattttctttggccaacggcgattccactaataaatatacgtttgttgtgtttccgaggcctgtgaatcggaattggggtttcttcaatcggaatcgcgaacaacatggaagtgagaattgggcaaagggtgtctcgcggaatgctccctctcctcgctctccacaccgtcagcgagtattaccgctccgaccacaaacctccgttcaccgccgccctcatcgccgccaacaccctcatctacctccgcccctccttcctcgatcccctcattccccccattgaacaagtctggttcaacccccacctcatcctcaagaacaaggacttgaaacgcttcttgttgtcgccgttttaccatatcggagaaccgcacctggtttacaacatgctatcccttctctggaaggggtttcagttggaaacctcaatgggaagcgtcgatttcgcttccatagtcgcttccttgctcgttctctcccagggcgtaaccctaatgttatccaaatcactgcttctgttcttcgactacgagagatcctactacagcgaatactccgtcggattctccggcgtcctcttcgccatgaaagtcgttctcaactcccaatcggagaactacacctccgtctacggaattatcgttccgtcccgttacgctgcgtgggctgaattggttctcgctcagcttctcgtgccgggcgtgtcgtttctcggccatctcggtggcattctggcggggcttctttatctgaagctgaggagtacttattcgggttctaaccctataaaagttctcatcagagggattgttgatgctgtgaagtggccttttaagttcttgcggcggaggcggggacggatcaccggaaggggaacagttggaagtaacagggcgtggagatgccagacgtgtacctatgacaacaacaatggttccctgagagtgtgtgagatttgtgggacgattagggttgtcaatggagtgtcctcttttcagaggagctcccgttctgatgggcttcctttggatgagttgcgccgccggagaatcgacaggtttggaggcaggtgatcgtggttagttttgagttcgctgcagcttctggtaaataatactattggatattgagattcaacacatgttagacttttttgtttcgacatatatatgttagttgtagaagtatgacgactgagcaatgaatgttttcatgctatgctagattgtttggcattttcaagaaaaaaaaaatgaaatttgg

SEQ ID NO: 60405 - protein, 322 aa, Glycine max
  peptide (1)..(322): Ceres Seq. ID no. 13637959
MEVRIGQRVSRGMLPLLALHTVSEYYRSDHKPPFTAALIAANTLIYLRPSFLDPLIPPIEQVWFNPHLILKNKDLKRFLLSPFYHIGEPHLVYNMLSLLWKGFQLETSMGSVDFASIVASLLVLSQGVTLMLSKSLLLFFDYERSYYSEYSVGFSGVLFAMKVVLNSQSENYTSVYGIIVPSRYAAWAELVLAQLLVPGVSFLGHLGGILAGLLYLKLRSTYSGSNPIKVLIRGIVDAVKWPFKFLRRRRGRITGRGTVGSNRAWRCQTCTYDNNNGSLRVCEICGTIRVVNGVSSFQRSSRSDGLPLDELRRRRIDRFGGR

SEQ ID NO: 60406 - protein, 310 aa, Glycine max
  peptide (1)..(310): Ceres Seq. ID no. 13637960
MLPLLALHTVSEYYRSDHKPPFTAALIAANTLIYLRPSFLDPLIPPIEQVWFNPHLILKNKDLKRFLLSPFYHIGEPHLVYNMLSLLWKGFQLETSMGSVDFASIVASLLVLSQGVTLMLSKSLLLFFDYERSYYSEYSVGFSGVLFAMKVVLNSQSENYTSVYGIIVPSRYAAWAELVLAQLLVPGVSFLGHLGGILAGLLYLKLRSTYSGSNPIKVLIRGIVDAVKWPFKFLRRRRGRITGRGTVGSNRAWRCQTCTYDNNNGSLRVCEICGTIRVVNGVSSFQRSSRSDGLPLDELRRRRIDRFGGR

SEQ ID NO: 60407 - protein, 228 aa, Glycine max
  peptide (1)..(228): Ceres Seq. ID no. 13637961
MLSLLWKGFQLETSMGSVDFASIVASLLVLSQGVTLMLSKSLLLFFDYERSYYSEYSVGFSGVLFAMKVVLNSQSENYTSVYGIIVPSRYAAWAELVLAQLLVPGVSFLGHLGGILAGLLYLKLRSTYSGSNPIKVLIRGIVDAVKWPFKFLRRRRGRITGRGTVGSNRAWRCQTCTYDNNNGSLRVCEICGTIRVVNGVSSFQRSSRSDGLPLDELRRRRIDRFGGR

SEQ ID NO: 60408 - DNA, 1183 bp, Glycine max
  misc_feature (1)..(1183): Ceres Seq. ID no. 15224554
accgggccccccctcgagtcagctacgtaggcccccccccccctgttaaaaagattaggactagcagttgcacctaagagaaagatgggtgatgctgatgctgaaggacatttgtctactagccctaatcagttagatggtgacaaaagagctaccaatcataaatcagtgaatttggagggaagcctgttggttcagcacctgcaaaaaaagaagagagtccaggctttcaatgaagctcaagaagctctgatcaaagttctatatgagcaattcaaggatcacagaagatgcagttacatgatagccaatgcactggatgaggatggtaaaatcactgctgctcaagtctctcgaaaacttaagcaacttggtttatctcttcctcagaagagttctggaggcaaaatgcacccaaaggatgcagatctcatggatctttcaaatgataggattaatgaatctgatgatgagacattggtaacattgataaaaaggaagaaaatggagaatgacaaattatcaaggggacagttacatggacaaatcagtgaggatagattgtcaatagatgattctgatgatgaaatgctcagctctgttctcaaggaaaaaataaatagcaaagtatcaactgaacaattacttgaacccatcaatgtggatgcattgtcaagagatgattctgatgatgaaatgcccagctctgctctcaaaagaactagaagatcctctcttaattcaaagcaagttgagcttgaaaatatccaaattcaggagagaataatgggcgatgattctttcaatgaaggcaaaacagatgctttggaaagggataatcgtgttgattctatgaattcctcccaaatagaacatcagcaaatggatgacttagcagattcagaagatgaagtggctgttagtggatttcctgacaatgccagatctagaaggcagctgagaatggtgattgatcctgaggatgatgactgaaggagaaagcatgattagggtccaggtttctttatttttgcatatattttctactaaactgaaggagaaagcattgattagtgagtgttgcagagacaagatatgaggatgtttacaagttgccatccttattacaacatatcagttctatatttatagagtataattataactgttataaactttcatt

SEQ ID NO: 60409 - protein, 302 aa, Glycine max
  peptide (1)..(302): Ceres Seq. ID no. 15224555
MGDADAEGHLSTSPNQLDGDKRATNHKSVNLEGSLLVQHLQKKKRVQAFNEAQEALIKVLYEQFKDHRRCSYMIANALDEDGKITAAQVSRKLKQLGLSLPQKSSGGKMHPKDADLMDLSNDRINESDDETLVTLIKRKKMENDKLSRGQLHGQISEDRLSIDDSDDEMLSSVLKEKINSKVSTEQLLEPINVDALSRDDSDDEMPSSALKRTRRSSLNSKQVELENIQIQERIMGDDSFNEGKTDALERDNRVDSMNSSQIEHQQMDDLADSEDEVAVSGFPDNARSRRQLRMVIDPEDDD

SEQ ID NO: 60410 - protein, 230 aa, Glycine max
  peptide (1)..(230): Ceres Seq. ID no. 15224556
MIANALDEDGKITAAQVSRKLKQLGLSLPQKSSGGKMHPKDADLMDLSNDRINESDDETLVTLIKRKKMENDKLSRGQLHGQISEDRLSIDDSDDEMLSSVLKEKINSKVSTEQLLEPINVDALSRDDSDDEMPSSALKRTRRSSLNSKQVELENIQIQERIMGDDSFNEGKTDALERDNRVDSMNSSQIEHQQMDDLADSEDEVAVSGFPDNARSRRQLRMVIDPEDDD

SEQ ID NO: 60411 - protein, 194 aa, Glycine max
  peptide (1)..(194): Ceres Seq. ID no. 15224557
MHPKDADLMDLSNDRINESDDETLVTLIKRKKMENDKLSRGQLHGQISEDRLSIDDSDDEMLSSVLKEKINSKVSTEQLLEPINVDALSRDDSDDEMPSSALKRTRRSSLNSKQVELENIQIQERIMGDDSFNEGKTDALERDNRVDSMNSSQIEHQQMDDLADSEDEVAVSGFPDNARSRRQLRMVIDPEDDD

SEQ ID NO: 60412 - DNA, 1577 bp, Glycine max
  misc_feature (1)..(1577): Ceres Seq. ID no. 14312016
gttcaggttctccttttaacatcttcatcttctcttttcttttgttgtcttctgtgcgcgctctctctctatgcattgatactgtttcttttattttcatctggggttcgccgcttcagctgccaccgttctcggtatctcatgtgatcttcaaagtttgttgctttcagccttttcaagctgtccatttaagtttttgagagcaagcagttttttatgaggaccgaataaaagattcaaatttctatgacgtctatcaaatcattgagatggctgatgagaaaaaagagtggattgtctgatgggggtaaatcaagtttcaagatgaaacatctgccttttctggcagttttgtgcacgataatgttattcattgtgtatagaaccacaaagtatcagtatcaccaagaagagattgacaaaaaatggagtttctggggacaaccaaaggtgtatccttcaacttatgggaagttgaaaggcttgccacgaggtataatacatgataattcagatttggagttaagaccattatggtcaagaagtagttcaagatcaaaggctgtttactctaactctaacttactggcagttccagttggtattaaacaaaagcagaatgttgatgctatggtgcaaaagtttcttcaagaaaacttcacaattattttattccattatgatggcaatgtggatggatggtggaatcttgactggagtagcaaggccatacacattattgctcggaatcaaacaaagtggtggtttgcaaaaaggtttctacatccagatatagtgtctatttatgattatatctttctctgggatgaggatctaggtgtggagcatttttcaccttcaagatatgttgaaattataaagagagaaggtttggagatatctcaaccagctcttgacccaaattcaacagagatacaccatagaattacaattagagctagaaccaagaaatttcatagagtctatgaacgcagaggcagtacaaggtgttcagatttaagtgagggaccgccgtgcactgggtttgtggaaggtatggctcctgttttctctcaatctgcctggtactgcacttggcatcttatacagaatgaccttgtccatggatggggagttgatatgaagctaggatattgtgcacagggagatcgaactaaaaaggtgggagttgttgacagcgaatatgtttttcacaagggaatacaaactctgggggggagtggtcacagaatgacaaaggtttcgaaactacaaaggacaactatgaaacaaggtggagtaggaattgatgtgcgaactgagataagaaggcaatcgacatgggaatttgaaatcttcaaagagcgttggaataaagccattggtgcagacaaaaactgggttgatccatttaagagtgaccaaagacgcataagaaaatggcgtgacacgcaacgccttgctaagaacaatatttaactctgttgcatatcttacagtttcattcacagggcattaccttttatttataggcataatttagtttgtgtagatgagtaaaaattcattcaattttg

SEQ ID NO: 60413 - protein, 410 aa, Glycine max
  peptide (1)..(410): Ceres Seq. ID no. 14312017
MTSIKSLRWLMRKKSGLSDGGKSSFKMKHLPFLAVLCTIMLFIVYRTTKYQYHQEEIDKKWSFWGQPKVYPSTYGKLKGLPRGIIHDNSDLELRPLWSRSSSRSKAVYSNSNLLAVPVGIKQKQNVDAMVQKFLQENFTIILFHYDGNVDGWWNLDWSSKAIHIIARNQTKWWFAKRFLHPDIVSIYDYIFLWDEDLGVEHFSPSRYVEIIKREGLEISQPALDPNSTEIHHRITIRARTKKFHRVYERRGSTRCSDLSEGPPCTGFVEGMAPVFSQSAWYCTWHLIQNDLVHGWGVDMKLGYCAQGDRTKKVGVVDSEYVFHKGIQTLGGSGHRMTKVSKLQRTTMKQGGVGIDVRTEIRRQSTWEFEIFKERWNKAIGADKNWVDPFKSDQRRIRKWRDTQRLAKNNI

SEQ ID NO: 60414 - protein, 400 aa, Glycine max
  peptide (1)..(400): Ceres Seq. ID no. 14312018
MRKKSGLSDGGKSSFKMKHLPFLAVLCTIMLFIVYRTTKYQYHQEEIDKKWSFWGQPKVYPSTYGKLKGLPRGIIHDNSDLELRPLWSRSSSRSKAVYSNSNLLAVPVGIKQKQNVDAMVQKFLQENFTIILFHYDGNVDGWWNLDWSSKAIHIIARNQTKWWFAKRFLHPDIVSIYDYIFLWDEDLGVEHFSPSRYVEIIKREGLEISQPALDPNSTEIHHRITIRARTKKFHRVYERRGSTRCSDLSEGPPCTGFVEGMAPVFSQSAWYCTWHLIQNDLVHGWGVDMKLGYCAQGDRTKKVGVVDSEYVFHKGIQTLGGSGHRMTKVSKLQRTTMKQGGVGIDVRTEIRRQSTWEFEIFKERWNKAIGADKNWVDPFKSDQRRIRKWRDTQRLAKNNI

SEQ ID NO: 60415 - protein, 384 aa, Glycine max
  peptide (1)..(384): Ceres Seq. ID no. 14312019
MKHLPFLAVLCTIMLFIVYRTTKYQYHQEEIDKKWSFWGQPKVYPSTYGKLKGLPRGIIHDNSDLELRPLWSRSSSRSKAVYSNSNLLAVPVGIKQKQNVDAMVQKFLQENFTIILFHYDGNVDGWWNLDWSSKAIHIIARNQTKWWFAKRFLHPDIVSIYDYIFLWDEDLGVEHFSPSRYVEIIKREGLEISQPALDPNSTEIHHRITIRARTKKFHRVYERRGSTRCSDLSEGPPCTGFVEGMAPVFSQSAWYCTWHLIQNDLVHGWGVDMKLGYCAQGDRTKKVGVVDSEYVFHKGIQTLGGSGHRMTKVSKLQRTTMKQGGVGIDVRTEIRRQSTWEFEIFKERWNKAIGADKNWVDPFKSDQRRIRKWRDTQRLAKNNI

SEQ ID NO: 60416 - DNA, 1392 bp, Glycine max
  misc_feature (1)..(1392): Ceres Seq. ID no. 14308598
aaaatatcacattgacgaagaagcccatacttgtgggagatagatggcacgcttgtcactgctcattttcgcgttctgcgccgtcgccgtcgccgtcgccgtcgcgggctcctccttcgatgatgccaaccctatccgtttagcgtcggacttggagtcgcaggtgctggacgtgatcggacagagccgccacgctctctccttcgcccgcttcgctcgccgccacggcaagcgctaccgttccgtcgacgagatccgcaaccgcttccggatcttctctgataatcttaaactcatcagatccaccaacaggaggtctctcacctacacgctcggcgtcaatcattttgctgactggacttgggaggagttcaccagacacaagctcggcgctcctcagaattgctctgccacgctcaaaggcaaccacaggctcaccgatgctgttcttcctgacgagaaagactggagaaaagaaggtatagtcagccaagttaaagatcaaggcaactgcggatcttgctggacattcagcacaactggtgcattggaggcagcttacgcacaggcctttgggaagaatatcagtctttctgagcagcagctagtggactgtgccggtgctttcaataactttggctgtaatggtggtttgccatcccaagcctttgaatacattaaatacaatggtggcctcgacacagaagaagcatatccctacaccggaaaagatggtgtctgcaaatttacagctaaaaacgttgctgttcgagtcattgactctatcaatatcactttgggtgctgaggatgaattgaaacaagcggttgcttttgttcggccagttagtgtggcatttgaggtagcgaaggacttccgattctacaataatggagtttacactagtaccatttgtggtagcacgcccatggatgtaaatcatgctgttcttgctgttgggtatggagttgaagatggtgttccatattggatcattaaaaattcatggggaagcaactggggtgacaatggttacttcaagatggaattagggaagaatatgtgcggtgttgcaacttgtgcatcttatcctgttgtggcttaaatgtatgcagagagatgtggtgcccgatatgcccgtgtaactgcaccttgcacgtcatgcttcgtatcgtccatcttaaagggtgaaacattgtactgcgataaaaatttacagtatatgttgatgtttatctgtaaaataagtttggaattgggatgttcattctccttgagctgaatcacattacaaaatcgtactgtaaatcatttgtcacatagaggtatcatagaaattataaactgtgttatgctccccaatctctagcaatgtaaggatagcgtgctgtg

SEQ ID NO: 60417 - protein, 353 aa, Glycine max
  peptide (1)..(353): Ceres Seq. ID no. 14308599
MARLSLLIFAFCAVAVAVAVAGSSFDDANPIRLASDLESQVLDVIGQSRHALSFARFARRHGKRYRSVDEIRNRFRIFSDNLKLIRSTNRRSLTYTLGVNHFADWTWEEFTRHKLGAPQNCSATLKGNHRLTDAVLPDEKDWRKEGIVSQVKDQGNCGSCWTFSTTGALEAAYAQAFGKNISLSEQQLVDCAGAFNNFGCNGGLPSQAFEYIKYNGGLDTEEAYPYTGKDGVCKFTAKNVAVRVIDSINITLGAEDELKQAVAFVRPVSVAFEVAKDFRFYNNGVYTSTICGSTPMDVNHAVLAVGYGVEDGVPYWIIKNSWGSNWGDNGYFKMELGKNMCGVATCASYPVVA

SEQ ID NO: 60418 - DNA, 523 bp, Glycine max
  misc_feature (1)..(523): Ceres Seq. ID no. 15177774
acatatatcttaatggtcaggaaaatgcctcgaatgtatgtttagaggtagtgaaaacactgccacagttgcaacagaaagagccacaatcaagaggtggcagatttggtgataatggtggtcgtggtgggaactacaggtttggtggaagaggtggaggaggcaggaatggtaggttctccaatggtggtgggcgtggcggcaactggggtggaaagagatggtgaagctgagaagggactttgggagttgagtgttttcactctgctcggtgtgggatcataactgcgtgacgaccacgtggggatgaatacttcagtcgtgaatgaagaaacagttgatgttggttaaggcccacggaggattcgagttcaagatggattcaatgtgtcccctaacaacatattctatgtttcatttttgttttgttattttttattcttttgcggggaagcgtaagtttagatttttatattctgtctttcacaggagaaattttgatgtagtagtatatacttttacg

SEQ ID NO: 60419 - protein, 74 aa, Glycine max
  peptide (1)..(74): Ceres Seq. ID no. 15177775
IYLNGQENASNVCLEVVKTLPQLQQKEPQSRGGRFGDNGGRGGNYRFGGRGGGGRNGRFSNGGGRGGNWGGKRW

SEQ ID NO: 60420 - protein, 66 aa, Glycine max
  peptide (1)..(66): Ceres Seq. ID no. 15177776
MKKQLMLVKAHGGFEFKMDSMCPLTTYSMFHFCFVIFYSFAGKRKFRFLYSVFHRRNFDVVVYTFT

SEQ ID NO: 60421 - protein, 61 aa, Glycine max
  peptide (1)..(61): Ceres Seq. ID no. 15177777
MLVKAHGGFEFKMDSMCPLTTYSMFHFCFVIFYSFAGKRKFRFLYSVFHRRNFDVVVYTFT

SEQ ID NO: 60422 - protein, 56 aa, Glycine max
  peptide (1)..(56): Ceres Seq. ID no. 15177778
MVVVVGTTGLVEEVEEAGMVGSPMVVGVAATGVERDGEAEKGLWELSVFTLLGVGS

SEQ ID NO: 60423 - DNA, 1244 bp, Glycine max
  misc_feature (1)..(1244): Ceres Seq. ID no. 15172875
agaggtgtagcagctcgagtttttgaaattgttggtttctgacaaggggcgtgagctgctatgcattttccacagttaaagccccaagagctactgcatgagcatttaacgtgtcttcacctaacaggattttggaattgttggtttgatcataagagctatcgcattatacatgagctttgttgatttctatatatctgaaatggttttcttcaccttattgttttcacatgttaatttaattgtgaaactgaattgtggtttgatacagagtaatcatattgttgctttgaaagtactcttcaagagtcaattgcaacaatcccaagttgtgcatcaacttcgacgtgaagttgaaatacagagtcatctccgacatccccacattttgcgcctctatggatacttttatgatcagaaacgagtttatttgattttagagtatgcacccaaaggtgaactttacaaggaattgcaaaaatgcaaatatttcagtgaaaggcgtgcagctacttatgttgcatcattggcccgagcccttatatattgccatggaaagcatgtaatacatagggatattaaaccagagaaccttcttattggttcacagggtgagttgaaaatagcagactttgggtggtcagtgcacacattcaatcgcaggcggaccatgtgtggcacactggattaccttcctcctgagatggtggagagtgtagaacatgatgcgagtgtggatatatggagccttggtgtcttgtgctatgagtttctttatggagtccctccttttgaggctaaagaacattctgatacttacaggaggataatacaagtggatctgaagttccctcctaaaccaattgtgtcttcagctgcaaaggatctcattagtcagatgctggtcaaggattcctctcaacgtctaccattgcacaaactcctcgaacacccttggattgttcagaatgccgagccctctggtgtatataggagctagtgcaccttatcattcttatattgtattttcttaatcgtggaaatcatcaaaatagcagctgcttctaagtatttgacaacattttggttttgagatgatgcaactatttgaagtaggttgctaggttaagagaaatcacttgttatatgattgtaaaccctactccttcaagggctatataaagaataactgatgtcacttgttatttgattgtaaaccctactccttcaagggctatataaag

SEQ ID NO: 60424 - protein, 275 aa, Glycine max
  peptide (1)..(275): Ceres Seq. ID no. 15172876
MSFVDFYISEMVFFTLLFSHVNLIVKLNCGLIQSNHIVALKVLFKSQLQQSQVVHQLRREVEIQSHLRHPHILRLYGYFYDQKRVYLILEYAPKGELYKELQKCKYFSERRAATYVASLARALIYCHGKHVIHRDIKPENLLIGSQGELKIADFGWSVHTFNRRRTMCGTLDYLPPEMVESVEHDASVDIWSLGVLCYEFLYGVPPFEAKEHSDTYRRIIQVDLKFPPKPIVSSAAKDLISQMLVKDSSQRLPLHKLLEHPWIVQNAEPSGVYRS

SEQ ID NO: 60425 - protein, 265 aa, Glycine max
  peptide (1)..(265): Ceres Seq. ID no. 15172877
MVFFTLLFSHVNLIVKLNCGLIQSNHIVALKVLFKSQLQQSQVVHQLRREVEIQSHLRHPHILRLYGYFYDQKRVYLILEYAPKGELYKELQKCKYFSERRAATYVASLARALIYCHGKHVIHRDIKPENLLIGSQGELKIADFGWSVHTFNRRRTMCGTLDYLPPEMVESVEHDASVDIWSLGVLCYEFLYGVPPFEAKEHSDTYRRIIQVDLKFPPKPIVSSAAKDLISQMLVKDSSQRLPLHKLLEHPWIVQNAEPSGVYRS

SEQ ID NO: 60426 - DNA, 1041 bp, Glycine max
  misc_feature (1)..(1041): Ceres Seq. ID no. 13594163
ataaaatggagccacaacatgtgactgatcagaatatagaaactaaaaaatcatcaacaaaaaggctagctgataaggtggcagttataactggtggtgcaagaggaattggtgcagctgcagctaaactgtttgctgaaaatggagcacatgtggtcattgctgatgtgcttgatgaactaggcaccaccgtggccaagtccattggcggccactacatacactgtgatgtgtcgaaggaagatgatgttgaatcagccataaaccttgcactatcatggaagggccatctagacatcatgctcagcaatgctggaattggaggcccagagggaagaagcatcacaacccttgaaatggaccgagtgaggcacttgttctccatcaatctttatggaacaatacatggaatcaagcatgctgcaagggcaatgatcaaaggtaacaacaaaggaggatccatcatatgtacttcaagtgctgcatccatcatgggtggattggccttgcatggatataccatgacaaaagcagcaattgatgggttggtgagaagtgctgcttgtgagttgggagagcatttgattcgtgttaactgcatttccccacatggagtcccctctgagatgcttctcagtgcttgtagaagatttggacatgatgatattacccctcaaggggtgaaggaaatgattgggagcagggcaagtttgcttaaggggaaaggtgcaaccattgaagatgtggcacatgctgctttgttcttggctagtgatgagtctggcttcattacagcacacaatcttcttattgatgggggacacacatctgctgatagcagaatgagttacatgtaccaagacccaaaatgatgagaattatgtaactatcgtttgtagaggaaacacaagaacttgatgatagaatataaaagatttacaataattacatatattctatcacttgatactcttaactttatctactatagttctttaatttccattcgaggaataatatatcgtttcttctttgggcctt

SEQ ID NO: 60427 - protein, 289 aa, Glycine max
  peptide (1)..(289): Ceres Seq. ID no. 13594164
KMEPQHVTDQNIETKKSSTKRLADKVAVITGGARGIGAAAAKLFAENGAHVVIADVLDELGTTVAKSIGGHYIHCDVSKEDDVESAINLALSWKGHLDIMLSNAGIGGPEGRSITTLEMDRVRHLFSINLYGTIHGIKHAARAMIKGNNKGGSIICTSSAASIMGGLALHGYTMTKAAIDGLVRSAACELGEHLIRVNCISPHGVPSEMLLSACRRFGHDDITPQGVKEMIGSRASLLKGKGATIEDVAHAALFLASDESGFITAHNLLIDGGHTSADSRMSYMYQDPK

SEQ ID NO: 60428 - protein, 288 aa, Glycine max
  peptide (1)..(288): Ceres Seq. ID no. 13594165
MEPQHVTDQNIETKKSSTKRLADKVAVITGGARGIGAAAAKLFAENGAHVVIADVLDELGTTVAKSIGGHYIHCDVSKEDDVESAINLALSWKGHLDIMLSNAGIGGPEGRSITTLEMDRVRHLFSINLYGTIHGIKHAARAMIKGNNKGGSIICTSSAASIMGGLALHGYTMTKAAIDGLVRSAACELGEHLIRVNCISPHGVPSEMLLSACRRFGHDDITPQGVKEMIGSRASLLKGKGATIEDVAHAALFLASDESGFITAHNLLIDGGHTSADSRMSYMYQDPK

SEQ ID NO: 60429 - protein, 190 aa, Glycine max
  peptide (1)..(190): Ceres Seq. ID no. 13594166
MLSNAGIGGPEGRSITTLEMDRVRHLFSINLYGTIHGIKHAARAMIKGNNKGGSIICTSSAASIMGGLALHGYTMTKAAIDGLVRSAACELGEHLIRVNCISPHGVPSEMLLSACRRFGHDDITPQGVKEMIGSRASLLKGKGATIEDVAHAALFLASDESGFITAHNLLIDGGHTSADSRMSYMYQDPK

SEQ ID NO: 60430 - DNA, 2002 bp, Glycine max
  misc_feature (1)..(2002): Ceres Seq. ID no. 15169092
agatctgaagaagccacataaccctaagcttcaaacgggtaagtgtcgctgggacttcaatggcagtgaccgaagctcaaaatcctcttcttggagaaaacacatgtggttccttgttaaaaaagcttcaggaaatatgggatgaggttggtgagagcgatgagcaacgagacaagatgcttcttcagttagaacaggagtgcttggatgtgtacaagagaaaggttgagcaggctgcaaagtcaagggcgcagctacttcaagctctgtctgatgctaagcttgagctttccactcttctatcagcacttggagaaaagagctttgctggaattcctgagaatacttctggaactatcaaagaacagcttgcagctatagcaccagtacttgaacagttatggcaacaaaaagaagaaagaattaaggagttctcagatgtacagtcacagatccaacaaatatgtggagagatagccgggaacttgaaccttaatgatgtttcacctgcagttgatgagtctgatttgtccctgaagaagttggatgaatatcaatccgagctccaagaacttcaaaaggaaaagagcgagaggttgcacaaggttcttgaatttgtgagtacggtgcatgatctatgtgctgtccttggtatagacttcttcactactgtaactgaggttcatccaagtctaaatgactctactggtgttcaatccaagagcattagtaatgacacccttgcaaggctggctaagacagtcttgacgctgaaagaagataaaaaacagaggctgcacaagctccaagaattagcttctcagttaattgatctttggaatctaatggatactcatcccgaggaaaggagactatttgaccatgttacctgtaatatgtcagcttctgttgatgaagtcactgttcctggtgcccttgctctggatctgattgagcaggctgaagtggaagttgagagacttgatcagctgaaagccagcaggatgaaggaaattgctttcaagaagcaagcagagctcgaagagatatttgtctgtgctcatatagaagtagatccagatgctgcccgggagaagattatggccttgattgattcaggaaacattgaaccaactgaattactggctgacatggacaatcagatagcaacagcaaaagaagaagctttaagccgaaaagatatattggacaaggttgagaaatggatgtcagcatgtgaagaagaaagttggcttgaagattataatcgggatgataacaggtataatgcaagcagaggtgcacacttaaacctcaaacgtgcagagaaagctcggatattggtcaacaaaattccagctttggtcgatacattggttgctaaaactcgtgcatgggaagaagatcatggcatgtcatttacatatgatggtgttcctcttcttgccatgttagatgaatatgccatgctcagacatgaacgggaagaggaaaaacggaggatgagggatcagaaaaagcatcacgagcagcgaaacacggaacaagaaaccatctttggttcaagacccagccctgctaggccagttagttccagtaagtcaggaggtcctcgtgctaacggaggagccaatggtactcctaaccgacggctatcgcttaatgctcataaaaatggaaacaggtccacatcaaaagatggaaaaagggataacagactatctgctccggtgaattatgtggccatatcaaaagaagatgctgcttcccatgtttctggtactgaacccatcccggcatcaccctaatgacgagatcttcattttcaaccctataatttcatctttgtagcattgtcaaattactagttactgctttaggaattataatatgggagtgacaagtaattagagaggaactgttctgagctgtgtatgttcaatttgccattttggaggttttctcaatacatatgccctttaatatgaaaatatacacagtt

SEQ ID NO: 60431 - protein, 582 aa, Glycine max
  peptide (1)..(582): Ceres Seq. ID no. 15169093
MAVTEAQNPLLGENTCGSLLKKLQEIWDEVGESDEQRDKMLLQLEQECLDVYKRKVEQAAKSRAQLLQALSDAKLELSTLLSALGEKSFAGIPENTSGTIKEQLAAIAPVLEQLWQQKEERIKEFSDVQSQIQQICGEIAGNLNLNDVSPAVDESDLSLKKLDEYQSELQELQKEKSERLHKVLEFVSTVHDLCAVLGIDFFTTVTEVHPSLNDSTGVQSKSISNDTLARLAKTVLTLKEDKKQRLHKLQELASQLIDLWNLMDTHPEERRLFDHVTCNMSASVDEVTVPGALALDLIEQAEVEVERLDQLKASRMKEIAFKKQAELEEIFVCAHIEVDPDAAREKIMALIDSGNIEPTELLADMDNQIATAKEEALSRKDILDKVEKWMSACEEESWLEDYNRDDNRYNASRGAHLNLKRAEKARILVNKIPALVDTLVAKTRAWEEDHGMSFTYDGVPLLAMLDEYAMLRHEREEEKRRMRDQKKHHEQRNTEQETIFGSRPSPARPVSSSKSGGPRANGGANGTPNRRLSLNAHKNGNRSTSKDGKRDNRLSAPVNYVAISKEDAASHVSGTEPIPASP

SEQ ID NO: 60432 - protein, 543 aa, Glycine max
  peptide (1)..(543): Ceres Seq. ID no. 15169094
MLLQLEQECLDVYKRKVEQAAKSRAQLLQALSDAKLELSTLLSALGEKSFAGIPENTSGTIKEQLAAIAPVLEQLWQQKEERIKEFSDVQSQIQQICGEIAGNLNLNDVSPAVDESDLSLKKLDEYQSELQELQKEKSERLHKVLEFVSTVHDLCAVLGIDFFTTVTEVHPSLNDSTGVQSKSISNDTLARLAKTVLTLKEDKKQRLHKLQELASQLIDLWNLMDTHPEERRLFDHVTCNMSASVDEVTVPGALALDLIEQAEVEVERLDQLKASRMKEIAFKKQAELEEIFVCAHIEVDPDAAREKIMALIDSGNIEPTELLADMDNQIATAKEEALSRKDILDKVEKWMSACEEESWLEDYNRDDNRYNASRGAHLNLKRAEKARILVNKIPALVDTLVAKTRAWEEDHGMSFTYDGVPLLAMLDEYAMLRHEREEEKRRMRDQKKHHEQRNTEQETIFGSRPSPARPVSSSKSGGPRANGGANGTPNRRLSLNAHKNGNRSTSKDGKRDNRLSAPVNYVAISKEDAASHVSGTEPIPASP

SEQ ID NO: 60433 - protein, 320 aa, Glycine max
  peptide (1)..(320): Ceres Seq. ID no. 15169095
MDTHPEERRLFDHVTCNMSASVDEVTVPGALALDLIEQAEVEVERLDQLKASRMKEIAFKKQAELEEIFVCAHIEVDPDAAREKIMALIDSGNIEPTELLADMDNQIATAKEEALSRKDILDKVEKWMSACEEESWLEDYNRDDNRYNASRGAHLNLKRAEKARILVNKIPALVDTLVAKTRAWEEDHGMSFTYDGVPLLAMLDEYAMLRHEREEEKRRMRDQKKHHEQRNTEQETIFGSRPSPARPVSSSKSGGPRANGGANGTPNRRLSLNAHKNGNRSTSKDGKRDNRLSAPVNYVAISKEDAASHVSGTEPIPASP

SEQ ID NO: 60434 - DNA, 1500 bp, Glycine max
  misc_feature (1)..(1500): Ceres Seq. ID no. 14308636
tttgcaatggaatatggcgagttctggctgctagctcagcatcaaccaacagaccctattgccaaatctgtggctgttctgaacggagttccagtgctcacaagacctgcagcagtgcaaaagcatcgccaagccatcactgagctcaacaatctggtcaaaacaacgttgctagtcattgagttaatctttgagttggagaagcttacaacttttgacacaaaggatgtgcctgctttgttgcccgcaatagaacaaattcctgttgatgtctactgggctatcatcaccattgtggctattgttactcagattgattacctcactactgagtcagggaacaagcaagacctgtcccactatggtcaaaagatcaacatcatacttagcaaactgaggaagcaaatcatgctgtgcagacaacagattgaggaggcagagtatcaccacaggctcaggaaattttttcaaacgcctactgaaattatggaagtgtttaagtttctagtttattcgaaggatgctccacagctactgtttgatggtgccgctaagaccacggtcgaaatcactgagctcaagaagaagcatgtttacttgctgatttccactctagacatcacggaggaagagatttcagtactccgaccagtttatgattctattaaagctaatgatcagtataagattgtgtggattcccattgtagaagaatggaccgaaaagctgcacaagaaatttgagtttttgaaaagcaagatgccttggtatgtggtgcagcattctggacccatagcagggtacaaatacatcaaggaggaatggcacttcaaaaagaagcctatggttgtggtgttgaatcctcaaggaaaagtgcagcatgcaaacgcattccatctcattcatgtttatggaatgaaggccttcccctttactattgcggatcaagagagaattgatagagaaattcactggattggttctgtagtcggggattctcacccccacataagcacatgggtaagtacatttcacaaaccaattaggatacacatattataaacctatataaattaagtactcatttgaaaatattttagttgttaagttttgagcaatcatattttgaatatttcgttagcctttatgttgtgcaaagtatcatacaattaatacacaggaatcttaaaatttctttttcaagatgaatttcagattatagagagtttttctagaaagagaatagaaaaagaatcgatacctaatctaaagaatagctgaattatttataccaatttttaacaaatggacatcacactatttttaatagtttgttataactgttttaactaccagcttaaaataaaaagacgtaggaatgagaagttttagttatgtgaatcgactgatcaacactttacaaggttttgtttggtattgtttaagttagcattgacaaggacatgagcttaatggagatataaggttgattgagtaatt

SEQ ID NO: 60435 - protein, 353 aa, Glycine max
  peptide (1)..(353): Ceres Seq. ID no. 14308637
FAMEYGEFWLLAQHQPTDPIAKSVAVLNGVPVLTRPAAVQKHRQAITELNNLVKTTLLVIELIFELEKLTTFDTKDVPALLPAIEQIPVDVYWAIITIVAIVTQIDYLTTESGNKQDLSHYGQKINIILSKLRKQIMLCRQQIEEAEYHHRLRKFFQTPTEIMEVFKFLVYSKDAPQLLFDGAAKTTVEITELKKKHVYLLISTLDITEEEISVLRPVYDSIKANDQYKIVWIPIVEEWTEKLHKKFEFLKSKMPWYVVQHSGPIAGYKYIKEEWHFKKKPMVVVLNPQGKVQHANAFHLIHVYGMKAFPFTIADQERIDREIHWIGSVVGDSHPHISTWVSTFHKPIRIHIL

SEQ ID NO: 60436 - protein, 351 aa, Glycine max
  peptide (1)..(351): Ceres Seq. ID no. 14308638
MEYGEFWLLAQHQPTDPIAKSVAVLNGVPVLTRPAAVQKHRQAITELNNLVKTTLLVIELIFELEKLTTFDTKDVPALLPAIEQIPVDVYWAIITIVAIVTQIDYLTTESGNKQDLSHYGQKINIILSKLRKQIMLCRQQIEEAEYHHRLRKFFQTPTEIMEVFKFLVYSKDAPQLLFDGAAKTTVEITELKKKHVYLLISTLDITEEEISVLRPVYDSIKANDQYKIVWIPIVEEWTEKLHKKFEFLKSKMPWYVVQHSGPIAGYKYIKEEWHFKKKPMVVVLNPQGKVQHANAFHLIHVYGMKAFPFTIADQERIDREIHWIGSVVGDSHPHISTWVSTFHKPIRIHIL

SEQ ID NO: 60437 - protein, 217 aa, Glycine max
  peptide (1)..(217): Ceres Seq. ID no. 14308639
MLCRQQIEEAEYHHRLRKFFQTPTEIMEVFKFLVYSKDAPQLLFDGAAKTTVEITELKKKHVYLLISTLDITEEEISVLRPVYDSIKANDQYKIVWIPIVEEWTEKLHKKFEFLKSKMPWYVVQHSGPIAGYKYIKEEWHFKKKPMVVVLNPQGKVQHANAFHLIHVYGMKAFPFTIADQERIDREIHWIGSVVGDSHPHISTWVSTFHKPIRIHIL

SEQ ID NO: 60438 - DNA, 1137 bp, Glycine max
  misc_feature (1)..(1137): Ceres Seq. ID no. 15169976
gttgtatccaaatccaaaaaaacctttttctgaatcagtcgtgaaccaaaagaggaagatggagctgtggaacagagcccgaagctttgcggaagaagcagcgaaacgatcccaggaactgtcgttgggagctagagctacccaattcaccaacatcatagcagaaaccaccaaagaaatcgcagcgcaagcttccaagcacttgccccgaccttatgccataaacgacgtcgatctccaccgttttggcatcaccgaagagttgagggactttgtcaaaggaatcaccatcactacctttgaggattttccccttcaagatgatacggaattgtctgatgttcctgcagtttcaaatgttaggcaggacctaaccgagtggcaggaaaaacatgccagtcttgttctttctacagtcaaggagatttcaggattgaggtatgaactgtgtccacgagtcatgaaagagaggaagttttggagaatatattttatacttgtgaataatcacactgcaccctatgagaataagtacatggaagacaataaactaaaatcatgtgaacaagtaaaagatcacaaagtgatgatggaatccttaaacactgaattgatctccaatcaagaggtgcaagaagtgaaaaaggaggccaaaccttcgaattcatcaacagagcaagacttggatgtatttcttctgggagaaggaaacagtgatgatgagcctgatgatggcgatgggggatatgatgatgatttggaaaaactgatggataattcggatgatgagaaagggaaatcatagatggtgcttgaaattattggctgacattaaataaggggttgcaacatgcctgagaatatacatgatgaaatgaggcttaatttattgatgcgacacatacggtggctgatctgttccgtgatgcctacatttattctttcaaccctttcctgcccctttatttatgtagttgcttccccatgttgagggatgaaattcctgcccctttatttatgtagttgcttccccatgttgagggatgaaaaagttgggtttgtgattataaaaaagttaattatttggtgtctagttttgttagttttttatgtaaaaaatacacattaaatgtactg

SEQ ID NO: 60439 - protein, 267 aa, Glycine max
  peptide (1)..(267): Ceres Seq. ID no. 15169977
LYPNPKKPFSESVVNQKRKMELWNRARSFAEEAAKRSQELSLGARATQFTNIIAETTKEIAAQASKHLPRPYAINDVDLHRFGITEELRDFVKGITITTFEDFPLQDDTELSDVPAVSNVRQDLTEWQEKHASLVLSTVKEISGLRYELCPRVMKERKFWRIYFILVNNHTAPYENKYMEDNKLKSCEQVKDHKVMMESLNTELISNQEVQEVKKEAKPSNSSTEQDLDVFLLGEGNSDDEPDDGDGGYDDDLEKLMDNSDDEKGKS

SEQ ID NO: 60440 - protein, 248 aa, Glycine max
  peptide (1)..(248): Ceres Seq. ID no. 15169978
MELWNRARSFAEEAAKRSQELSLGARATQFTNIIAETTKEIAAQASKHLPRPYAINDVDLHRFGITEELRDFVKGITITTFEDFPLQDDTELSDVPAVSNVRQDLTEWQEKHASLVLSTVKEISGLRYELCPRVMKERKFWRIYFILVNNHTAPYENKYMEDNKLKSCEQVKDHKVMMESLNTELISNQEVQEVKKEAKPSNSSTEQDLDVFLLGEGNSDDEPDDGDGGYDDDLEKLMDNSDDEKGKS

SEQ ID NO: 60441 - DNA, 1281 bp, Glycine max
  misc_feature (1)..(1281): Ceres Seq. ID no. 14311647
atgccgttcttctctgttatttgagtcaaaggattatccccatgtcagttgcaccagttgacggtattccctcattaaacagtgatctcttctatgatatatttcgtcgacttgatggtgcaacattggctagtgcagcatgtacttgtgcagcgctgtgttccatctcaaaagaagagagtttatgggagaacgtatgttcctctatgtggccttcaaccaatagagaggatgtcaaaagtttaatatcttctgttggtggattcagaaaattctatgcagattgtttcccacttattgtaaacaaggaggttgtagggtatcaaccaaacaactatctcgagtacccggacaattggactgaagctgaatattatggggacatgaatgaatctgaaagcatctctccatcagattttgtttctatagtagatattaggttcaaggggaaaccaatctgttccaaagttctgtggggaattccaaatgcaaatggctatgatggttggttctataactgccctttccggattgatattctcacttatgcagatagagatgataacaatgatggagcggttcacctttctgtatctgatggtctgccaccaattacatccttggagagggaaaggaaagatgggaagctgtggcgggaactccgtgaagggctccagcttagttggattatagtaaacaggaaaataaagcaagctgcaaatcttgctagctggagccctcttggtggtcaaagacactggccaaccgataaggattttgttatccgctttggatcagttctacccgccagggacattcttccttgtcaggtagcagagtgtatccttattatgaagtttagagtgattcacactgaagaagatgggtttcaaacaactcttaaattaacagagctgagcatgcagttggaagacatggaaggtgctcatgttaatggaagaaacagtttgcttatacttaaggaagcacttagcagccgaaggagcaaaaattatggtgaagtactcgagtcttgtcatatgtattcaaaagtacagaatgagttgaaagaggagaagatgagaaacgaaagtcggttggacagactttgtattttaagtggcattgcagcatttatgacgttctggtactgtgttttatgaaatggtagcgcatagtcatttagtggaatatgctaatgtagctctaacaaatgctggaccttggcactcctgtgtaagatgtggttttgcttaccataataaacaaatcaataaacag

SEQ ID NO: 60442 - protein, 386 aa, Glycine max
  peptide (1)..(386): Ceres Seq. ID no. 14311648
AVLLCYLSQRIIPMSVAPVDGIPSLNSDLFYDIFRRLDGATLASAACTCAALCSISKEESLWENVCSSMWPSTNREDVKSLISSVGGFRKFYADCFPLIVNKEVVGYQPNNYLEYPDNWTEAEYYGDMNESESISPSDFVSIVDIRFKGKPICSKVLWGIPNANGYDGWFYNCPFRIDILTYADRDDNNDGAVHLSVSDGLPPITSLERERKDGKLWRELREGLQLSWIIVNRKIKQAANLASWSPLGGQRHWPTDKDFVIRFGSVLPARDILPCQVAECILIMKFRVIHTEEDGFQTTLKLTELSMQLEDMEGAHVNGRNSLLILKEALSSRRSKNYGEVLESCHMYSKVQNELKEEKMRNESRLDRLCILSGIAAFMTFWYCVL

SEQ ID NO: 60443 - protein, 373 aa, Glycine max
  peptide (1)..(373): Ceres Seq. ID no. 14311649
MSVAPVDGIPSLNSDLFYDIFRRLDGATLASAACTCAALCSISKEESLWENVCSSMWPSTNREDVKSLISSVGGFRKFYADCFPLIVNKEVVGYQPNNYLEYPDNWTEAEYYGDMNESESISPSDFVSIVDIRFKGKPICSKVLWGIPNANGYDGWFYNCPFRIDILTYADRDDNNDGAVHLSVSDGLPPITSLERERKDGKLWRELREGLQLSWIIVNRKIKQAANLASWSPLGGQRHWPTDKDFVIRFGSVLPARDILPCQVAECILIMKFRVIHTEEDGFQTTLKLTELSMQLEDMEGAHVNGRNSLLILKEALSSRRSKNYGEVLESCHMYSKVQNELKEEKMRNESRLDRLCILSGIAAFMTFWYCVL

SEQ ID NO: 60444 - protein, 318 aa, Glycine max
  peptide (1)..(318): Ceres Seq. ID no. 14311650
MWPSTNREDVKSLISSVGGFRKFYADCFPLIVNKEVVGYQPNNYLEYPDNWTEAEYYGDMNESESISPSDFVSIVDIRFKGKPICSKVLWGIPNANGYDGWFYNCPFRIDILTYADRDDNNDGAVHLSVSDGLPPITSLERERKDGKLWRELREGLQLSWIIVNRKIKQAANLASWSPLGGQRHWPTDKDFVIRFGSVLPARDILPCQVAECILIMKFRVIHTEEDGFQTTLKLTELSMQLEDMEGAHVNGRNSLLILKEALSSRRSKNYGEVLESCHMYSKVQNELKEEKMRNESRLDRLCILSGIAAFMTFWYCVL

SEQ ID NO: 60445 - DNA, 1120 bp, Glycine max
  misc_feature (1)..(1120): Ceres Seq. ID no. 14315553
gacgctttaagaccaaaagcaccgtctccgtctccgtctccacctcctgtccttcgttgcacttcgctttttccaaaaccaatcacatcagcatcactctcgtcgccgccgtcgtcgaccaccgcaagagccatcgcactccgccgtcatccgttagggcaaaaatgagtcgaggaagtggaggtggatacgatcgtcacatcactattttctcccctgaaggacgtctcttccaagtcgagtatgctttcaaggctgttaaggccgcaggaatcacctcaattggtgtccgaggaaaggattcgatttgtgttgttactcagaagaaggttccggataagcttttggacaacacaagtgttacacacctctttcccatcaccaagtaccttggtttattggctactggcatgacagctgatgctaggacactggtccaacaagcaagaaatgaagcagctgagtttcgctttacatatggatatgaaatgcctgtagatgtattagctaaatggattgcagacaaatcacaagtctatactcaacatgcttatatgagaccacttggagtagttgccatggttttgggtattgatgatgaatatggacctcagctttacaaatgtgatccagctggtcattactttggtcacaaggcaacaagtgctggattgaaggaccaagaggcaattaatttcttggaaaagaagatgaagaatgacccttcatttacatatgaggagacagttcagactgccatttctgccctgcaatcagttcttcaggaggattttaaggccactgagattgaggttggagtggtgcggaaagaaaatccagaattcagagttttaaccaccgaggaaattgatgagcacttgactgcaataagtgagcgtgactgagttcttgataaggatgtaatggttcaaactttctaatgctagagattaaattatgtacttgtttctggaatcattgaattgatttccttgtgatatttgagtagtaagtttatttaagaatgatgttgaagacggtatttgatttcctattacaagtttacttgggagcaattttatgtttctaccaatgaaatgaaatgaaaattttaaaaaat

SEQ ID NO: 60446 - protein, 300 aa, Glycine max
  peptide (1)..(300): Ceres Seq. ID no. 14315554
RFKTKSTVSVSVSTSCPSLHFAFSKTNHISITLVAAVVDHRKSHRTPPSSVRAKMSRGSGGGYDRHITIFSPEGRLFQVEYAFKAVKAAGITSIGVRGKDSICVVTQKKVPDKLLDNTSVTHLFPITKYLGLLATGMTADARTLVQQARNEAAEFRFTYGYEMPVDVLAKWIADKSQVYTQHAYMRPLGVVAMVLGIDDEYGPQLYKCDPAGHYFGHKATSAGLKDQEAINFLEKKMKNDPSFTYEETVQTAISALQSVLQEDFKATEIEVGVVRKENPEFRVLTTEEIDEHLTAISERD

SEQ ID NO: 60447 - protein, 246 aa, Glycine max
  peptide (1)..(246): Ceres Seq. ID no. 14315555
MSRGSGGGYDRHITIFSPEGRLFQVEYAFKAVKAAGITSIGVRGKDSICVVTQKKVPDKLLDNTSVTHLFPITKYLGLLATGMTADARTLVQQARNEAAEFRFTYGYEMPVDVLAKWIADKSQVYTQHAYMRPLGVVAMVLGIDDEYGPQLYKCDPAGHYFGHKATSAGLKDQEAINFLEKKMKNDPSFTYEETVQTAISALQSVLQEDFKATEIEVGVVRKENPEFRVLTTEEIDEHLTAISERD

SEQ ID NO: 60448 - protein, 164 aa, Glycine max
  peptide (1)..(164): Ceres Seq. ID no. 14315556
MTADARTLVQQARNEAAEFRFTYGYEMPVDVLAKWIADKSQVYTQHAYMRPLGVVAMVLGIDDEYGPQLYKCDPAGHYFGHKATSAGLKDQEAINFLEKKMKNDPSFTYEETVQTAISALQSVLQEDFKATEIEVGVVRKENPEFRVLTTEEIDEHLTAISERD

SEQ ID NO: 60449 - DNA, 1163 bp, Glycine max
  misc_feature (1)..(1163): Ceres Seq. ID no. 15169431
aaagtttaaaccctacagaaaaacgctacataaaccccgcaacaaacaaccaacccccaaacccctcactcttctcggcgtccatcggaaatttccaaggtaaaaagatgaatctgaagaacatgaagattccgaacgttccaggcggcggtgcgtcctctgcgctgctgaagcttgggcttcttggtggaattggtttatatgcagctgctaacagtctctacaacgttgaaggaggtcaccgagccattgttttcaaccgtctagttggtgtcaaagacaaggtctatcctgaaggaacacactttatgattccgtggtttgagaggcctgttatctatgatgtccgtgcacgaccccatctagttgagagtacatctggtagtcgtgatctacagatggtgaaaattggacttcgagttcttactcgccctttgcccaaccaattacctacggtttatcggacccttggagagaattataatgaaagggttttaccttcaatcatacatgaaactttgaaagccgtggttgcccagtacaatgccagccagcttattactcagcgagaggctgttagtcgggaaatccggaagattctaactgaaagggctgctaacttcaatattgcccttgatgatgtgtcaattactagtctgacttttggcaaggagtttactgctgcaattgaagctaagcaggtagctgcacaagaagctgagagggctaaatttgttgtggaaaaagctgagcaagacaagagaagtgctgtaattagagcacagggagaagcaaaaagtgcccaactgattgggcaagctattgccaacaatccagcttttatcacactgaggaagatagaagccgcaagggagattgcacatactatatcaaatgcggcaaacaaggtttacctgaattcagatgatctattgttgaatcttcaagagatgaaattggagccaggcagaaagtgagtgtgttagcctgtttgtttctttttggttttagcttgtaaactatcaatttcaggatcgattttcttgatatgtttttgcaaattcggatatagctggcttgattagacaactgagcggcaaccctttaaatctttgggaaaggattaattgagatccaaacgaatgcttcacattacttgaaac

SEQ ID NO: 60450 - protein, 324 aa, Glycine max
  peptide (1)..(324): Ceres Seq. ID no. 15169432
SLNPTEKRYINPATNNQPPNPSLFSASIGNFQGKKMNLKNMKIPNVPGGGASSALLKLGLLGGIGLYAAANSLYNVEGGHRAIVFNRLVGVKDKVYPEGTHFMIPWFERPVIYDVRARPHLVESTSGSRDLQMVKIGLRVLTRPLPNQLPTVYRTLGENYNERVLPSIIHETLKAVVAQYNASQLITQREAVSREIRKILTERAANFNIALDDVSITSLTFGKEFTAAIEAKQVAAQEAERAKFVVEKAEQDKRSAVIRAQGEAKSAQLIGQAIANNPAFITLRKIEAAREIAHTISNAANKVYLNSDDLLLNLQEMKLEPGRK

SEQ ID NO: 60451 - protein, 289 aa, Glycine max
  peptide (1)..(289): Ceres Seq. ID no. 15169433
MNLKNMKIPNVPGGGASSALLKLGLLGGIGLYAAANSLYNVEGGHRAIVFNRLVGVKDKVYPEGTHFMIPWFERPVIYDVRARPHLVESTSGSRDLQMVKIGLRVLTRPLPNQLPTVYRTLGENYNERVLPSIIHETLKAVVAQYNASQLITQREAVSREIRKILTERAANFNIALDDVSITSLTFGKEFTAAIEAKQVAAQEAERAKFVVEKAEQDKRSAVIRAQGEAKSAQLIGQAIANNPAFITLRKIEAAREIAHTISNAANKVYLNSDDLLLNLQEMKLEPGRK

SEQ ID NO: 60452 - protein, 284 aa, Glycine max
  peptide (1)..(284): Ceres Seq. ID no. 15169434
MKIPNVPGGGASSALLKLGLLGGIGLYAAANSLYNVEGGHRAIVFNRLVGVKDKVYPEGTHFMIPWFERPVIYDVRARPHLVESTSGSRDLQMVKIGLRVLTRPLPNQLPTVYRTLGENYNERVLPSIIHETLKAVVAQYNASQLITQREAVSREIRKILTERAANFNIALDDVSITSLTFGKEFTAAIEAKQVAAQEAERAKFVVEKAEQDKRSAVIRAQGEAKSAQLIGQAIANNPAFITLRKIEAAREIAHTISNAANKVYLNSDDLLLNLQEMKLEPGRK

SEQ ID NO: 60453 - DNA, 1390 bp, Glycine max
  misc_feature (1)..(1390): Ceres Seq. ID no. 14312324
aactccaacacgccctccaagcataaaatttgcaggattagacatttccagcaacacttgaagttgtcaatcaatggccatgaagccctcaacttccacaagtgggtctggcaagaagattagaaagccttatactattaccaaatctagggagagctggtctgaggaagagcacgacaagtttctcgaagctcttcaactatttgacagagattggaagaaaattgaagattttgttggttcaaaatcagttattcagattagaagtcatgcccagaagtacttcttgaaagttcaaaagagcgggacagtagcacatgtgcctcctcctcggcctaagcgcaaagcttctcatccttatccacaaaaggcatccaaaaatgttttgttgccaatgccagcttccatggtttatgtttcttccactagtacccttccaccagggtatgtcacatgggatgaaaattccttgctcatgaattctggatccaacaaatcagtgccttgtaaggatgagctcgccaatcttcttggaaatgaagctgatattggatcaaaggggataacacgaattgaccacagcagtcttagtggtgttgggaactctactagaaatctgcctgctactgagatgccaaaacaagggaaacaggctcaggttattcatggtttgccagattttgctgatgtttacagcttcattggaagtgtttttgatccagacacagaaggccatgtccagaagctgaaggaaatggatcctataaattttgaaactgttttgttgttaatgaaaaacctcactgtcaatttgtctagtcctgactttgagcccgttagggaggtcatgtcatcatacgatgtccatacaaaaacagtaggagttaccgcaggaattgacgtcaagaagcagacaaatgatctatcatgtcaaacagcttgacaaccattaattgaacttattatcaaatttggatggaagaccgaggttttgcccaaccagcagcattagcaatgcattcacattaactcgttgtgaaacttgaaaatgcaaccaaaccatcagcctatgtaaccacaaccaggagagtttgttttaatggaagtgctagcaaagccaaaaatatattcatcgggtaattctaaggtgcacaaggttttgtagtattgcagtgattctagtacttatttatggaatgtggttttcaagtagacacatgggtctaactgtaagataagtttgatggctcaggtgtattaattggagaggtggggggctagtcatagtagcttatatcaatgtggcctaactttcaatgtaaatcataaagagcatcataacaggaagtggtcccaatttctaattctacttacttttttttttagcatc

SEQ ID NO: 60454 - protein, 289 aa, Glycine max
  peptide (1)..(289): Ceres Seq. ID no. 14312325
MAMKPSTSTSGSGKKIRKPYTITKSRESWSEEEHDKFLEALQLFDRDWKKIEDFVGSKSVIQIRSHAQKYFLKVQKSGTVAHVPPPRPKRKASHPYPQKASKNVLLPMPASMVYVSSTSTLPPGYVTWDENSLLMNSGSNKSVPCKDELANLLGNEADIGSKGITRIDHSSLSGVGNSTRNLPATEMPKQGKQAQVIHGLPDFADVYSFIGSVFDPDTEGHVQKLKEMDPINFETVLLLMKNLTVNLSSPDFEPVREVMSSYDVHTKTVGVTAGIDVKKQTNDLSCQTA

SEQ ID NO: 60455 - protein, 287 aa, Glycine max
  peptide (1)..(287): Ceres Seq. ID no. 14312326
MKPSTSTSGSGKKIRKPYTITKSRESWSEEEHDKFLEALQLFDRDWKKIEDFVGSKSVIQIRSHAQKYFLKVQKSGTVAHVPPPRPKRKASHPYPQKASKNVLLPMPASMVYVSSTSTLPPGYVTWDENSLLMNSGSNKSVPCKDELANLLGNEADIGSKGITRIDHSSLSGVGNSTRNLPATEMPKQGKQAQVIHGLPDFADVYSFIGSVFDPDTEGHVQKLKEMDPINFETVLLLMKNLTVNLSSPDFEPVREVMSSYDVHTKTVGVTAGIDVKKQTNDLSCQTA

SEQ ID NO: 60456 - protein, 182 aa, Glycine max
  peptide (1)..(182): Ceres Seq. ID no. 14312327
MPASMVYVSSTSTLPPGYVTWDENSLLMNSGSNKSVPCKDELANLLGNEADIGSKGITRIDHSSLSGVGNSTRNLPATEMPKQGKQAQVIHGLPDFADVYSFIGSVFDPDTEGHVQKLKEMDPINFETVLLLMKNLTVNLSSPDFEPVREVMSSYDVHTKTVGVTAGIDVKKQTNDLSCQTA

SEQ ID NO: 60457 - DNA, 1463 bp, Glycine max
  misc_feature (1)..(1463): Ceres Seq. ID no. 15178751
tgctttttggggatttcagtttttgagttgagtgtgtgtagtttctgttcccttgttttatttatttggtttctcgttggcaactcaagggaggtacagcaaccaccatatatcaggtagtattatcagagtgtgtgtgactcctaaggaatttgcagagccccctactcatatttctctcttctctctcccttttgctccctctggtttctgtttgcgtggggagcaaaaagctcctgcttttctctctgatatatactatatgtaagacacgagctagaggtgaaaaaaggaactattctagttgttgaggggaggacgtatgtatgttcccatttggtgttgaggaacaaacacaagtgaaggtcttcttgactatacatacaccaagtgtacgtttggatatatagagaaaaaatgggtagttgtggaagagaaggagcagtgaggcaatatgtaagatcgaaggttcctcgtttaaggtggactcctgagctgcaccgttgctttgttcatgctattgatagccttggaggtcatcataaggctactccgaagcttgttcttcagttgatggatgttaaagggctcacaatttcacacgtcaagagccatcttcagatgtacagaagcatgaggggtgacttgggcagacaaggtaggacaccctcccaacataggaaccaatcttttgaggagcatgatgatggatgtgttgatgaagtgaatgatgttggtgttgagtactcatgttcgaaacccctgggaagagaatctgattccttcttcgggcacagtaatctccctccaaaaagagcaagaatcgagatgagaagttccatctcagagaggctgcagcaatgcagccaaagattatgtgatgttgtagttccaaatccgtactgtttttatgattatctgaaacagaagaagcccatgcccatggctgatcagcattcccctccttttccagattttcccaacctcacttcattcaaatctcctgatcaacaatctgatttccttcaggttactaaattaaatgaaggaaaaagcacttcacagactattaatgtacttgtgaacactactactgagacagctaatgtagaaattgaagatgaattgtcattgtcgctcacattgccaaatccttcacctcagagaagttcaggcagtgagataagtgaggcaatctcatcctgccatgggtttagcaacaactacaaggactgctctagttcatccactcacactgtcaaagaaagaattaatttggacctatctttagccctatgtggcaattgatttgatgctcttttgtaaaatcaatctactataggtataattccacggtagctctttttcattctctaacagttttggttattttcttgtttctactaccgggtacctttccaatcaccatgtcaattaattctaagctaagctattttgagtag

SEQ ID NO: 60458 - protein, 296 aa, Glycine max
  peptide (1)..(296): Ceres Seq. ID no. 15178752
MGSCGREGAVRQYVRSKVPRLRWTPELHRCFVHAIDSLGGHHKATPKLVLQLMDVKGLTISHVKSHLQMYRSMRGDLGRQGRTPSQHRNQSFEEHDDGCVDEVNDVGVEYSCSKPLGRESDSFFGHSNLPPKRARIEMRSSISERLQQCSQRLCDVVVPNPYCFYDYLKQKKPMPMADQHSPPFPDFPNLTSFKSPDQQSDFLQVTKLNEGKSTSQTINVLVNTTTETANVEIEDELSLSLTLPNPSPQRSSGSEISEAISSCHGFSNNYKDCSSSSTHTVKERINLDLSLALCGN

SEQ ID NO: 60459 - protein, 244 aa, Glycine max
  peptide (1)..(244): Ceres Seq. ID no. 15178753
MDVKGLTISHVKSHLQMYRSMRGDLGRQGRTPSQHRNQSFEEHDDGCVDEVNDVGVEYSCSKPLGRESDSFFGHSNLPPKRARIEMRSSISERLQQCSQRLCDVVVPNPYCFYDYLKQKKPMPMADQHSPPFPDFPNLTSFKSPDQQSDFLQVTKLNEGKSTSQTINVLVNTTTETANVEIEDELSLSLTLPNPSPQRSSGSEISEAISSCHGFSNNYKDCSSSSTHTVKERINLDLSLALCGN

SEQ ID NO: 60460 - protein, 228 aa, Glycine max
  peptide (1)..(228): Ceres Seq. ID no. 15178754
MYRSMRGDLGRQGRTPSQHRNQSFEEHDDGCVDEVNDVGVEYSCSKPLGRESDSFFGHSNLPPKRARIEMRSSISERLQQCSQRLCDVVVPNPYCFYDYLKQKKPMPMADQHSPPFPDFPNLTSFKSPDQQSDFLQVTKLNEGKSTSQTINVLVNTTTETANVEIEDELSLSLTLPNPSPQRSSGSEISEAISSCHGFSNNYKDCSSSSTHTVKERINLDLSLALCGN

SEQ ID NO: 60461 - DNA, 1653 bp, Glycine max
  misc_feature (1)..(1653): Ceres Seq. ID no. 15176588
ggtgtacggccatatttcctctcatcagattgaagggtggttagaattagggttctctatctgcaaagcaaaccttatcttttcacctgaaacttgcttttgttcccaattttctcaaattgctttcggttttcgttctgattctgcaaaatcatggagatggagcgcatcgttgaattccctcacacatacatggatcgacccccgagaaagagagcgcgtttgggctgggacatcgctgaggtccccaaggctcaggtaggattgttttgtggacaagaggttgagaatatttcaagctttgctccttcagaacatccccctagttctctgtttaagggagttgctcgaaatggttctcccccatggcgagacgatgacaaagatggccattacatgtttgagcttggagataatttaacttctcgctataagattcatggcaaaatgggcgaaggaacttttgggcaggtcttggagtgctgggacagagaaaggaaggaaatggtcgccataaaaattgttcgtgggataaagaaatatcgagaggcagccatggtagaaattgaggtactgcaacagcttgggaaacacgataaaggtagcaatcgttgtgtgcaaatacggaactggtttgactatcgtaatcatatctgtattgtgtttgagaaacttggaccaagcttatacgattttcttcggaaaaacagttatcgttcatttcccattgatcttgtccgtgagattggctggcaactattggaatgtgtagcatttatgcatgacttacacatgatccatactgacctgaagccggaaaacatacttctagtttcaccagagtatcttaaaattccagattacaagagtacaaccagatcaccaagttcctttttcaagagagtgcccaagtcaagtgctataaaagttattgattttggcagcactacatatgaacgagaagatcagacatacattgtgtcaacacgtcattatagggcacctgaagttatcctcggacttgggtggagctatccatgtgatatatggagtgtgggttgtatactggttgaattatgcactggtgaagctttgtttcagactcatgaaaatttagagcatctggccatgatggagagggtgcttggtcctataccacagcagatgttaaagagagttgaccgacatgcagagaagtatgtccgaaggggtagattggactggccagagggtgcagcctcacgagagagtattaaagctgtaatgaagcttccccgactacagaacattataatgcagcatgttgatcattcagctggagatcttatacatcttttgcaggggctacttagatatgacccctttgaaagacttacagctagggatgctttgaggcattccttctttactagagatcaacttaggagatgattttcatgtatttgtaaacgattggtctgtttttaagtttaaagatcattcgagggcaaatatggctgtaaggaagcctatgtgccatgtaaataaatatttgaatatcttgggctaaactaaagcaagtgaggatggttattcagcagcagttacacctcaaagcctgtatctcaaacgttttcttaaaaaaaataaaataattgtagatgttcttttacc

SEQ ID NO: 60462 - protein, 425 aa, Glycine max
  peptide (1)..(425): Ceres Seq. ID no. 15176589
MEMERIVEFPHTYMDRPPRKRARLGWDIAEVPKAQVGLFCGQEVENISSFAPSEHPPSSLFKGVARNGSPPWRDDDKDGHYMFELGDNLTSRYKIHGKMGEGTFGQVLECWDRERKEMVAIKIVRGIKKYREAAMVEIEVLQQLGKHDKGSNRCVQIRNWFDYRNHICIVFEKLGPSLYDFLRKNSYRSFPIDLVREIGWQLLECVAFMHDLHMIHTDLKPENILLVSPEYLKIPDYKSTTRSPSSFFKRVPKSSAIKVIDFGSTTYEREDQTYIVSTRHYRAPEVILGLGWSYPCDIWSVGCILVELCTGEALFQTHENLEHLAMMERVLGPIPQQMLKRVDRHAEKYVRRGRLDWPEGAASRESIKAVMKLPRLQNIIMQHVDHSAGDLIHLLQGLLRYDPFERLTARDALRHSFFTRDQLRR

SEQ ID NO: 60463 - protein, 423 aa, Glycine max
  peptide (1)..(423): Ceres Seq. ID no. 15176590
MERIVEFPHTYMDRPPRKRARLGWDIAEVPKAQVGLFCGQEVENISSFAPSEHPPSSLFKGVARNGSPPWRDDDKDGHYMFELGDNLTSRYKIHGKMGEGTFGQVLECWDRERKEMVAIKIVRGIKKYREAAMVEIEVLQQLGKHDKGSNRCVQIRNWFDYRNHICIVFEKLGPSLYDFLRKNSYRSFPIDLVREIGWQLLECVAFMHDLHMIHTDLKPENILLVSPEYLKIPDYKSTTRSPSSFFKRVPKSSAIKVIDFGSTTYEREDQTYIVSTRHYRAPEVILGLGWSYPCDIWSVGCILVELCTGEALFQTHENLEHLAMMERVLGPIPQQMLKRVDRHAEKYVRRGRLDWPEGAASRESIKAVMKLPRLQNIIMQHVDHSAGDLIHLLQGLLRYDPFERLTARDALRHSFFTRDQLRR

SEQ ID NO: 60464 - protein, 412 aa, Glycine max
  peptide (1)..(412): Ceres Seq. ID no. 15176591
MDRPPRKRARLGWDIAEVPKAQVGLFCGQEVENISSFAPSEHPPSSLFKGVARNGSPPWRDDDKDGHYMFELGDNLTSRYKIHGKMGEGTFGQVLECWDRERKEMVAIKIVRGIKKYREAAMVEIEVLQQLGKHDKGSNRCVQIRNWFDYRNHICIVFEKLGPSLYDFLRKNSYRSFPIDLVREIGWQLLECVAFMHDLHMIHTDLKPENILLVSPEYLKIPDYKSTTRSPSSFFKRVPKSSAIKVIDFGSTTYEREDQTYIVSTRHYRAPEVILGLGWSYPCDIWSVGCILVELCTGEALFQTHENLEHLAMMERVLGPIPQQMLKRVDRHAEKYVRRGRLDWPEGAASRESIKAVMKLPRLQNIIMQHVDHSAGDLIHLLQGLLRYDPFERLTARDALRHSFFTRDQLRR

SEQ ID NO: 60465 - DNA, 1231 bp, Glycine max
  misc_feature (1)..(1231): Ceres Seq. ID no. 15175688
aaacactaatcacattcattcaagatagatgtcaaagttaagcattctcttcctcctagtcttatccttcagttctgtactctcagaactatgcaacccacaagacaaacaagccctactccaaatcaagaaagatcttggaaacccaaccactctctcctcatggcttctaaccactgattgctgcaacagaacatggctaggtgtttcatgcgacaccgacacccaaacataccgcgtcaacgacctcgacctctccgatcttaacctccccaaaccctactctattcctccctccatagccaaccttccctacttgaattttctttccattagcaggaccccaaccctaatcggtcaaatcccctcagccatcgctaaactcacccaactccgttatctttatatcacccacaccaatgtctccggccctataccagatttcttgtctcaaatcaaaaccttagtcaccctcgatttctcctacaacaccctctccggcaaactccccgcctcgctctcttcgctgcccaatctcgtcggaatcaccttcgacggcaaccaaatctccggcgccatcccggactcgtacggctcattctcgaagcttttcacgtcgatgacgatctcccgcaaccgcctcacagggaagattccggcgacgttcgcgaatctgaacctggcgttcgtggacttgtctcggaacatgctggagggtgatgcgtcggtgttgtttgggacggagaaaaacacgcagaagatacttctggcgaagaacatgcttgcttttgatctggggaaagtaggcttgtctaagaacttgaacggcttggatcttaggaacaaccgtatttatgggacgctacctcagggacttacggcgcttaagtttctgcacagttttaatgtgagcttcaatgatctttgtggtgagattccgcagggtgggaacatgcaacgttttgacgtatcttcttatgccaataacaagtgtttgtgtggctctcctcttccaccatgcacttaataacaagtgttttattttcaaccctagcttggattaataagaacggatgggattaaacgttataatagagtcatattcaaaaggtaaatacccaaagtattactgtggcgtgcttggactactttgctaatactattttagattattcattaatatatgcttaacttttataattataattataataaataaatacttttaaat

SEQ ID NO: 60466 - protein, 332 aa, Glycine max
  peptide (1)..(332): Ceres Seq. ID no. 15175689
MSKLSILFLLVLSFSSVLSELCNPQDKQALLQIKKDLGNPTTLSSWLLTTDCCNRTWLGVSCDTDTQTYRVNDLDLSDLNLPKPYSIPPSIANLPYLNFLSISRTPTLIGQIPSAIAKLTQLRYLYITHTNVSGPIPDFLSQIKTLVTLDFSYNTLSGKLPASLSSLPNLVGITFDGNQISGAIPDSYGSFSKLFTSMTISRNRLTGKIPATFANLNLAFVDLSRNMLEGDASVLFGTEKNTQKILLAKNMLAFDLGKVGLSKNLNGLDLRNNRIYGTLPQGLTALKFLHSFNVSFNDLCGEIPQGGNMQRFDVSSYANNKCLCGSPLPPCT

SEQ ID NO: 60467 - DNA, 1462 bp, Glycine max
  misc_feature (1)..(1462): Ceres Seq. ID no. 14315518
aagttaatcaatcatcgctgtcgttgatcattcagcgcaagtctgcaaatcccatcatcatggcggccataacccgcctcgcgaagcgcgcgttcgtcgtctcttccctggcgaggaggtgcctgagctcctccgtagtcaactgccacgcgccgccgcacgacgccacgtcgttccgcccgtttccgctgcgtgaagattcgagcaagcggtgcgtgcagtgggtgttcctcggctgccccggcgtcggaaaaggaacgtacgctagtcgcctctcgaacctcctcggcgtttctcacatcgccaccggcgatctcgttcgcgacgaactcacctcctctggccccctttcttcccagctatcagaaattgtaaaacaaggtcaattggtgtcagatgaaattattattagtttattgtcaaagagacttgttgccggggaagctaaaggcgatttgggatttattcttgatggttttcctcgaacaattaagcaagcagaaatattggaaggggtaactgacattgacttggtaatcaatctgaagcttcgagaagatgttctgcttgagaaatgccttggtaggagaatttgcaatcagtgtgggggaaattttaatgttgcttccatcaacatcaaggctgagaatgggagccctggaattattatggctccacttcttcctcctgagaattgtatatcaaagctcattactcgatcagatgatactgaagcagtggtcaaagaaaggcttcgaatatacaatgaaatgactcagcctgtggaggaattttaccgttcaagaggaaaattattggagtttaacctgcctggaggaatcccggagtcttggcctaagttgctacatgctcttaatcttgatgattatgaggacaaacgatctgctgcagcataacgatataataatgtatcataacagtaagtatttcattctttgcgtgcatatattgcatgcttggcaattttgcaggacagagagccaaagaaagggaacttccctgctagtattattttggaccaataatgatatttgtaagtgttgtaatctgataagaggataagactggtagtgttgcgttttcttttcatataatttggttatatgggaagggtttcccagcatataatgttattgtgaagagtgaataatatatcacagcattgctagatggatagttggtcaggaatcagcttcgataggactggtgcatcatcactgtactgttgtaaattaaatgtgaatgaacttattctatttaatcatcagattctcgtgatttagggaaggcttttactgaagtaacttccaggaaaaattatttaatatgatgtttcatgttatttgaataagtcttatgatttcacagtactcatgaataactccttttctatgaatgttcttgttgctttaacattcaatgaatagaacaagaattctct

SEQ ID NO: 60468 - protein, 304 aa, Glycine max
  peptide (1)..(304): Ceres Seq. ID no. 14315519
VNQSSLSLIIQRKSANPIIMAAITRLAKRAFVVSSLARRCLSSSVVNCHAPPHDATSFRPFPLREDSSKRCVQWVFLGCPGVGKGTYASRLSNLLGVSHIATGDLVRDELTSSGPLSSQLSEIVKQGQLVSDEIIISLLSKRLVAGEAKGDLGFILDGFPRTIKQAEILEGVTDIDLVINLKLREDVLLEKCLGRRICNQCGGNFNVASINIKAENGSPGIIMAPLLPPENCISKLITRSDDTEAVVKERLRIYNEMTQPVEEFYRSRGKLLEFNLPGGIPESWPKLLHALNLDDYEDKRSAAA

SEQ ID NO: 60469 - protein, 285 aa, Glycine max
  peptide (1)..(285): Ceres Seq. ID no. 14315520
MAAITRLAKRAFVVSSLARRCLSSSVVNCHAPPHDATSFRPFPLREDSSKRCVQWVFLGCPGVGKGTYASRLSNLLGVSHIATGDLVRDELTSSGPLSSQLSEIVKQGQLVSDEIIISLLSKRLVAGEAKGDLGFILDGFPRTIKQAEILEGVTDIDLVINLKLREDVLLEKCLGRRICNQCGGNFNVASINIKAENGSPGIIMAPLLPPENCISKLITRSDDTEAVVKERLRIYNEMTQPVEEFYRSRGKLLEFNLPGGIPESWPKLLHALNLDDYEDKRSAAA

SEQ ID NO: 60470 - DNA, 999 bp, Glycine max
  misc_feature (1)..(999): Ceres Seq. ID no. 15173624
acaaattccatacaacactctatccctcgttctttctctctctctctctctctctctctctagccagctttggttagacaacatagttctgaccaacatggtgcaatcaaggaaattcagaggtgtgaggcaacgccattggggctcttgggtttctgagattcgtcacccattattgaaaaggagggtgtggcttgggacattcgagacagctgaggaagcagcaagagcatatgatgaggcagccattttgatgagtggaagaaatgcaaaaacaaacttcccagttggtgaaaaccaaatagtgggaaatcacagttcaaacacttcctcttcctccactacaacattgtctgcagttctgagtgcgaagctgagaaagtgttgcaagtccccttcaccttccctcacttgcctgaggcttgacactgagaattcccacattggtgtgtggcagaagcgagcggggcctcgttccgactcaaactggatcatgatggttgagttggaaaataagaacaacgacaacgagggtgatcatcatcagggtccttcttcttctgatgattcagaatttcctgttgttgttgttgatgttgatgcccaagagaaggtaaagcctgaagaagaaagcactggcttagatgaggaacagaaaatggccctacagatgatagaggaacttctcaataggaattgaattggattagccctatcatcccaacatgcttttactttcacgtggtgcatgcaaggagtttcaagttcaagttctccctctctagcacttcgttttatttctttgtttgtccaaaataggataggagagtgggagtgagagtgctactatattattattcatttcgtgaggaatgaggatgtttagtgtctgtggctgtgaatgtttccccctctgtgtgtaactacctacctacattcactatatatgtggttaaacttcatttcttctgtaaaaaaactattccttgatgcttttcg

SEQ ID NO: 60471 - protein, 232 aa, Glycine max
  peptide (1)..(232): Ceres Seq. ID no. 15173625
QIPYNTLSLVLSLSLSLSLSSQLWLDNIVLTNMVQSRKFRGVRQRHWGSWVSEIRHPLLKRRVWLGTFETAEEAARAYDEAAILMSGRNAKTNFPVGENQIVGNHSSNTSSSSTTTLSAVLSAKLRKCCKSPSPSLTCLRLDTENSHIGVWQKRAGPRSDSNWIMMVELENKNNDNEGDHHQGPSSSDDSEFPVVVVDVDAQEKVKPEEESTGLDEEQKMALQMIEELLNRN

SEQ ID NO: 60472 - protein, 200 aa, Glycine max
  peptide (1)..(200): Ceres Seq. ID no. 15173626
MVQSRKFRGVRQRHWGSWVSEIRHPLLKRRVWLGTFETAEEAARAYDEAAILMSGRNAKTNFPVGENQIVGNHSSNTSSSSTTTLSAVLSAKLRKCCKSPSPSLTCLRLDTENSHIGVWQKRAGPRSDSNWIMMVELENKNNDNEGDHHQGPSSSDDSEFPVVVVDVDAQEKVKPEEESTGLDEEQKMALQMIEELLNRN

SEQ ID NO: 60473 - protein, 148 aa, Glycine max
  peptide (1)..(148): Ceres Seq. ID no. 15173627
MSGRNAKTNFPVGENQIVGNHSSNTSSSSTTTLSAVLSAKLRKCCKSPSPSLTCLRLDTENSHIGVWQKRAGPRSDSNWIMMVELENKNNDNEGDHHQGPSSSDDSEFPVVVVDVDAQEKVKPEEESTGLDEEQKMALQMIEELLNRN

SEQ ID NO: 60474 - DNA, 1161 bp, Glycine max
  misc_feature (1)..(1161): Ceres Seq. ID no. 15169772
aacattaatatatttcttttcgaaaaaatgagacaaacatttgctctattactcatcctttcacttgccgtcatcttgtgccatgcagctgtccatgaagaaatccacaaaggccaggaagccgcttatcatggagcccacgtcactgaggaaaaatatcatgagactaaacatgatgtccaagaaggtgccaaagaaggaaccaacacagtcaaggaaactgcagaatacgtcaaagacagagttgaagaggtggttgaccaaactggtgacagtattaagcatacagctgacgatgttaggaacaaagtcaaaggaactacctatgacaaggtctctgatgccattaagcacaagcttgatgatgctggtaatgtaatccaagaagggttggacagagcgaaagaagccatccacagagcaacccatactactcaagaaggtgtccaagagacaggtaacactgtagatgagactgttgagaaggtcgaacatagaactgatgagaccgttatgaaggttggacacagaattgcagatgctcccggagccattagagaaggagtacatgatgcagctgaagctgtcaaagaagccatacatcctcatgaaccaacacttggagagagaatcatggaaaagatcaatgatgtgactcatagcattaagaaggcagtaggtcttgaagctgcagaatcgattggtgaaaaagttctcgagaaaggtgaacaaaaagctgcatcaaaagccgcgaaagaaggtctagagaaagtagttgaaaaggctagtggaatgactcttgagaccgttgccggcccaattggagcaaagatagctgaaaaggttgctggcaaagcagcttcaaaaggtatcaaagaagctcaagaaaagggtcttaatgatgctgttggagatcttgctgaagagataaaagaaaaagcccaacatttaggtgagaagattcagaaacacgcccatcataagcctagcgctgctgatgatgatctttaaggtagaaacagcaggttcataatatgacgcatgtttagctctatagaatgtatataatattatatataatagaatgatataagtttattaagcaaagtatttttagcacaatatgtgtttatgtcaatatattaatacaacgaatcgctc

SEQ ID NO: 60475 - protein, 336 aa, Glycine max
  peptide (1)..(336): Ceres Seq. ID no. 15169773
NINIFLFEKMRQTFALLLILSLAVILCHAAVHEEIHKGQEAAYHGAHVTEEKYHETKHDVQEGAKEGTNTVKETAEYVKDRVEEVVDQTGDSIKHTADDVRNKVKGTTYDKVSDAIKHKLDDAGNVIQEGLDRAKEAIHRATHTTQEGVQETGNTVDETVEKVEHRTDETVMKVGHRIADAPGAIREGVHDAAEAVKEAIHPHEPTLGERIMEKINDVTHSIKKAVGLEAAESIGEKVLEKGEQKAASKAAKEGLEKVVEKASGMTLETVAGPIGAKIAEKVAGKAASKGIKEAQEKGLNDAVGDLAEEIKEKAQHLGEKIQKHAHHKPSAADDDL

SEQ ID NO: 60476 - protein, 327 aa, Glycine max
  peptide (1)..(327): Ceres Seq. ID no. 15169774
MRQTFALLLILSLAVILCHAAVHEEIHKGQEAAYHGAHVTEEKYHETKHDVQEGAKEGTNTVKETAEYVKDRVEEVVDQTGDSIKHTADDVRNKVKGTTYDKVSDAIKHKLDDAGNVIQEGLDRAKEAIHRATHTTQEGVQETGNTVDETVEKVEHRTDETVMKVGHRIADAPGAIREGVHDAAEAVKEAIHPHEPTLGERIMEKINDVTHSIKKAVGLEAAESIGEKVLEKGEQKAASKAAKEGLEKVVEKASGMTLETVAGPIGAKIAEKVAGKAASKGIKEAQEKGLNDAVGDLAEEIKEKAQHLGEKIQKHAHHKPSAADDDL

SEQ ID NO: 60477 - DNA, 1655 bp, Glycine max
  misc_feature (1)..(1655): Ceres Seq. ID no. 15171520
gactagcatttgctgcattaccattcactactagttttcccacatgctttaactagcgcttttttttctttctattttcattatccaatggcttcttctattcctctttatcaaccaaccaacaccttattctccaacacccagttcaaaggttcgcgccgtggcttcttgtggcgacccagttactcgtttggctctcgtgctgaaaacagagcacgacccatcaaagcttcggttggtgcaccaccatttcccctgtttaagcctccccaagttgaagaaacatcttccgagttggagcctgcagatcctgatttctacaagattggttatgtccgaagcatgcgagcttatggagttcattttaaagaagggccagatggttttggtgtgtatgcttccaaagatgtagagcctcttcgccgagcaagggttgtaatggaaattcctcttgaattgatgttaaccataagcaagaagctcccatggatgtttttccctgatataattcccttggatcatccaatatttgatattatcaactcaacaaatccagagacagattgggacctaaggttagcatgccttctcttatacgcatttgattgcgaaggcaacttttggcaattgtatggcgacttcttaccgagtgcagatgagtgcactagcttacttctggcttcagaggaggaacttttggagctgcaggattccgatcttgcttccactattagaaaacagcaacaacgagccttagaattctgggagagtaactggcacagtgctgcaccccttaaaataaagcgtcttgcacatgatcctcaaaggttcgcttgggcagtaggtattgcacagtcacgatgtattaacatgcaaacgagaattggtgctctaaatcaagaagcaaatatgctgattccttatgctgatatgctgaaccattcatttgagccaaattgttttttccattggcgttttaaggacaggatgcttgaggttcttataaatgctggacagcgcattagaaagggagatgagatgacagttaattacatgagtacgcagaagaacgacatgttcatgcaaagatatggattttcatcacctgtgaatccttgggacgagatcaaattctcaggcaatgcacgtattcatttggattccttcgtgtcaatcttccatatatctggccttcctgaagagtattaccataataattgtctgtcaaatgctggggatagttttgttgatggagcagtcatagctgcagcacgaacactgccaagttggtcagatggggatgtgcctccaatccctagcgtggaaagaaaggctgccaaggagttgcaagatgaatgtcaaaagatgctcgcagcatttgctacaacctctaagcaagaccagaaattgctaggttccatgacagatgctacgaggacacttgaagctgcaataaagtatagattgcacaggaaattgttcatggagaaagttatccaagcattggagatgtatcaagagcaaatactgttctgatcccaatctactaacaggagaatagtcagtaagattttgtagcactgtagtgtcgtgtatacctgtaatcctgtgtcacttaaaacaatgctctttatccattaattgtaggttcttcg

SEQ ID NO: 60478 - protein, 482 aa, Glycine max
  peptide (1)..(482): Ceres Seq. ID no. 15171521
MASSIPLYQPTNTLFSNTQFKGSRRGFLWRPSYSFGSRAENRARPIKASVGAPPFPLFKPPQVEETSSELEPADPDFYKIGYVRSMRAYGVHFKEGPDGFGVYASKDVEPLRRARVVMEIPLELMLTISKKLPWMFFPDIIPLDHPIFDIINSTNPETDWDLRLACLLLYAFDCEGNFWQLYGDFLPSADECTSLLLASEEELLELQDSDLASTIRKQQQRALEFWESNWHSAAPLKIKRLAHDPQRFAWAVGIAQSRCINMQTRIGALNQEANMLIPYADMLNHSFEPNCFFHWRFKDRMLEVLINAGQRIRKGDEMTVNYMSTQKNDMFMQRYGFSSPVNPWDEIKFSGNARIHLDSFVSIFHISGLPEEYYHNNCLSNAGDSFVDGAVIAAARTLPSWSDGDVPPIPSVERKAAKELQDECQKMLAAFATTSKQDQKLLGSMTDATRTLEAAIKYRLHRKLFMEKVIQALEMYQEQILF

SEQ ID NO: 60479 - protein, 397 aa, Glycine max
  peptide (1)..(397): Ceres Seq. ID no. 15171522
MRAYGVHFKEGPDGFGVYASKDVEPLRRARVVMEIPLELMLTISKKLPWMFFPDIIPLDHPIFDIINSTNPETDWDLRLACLLLYAFDCEGNFWQLYGDFLPSADECTSLLLASEEELLELQDSDLASTIRKQQQRALEFWESNWHSAAPLKIKRLAHDPQRFAWAVGIAQSRCINMQTRIGALNQEANMLIPYADMLNHSFEPNCFFHWRFKDRMLEVLINAGQRIRKGDEMTVNYMSTQKNDMFMQRYGFSSPVNPWDEIKFSGNARIHLDSFVSIFHISGLPEEYYHNNCLSNAGDSFVDGAVIAAARTLPSWSDGDVPPIPSVERKAAKELQDECQKMLAAFATTSKQDQKLLGSMTDATRTLEAAIKYRLHRKLFMEKVIQALEMYQEQILF

SEQ ID NO: 60480 - protein, 365 aa, Glycine max
  peptide (1)..(365): Ceres Seq. ID no. 15171523
MEIPLELMLTISKKLPWMFFPDIIPLDHPIFDIINSTNPETDWDLRLACLLLYAFDCEGNFWQLYGDFLPSADECTSLLLASEEELLELQDSDLASTIRKQQQRALEFWESNWHSAAPLKIKRLAHDPQRFAWAVGIAQSRCINMQTRIGALNQEANMLIPYADMLNHSFEPNCFFHWRFKDRMLEVLINAGQRIRKGDEMTVNYMSTQKNDMFMQRYGFSSPVNPWDEIKFSGNARIHLDSFVSIFHISGLPEEYYHNNCLSNAGDSFVDGAVIAAARTLPSWSDGDVPPIPSVERKAAKELQDECQKMLAAFATTSKQDQKLLGSMTDATRTLEAAIKYRLHRKLFMEKVIQALEMYQEQILF

SEQ ID NO: 60481 - DNA, 975 bp, Glycine max
  misc_feature (1)..(975): Ceres Seq. ID no. 15172174
gagagaagatggtggcaagttctagttcagaaggaacaggagtacccctattgagagcatctgataataatggaagagatcaaaacacaagatccccccaagctgagggatggtggaacaaagtgttggacatggaagaggccaagcaccaactcttgttttcactgccaatgattcttaccaacttgttctatcacttgatcattttggtttctgtcatgcttgttggtcaccttggtgagcttcagcttgctggtgctactcttgcaaattcatggttcagtgtcactggcgtggcagttatggttggtttgagtggggcactggaaacactctgcggacaaggatttggtgcaaaggaataccaaatgctgggaatttacctacaagcctcttgcatcatatctcttattttttcaatcattatatccattatttggttctatacagaacccatcctagtgttgcttcatcaatctcccgacattgcaagaacagctgcactttatatgaagtttcttatcccgggagtgtttgcttatagcttcttgcaaaacatcttgaggtttctccagacacaatctgtagtaattccattggttgtactctctgctcttccaatgctggttcatattggtgttgcatatggcttggttcagtggtcaggtctgagttttacaggtgcaccagttgctgcttctatttcactatggatatcattgctattattggccttgtatgtaatgtatgctaagaagttcaagcagacatggaaaggattttcaacgcattcatttcgttacgtatttacaaacatgagactagctctgccctctgctgcaatggtatggtatgaattactaataacctttcacttagctagcccttttgattgttcatcttgattggaaaaacaagccaacacaataacaaactcaataatagagtaatagacagtggaaataaattctccca

SEQ ID NO: 60482 - protein, 300 aa, Glycine max
  peptide (1)..(300): Ceres Seq. ID no. 15172175
EKMVASSSSEGTGVPLLRASDNNGRDQNTRSPQAEGWWNKVLDMEEAKHQLLFSLPMILTNLFYHLIILVSVMLVGHLGELQLAGATLANSWFSVTGVAVMVGLSGALETLCGQGFGAKEYQMLGIYLQASCIISLIFSIIISIIWFYTEPILVLLHQSPDIARTAALYMKFLIPGVFAYSFLQNILRFLQTQSVVIPLVVLSALPMLVHIGVAYGLVQWSGLSFTGAPVAASISLWISLLLLALYVMYAKKFKQTWKGFSTHSFRYVFTNMRLALPSAAMVWYELLITFHLASPFDCSS

SEQ ID NO: 60483 - protein, 298 aa, Glycine max
  peptide (1)..(298): Ceres Seq. ID no. 15172176
MVASSSSEGTGVPLLRASDNNGRDQNTRSPQAEGWWNKVLDMEEAKHQLLFSLPMILTNLFYHLIILVSVMLVGHLGELQLAGATLANSWFSVTGVAVMVGLSGALETLCGQGFGAKEYQMLGIYLQASCIISLIFSIIISIIWFYTEPILVLLHQSPDIARTAALYMKFLIPGVFAYSFLQNILRFLQTQSVVIPLVVLSALPMLVHIGVAYGLVQWSGLSFTGAPVAASISLWISLLLLALYVMYAKKFKQTWKGFSTHSFRYVFTNMRLALPSAAMVWYELLITFHLASPFDCSS

SEQ ID NO: 60484 - protein, 257 aa, Glycine max
  peptide (1)..(257): Ceres Seq. ID no. 15172177
MEEAKHQLLFSLPMILTNLFYHLIILVSVMLVGHLGELQLAGATLANSWFSVTGVAVMVGLSGALETLCGQGFGAKEYQMLGIYLQASCIISLIFSIIISIIWFYTEPILVLLHQSPDIARTAALYMKFLIPGVFAYSFLQNILRFLQTQSVVIPLVVLSALPMLVHIGVAYGLVQWSGLSFTGAPVAASISLWISLLLLALYVMYAKKFKQTWKGFSTHSFRYVFTNMRLALPSAAMVWYELLITFHLASPFDCSS

SEQ ID NO: 60485 - DNA, 1189 bp, Glycine max
  misc_feature (1)..(1189): Ceres Seq. ID no. 14308600
gagcagccagtgtgaaccagtctcacctcattgattcattctccgtcagaaatacctttcctttgcgaaagagaagagatctgaaaccctaaccctaaccctaaccagaggtaatggattcagtgcctcgaagaagcagaggaggaggcgttttggaaaacctcgacaaggtcctaatgcgtcgcaactgagtctacgtcaccttcgtcatcgcaggcgccttcctcggagaacgggctgtggattacggagctcacaagatcggggagcacaataacgttgggtccaaatggcacctagatggaaaggaaaagatgcaaaagctaaaaaggatgcacaagctgaagcgctcaaggaacccatgtcaaagattgtatctcaacttcagtcttctctagttcaatcaaatacttgtggatttctctctggtagtagtgtacacttagcagtgggagcagaacaacttcatttgctcgataaagcatgctttggctcacctgtgagaacagttgaaaaggacaaacctcggtttcaattaagctttgaggaggcattctacctatgctattccttgaaatgccttaagattaataatgacagtgatgatactagtccccaaaacagtgaagagctgtggcattacatgaagtcaaagaaagaaacattcccttgtttctacaaggcttattcccacctgagaatgaaaaactgggtagtgaggtcaggagctcagtatggtgcagatttcgttgtctattgtcaccatccagctcgggtccattccgagtatggtgtgcttgttttatcagatggagaagataaagatctaaatggaaggttgagagtatggtctgatgttcattgcacaactcgacttcttggaggtgttgcaaaaatcttattggttttgtatgtcaatagaaatggtagcagcaatgagtctccattatgtttggcaaactacaccattgaagagcacacaatcaccagatggaatccagaacagtgccgcgaaaagatggtaattcatgctaattctgataatggaactgggtaaatacttcatcatatggacgcaacaaaatatatcaaacatgaaaaaaaaagtattttttttattgtctttgtccaaagatattagttattcaagcataacaatattcttaaagatttgattccttttccgttt

SEQ ID NO: 60486 - protein, 255 aa, Glycine max
  peptide (1)..(255): Ceres Seq. ID no. 14308601
MAPRWKGKDAKAKKDAQAEALKEPMSKIVSQLQSSLVQSNTCGFLSGSSVHLAVGAEQLHLLDKACFGSPVRTVEKDKPRFQLSFEEAFYLCYSLKCLKINNDSDDTSPQNSEELWHYMKSKKETFPCFYKAYSHLRMKNWVVRSGAQYGADFVVYCHHPARVHSEYGVLVLSDGEDKDLNGRLRVWSDVHCTTRLLGGVAKILLVLYVNRNGSSNESPLCLANYTIEEHTITRWNPEQCREKMVIHANSDNGTG

SEQ ID NO: 60487 - protein, 231 aa, Glycine max
  peptide (1)..(231): Ceres Seq. ID no. 14308602
MSKIVSQLQSSLVQSNTCGFLSGSSVHLAVGAEQLHLLDKACFGSPVRTVEKDKPRFQLSFEEAFYLCYSLKCLKINNDSDDTSPQNSEELWHYMKSKKETFPCFYKAYSHLRMKNWVVRSGAQYGADFVVYCHHPARVHSEYGVLVLSDGEDKDLNGRLRVWSDVHCTTRLLGGVAKILLVLYVNRNGSSNESPLCLANYTIEEHTITRWNPEQCREKMVIHANSDNGTG

SEQ ID NO: 60488 - protein, 137 aa, Glycine max
  peptide (1)..(137): Ceres Seq. ID no. 14308603
MKSKKETFPCFYKAYSHLRMKNWVVRSGAQYGADFVVYCHHPARVHSEYGVLVLSDGEDKDLNGRLRVWSDVHCTTRLLGGVAKILLVLYVNRNGSSNESPLCLANYTIEEHTITRWNPEQCREKMVIHANSDNGTG

SEQ ID NO: 60489 - DNA, 1060 bp, Glycine max
  misc_feature (1)..(1060): Ceres Seq. ID no. 14308640
attttgctgtggaagaagaataagaccaaggttttaattagagcctcgtttgtgcaagtgaaaaataggatcacattgacctattcttttttcaagctcttttaattgtcttgggaagaaaatgaacccagaaatgaatggggttgaggctgagaagaggcaagagaatggacatgagaaagtggattatgatgtgcaagagaaaatagactatgtttttaaggtggtggtgataggggactcagcagttggaaagactcaaatactctcaaggtttgcaaagaatgagttctgctttgactcaaagtccaccattggggttgaattccagactaggactgtcactattaatgccaaagtcatcaaagctcagatctgggacactgctggccaggaaaggtacagggctgtaacaagtgcatactacagaggtgcattaggggcaatgcttgtctacgacataacgaagaggcaatcgtttgatcatgtagcgagatgggtggaggagctgcgtgcgcacgcagatagctccattgtgatcatgttggttgggaacaaagctgatcttgtggaccagagaatggtaccaactgaggatgcagtggagtttgctgaggaccaaggcctcttcttctccgagacttcagctctcagtggtgacaatgtggagagtgcatttctcaaattgctagaagagatcaatagggtagtgtccaaaaaggctttggaatgtggtttagggaaggagaatggtgacaccaatgttgcctcactcaaaggaacaaaggttgatataatcttaggtcctgaattggaaattagtgagatgaagaaattgtcttcgtgctcttgttaatattggtagtgagatttaagtttgtgtattttgattttgagtttgggaaaaagagcagagtgagtgaaaagtatatatacatgagtatccttaacggtgagtgtggaaggctaagttgattttatttgctattgctttccatgctgagttgaagagtaatagttatcctgtttcgttatgattatgaattattacagttatggc

SEQ ID NO: 60490 - protein, 244 aa, Glycine max
  peptide (1)..(244): Ceres Seq. ID no. 14308641
MNPEMNGVEAEKRQENGHEKVDYDVQEKIDYVFKVVVIGDSAVGKTQILSRFAKNEFCFDSKSTIGVEFQTRTVTINAKVIKAQIWDTAGQERYRAVTSAYYRGALGAMLVYDITKRQSFDHVARWVEELRAHADSSIVIMLVGNKADLVDQRMVPTEDAVEFAEDQGLFFSETSALSGDNVESAFLKLLEEINRVVSKKALECGLGKENGDTNVASLKGTKVDIILGPELEISEMKKLSSCSC

SEQ ID NO: 60491 - protein, 240 aa, Glycine max
  peptide (1)..(240): Ceres Seq. ID no. 14308642
MNGVEAEKRQENGHEKVDYDVQEKIDYVFKVVVIGDSAVGKTQILSRFAKNEFCFDSKSTIGVEFQTRTVTINAKVIKAQIWDTAGQERYRAVTSAYYRGALGAMLVYDITKRQSFDHVARWVEELRAHADSSIVIMLVGNKADLVDQRMVPTEDAVEFAEDQGLFFSETSALSGDNVESAFLKLLEEINRVVSKKALECGLGKENGDTNVASLKGTKVDIILGPELEISEMKKLSSCSC

SEQ ID NO: 60492 - protein, 136 aa, Glycine max
  peptide (1)..(136): Ceres Seq. ID no. 14308643
MLVYDITKRQSFDHVARWVEELRAHADSSIVIMLVGNKADLVDQRMVPTEDAVEFAEDQGLFFSETSALSGDNVESAFLKLLEEINRVVSKKALECGLGKENGDTNVASLKGTKVDIILGPELEISEMKKLSSCSC

SEQ ID NO: 60493 - DNA, 1568 bp, Glycine max
  misc_feature (1)..(1568): Ceres Seq. ID no. 14308243
agcactagcactgcaattcactgtaatgggtcaagtgttacaagatcagagaggtttgtggactcagatacagagacctttttggacacaatgcagaggagttggtccatgttgccatggaatagaagcttcgagggatggactttcaaaagaacctcctcaagtaaacgagagcctttgacctcacattcaactcattccatgggaccatactttgatcacaataaatgcactgcaagtggctgggaaaatagggaactttggagtagagatgggaaaacaaagctcaaaaccaatgtgttctttgcttcctttgatcaaagaagcaaaaaagcatgtggtgagagtgcatgtacagcactagcagtgtgcatagctcactggcttcattccaaccacaacatgccaacaagggctcaatttgatagcctcatcaaaaagggttcctctaaatggagaaagctgagtcatagtgatcactacctaaagcttttccctgataagcattttgatttagagacaatcttggaagccaacattaggccactagttgttatccctcaaaattcctacacaggatttttctcccctgagaagtttaaatgcttagaaggagccatgtcctttgatgatatttgggatgagataactagaaatgatggtgtggttgatcatgagccaagaatttacatagtgagttggaatgaccatttctttgttctgaaagtggaagttgatgcttgttatgtgattgacactttgggggagaggctttttgagggatgcaaaaaggctttcatgttgaagtttgatggttcaagtttgatgcatgcaaagggaagtaagaaaggaagaggtgagatagtttgcaaaggaaaagagtgttgtaaagagttcatcaaacgctttcttgctgccataccacttaggcaactagaagaggaagagcaaaataaagggactgtctataatccttattttcacaggaaattgcagattgacttccattatagtttgttatcatccttgtcttcagtttcttcaattggtgaacctttacaacctaattatatagcaagacattagttatataactcaattgctaaccttgtgagtcttgagcaattgttacaattagaaaaccaaaaaacccggcttcttgtctgaagacaaaatgttcaggtgagataagtcctaagcactcattaggataaggtaagcctcaaagcttgaagagtgtttatagaaatacttatagataacctatcaacaagttccttgcattggtaataggcttcgaacttaaattcttgtaagatgagtcttattcttaaaaactagaccaactttcgttggcaaaaactcagcttcttttctagcagagtttgctggcagcttctttttggtgacaactactactaaccctttacaaagtgtgattttactggattgagcaacccaaatatccattagcatcactcagagaataaaacctttgaggctgattcttgttaacgttgctgtatttagtggagtggatctgaatgaaaaagaaaagaaattggtct

SEQ ID NO: 60494 - protein, 361 aa, Glycine max
  peptide (1)..(361): Ceres Seq. ID no. 14308244
STSTAIHCNGSSVTRSERFVDSDTETFLDTMQRSWSMLPWNRSFEGWTFKRTSSSKREPLTSHSTHSMGPYFDHNKCTASGWENRELWSRDGKTKLKTNVFFASFDQRSKKACGESACTALAVCIAHWLHSNHNMPTRAQFDSLIKKGSSKWRKLSHSDHYLKLFPDKHFDLETILEANIRPLVVIPQNSYTGFFSPEKFKCLEGAMSFDDIWDEITRNDGVVDHEPRIYIVSWNDHFFVLKVEVDACYVIDTLGERLFEGCKKAFMLKFDGSSLMHAKGSKKGRGEIVCKGKECCKEFIKRFLAAIPLRQLEEEEQNKGTVYNPYFHRKLQIDFHYSLLSSLSSVSSIGEPLQPNYIARH

SEQ ID NO: 60495 - protein, 331 aa, Glycine max
  peptide (1)..(331): Ceres Seq. ID no. 14308245
MQRSWSMLPWNRSFEGWTFKRTSSSKREPLTSHSTHSMGPYFDHNKCTASGWENRELWSRDGKTKLKTNVFFASFDQRSKKACGESACTALAVCIAHWLHSNHNMPTRAQFDSLIKKGSSKWRKLSHSDHYLKLFPDKHFDLETILEANIRPLVVIPQNSYTGFFSPEKFKCLEGAMSFDDIWDEITRNDGVVDHEPRIYIVSWNDHFFVLKVEVDACYVIDTLGERLFEGCKKAFMLKFDGSSLMHAKGSKKGRGEIVCKGKECCKEFIKRFLAAIPLRQLEEEEQNKGTVYNPYFHRKLQIDFHYSLLSSLSSVSSIGEPLQPNYIARH

SEQ ID NO: 60496 - protein, 325 aa, Glycine max
  peptide (1)..(325): Ceres Seq. ID no. 14308246
MLPWNRSFEGWTFKRTSSSKREPLTSHSTHSMGPYFDHNKCTASGWENRELWSRDGKTKLKTNVFFASFDQRSKKACGESACTALAVCIAHWLHSNHNMPTRAQFDSLIKKGSSKWRKLSHSDHYLKLFPDKHFDLETILEANIRPLVVIPQNSYTGFFSPEKFKCLEGAMSFDDIWDEITRNDGVVDHEPRIYIVSWNDHFFVLKVEVDACYVIDTLGERLFEGCKKAFMLKFDGSSLMHAKGSKKGRGEIVCKGKECCKEFIKRFLAAIPLRQLEEEEQNKGTVYNPYFHRKLQIDFHYSLLSSLSSVSSIGEPLQPNYIARH

SEQ ID NO: 60497 - DNA, 1159 bp, Glycine max
  misc_feature (1)..(1159): Ceres Seq. ID no. 12392187
  misc_feature (1)..(1159): Ortholog of  Ceres SEQ ID NO 13661642 as cited in SEQ ID NO 61598
atatatatccctcactcactctatctcttttctccagcagcaccaaaaccacccaacactcgaactcaatatccattattaccaaaaaaaaagaaaaaaggatatcaaacacccttttcatcattaaaactctcagttccctctttccctatcaaaaccctttcccacaacactactcactccagtacaagaaaccctttttcaatttggtttcaacagcacacacacacacacatatatatatatatagcatgtttaccttgaatcattcttctgatttgtaccatgtttcccctgagctctcatcttccttggacacatcctcgccggcttcggagggctctcgtggcgtggcattttccgacgaggaggtgcggctggcggtgaggcacccgaagaagcgggcaggtcggaagaagttccgggagacgcgccacccggtgtaccggggggtgaggaggaggaactcggataagtgggtgtgtgaggtgagggagcccaacaagaagaccaggatttggctggggactttccccacgccggagatggcggctcgggcgcacgacgtggcggcaatggccctgaggggccggtatgcctgtctaaactttgctgactcggcctggcggttacctgttcccgccacggccgaggcaaaggatatacagaaggcagcagcagaagctgcccaggctttcagaccagatcaaaccttaaaaaatgctaatacaaggcaggagtgtgtggaggcggtggcggtggcggtggcggagacaacaacggcgacggcacaaggggtgttttatatggaggaagaagagcaggtgttggatatgcctgagttgcttaggaatatggtgctcatgtccccaacacattgcttagggtatgagtatgaagatgctgacttggatgcccaagatgctgaggtgtcactatggaatttctcaatttaataatgtgttttggtttggtttttgttgttagttttttggagtgaacagtgtctgtactggttttttattagtagtacggatactagttataggtggaaagattgcgagggaccaaaaggaattttcttttgaacccttttttgtcaatgtaatcaatatcacgtatatcatgaagtgaatcccttcaagtttatgtataaatt

SEQ ID NO: 60498 - protein, 317 aa, Glycine max
  peptide (1)..(317): Ceres Seq. ID no. 12392188
IYPSLTLSLFSSSTKTTQHSNSISIITKKKEKRISNTLFIIKTLSSLFPYQNPFPQHYSLQYKKPFFNLVSTAHTHTHIYIYSMFTLNHSSDLYHVSPELSSSLDTSSPASEGSRGVAFSDEEVRLAVRHPKKRAGRKKFRETRHPVYRGVRRRNSDKWVCEVREPNKKTRIWLGTFPTPEMAARAHDVAAMALRGRYACLNFADSAWRLPVPATAEAKDIQKAAAEAAQAFRPDQTLKNANTRQECVEAVAVAVAETTTATAQGVFYMEEEEQVLDMPELLRNMVLMSPTHCLGYEYEDADLDAQDAEVSLWNFSI

SEQ ID NO: 60499 - protein, 234 aa, Glycine max
  peptide (1)..(234): Ceres Seq. ID no. 12392189
MFTLNHSSDLYHVSPELSSSLDTSSPASEGSRGVAFSDEEVRLAVRHPKKRAGRKKFRETRHPVYRGVRRRNSDKWVCEVREPNKKTRIWLGTFPTPEMAARAHDVAAMALRGRYACLNFADSAWRLPVPATAEAKDIQKAAAEAAQAFRPDQTLKNANTRQECVEAVAVAVAETTTATAQGVFYMEEEEQVLDMPELLRNMVLMSPTHCLGYEYEDADLDAQDAEVSLWNFSI

SEQ ID NO: 60500 - DNA, 1050 bp, Glycine max
  misc_feature (1)..(1050): Ceres Seq. ID no. 12389450
  misc_feature (1)..(1050): Ortholog of  Ceres SEQ ID NO 13661642 as cited in SEQ ID NO 61598
aactctcactccacaactcaactaagcgcaaaccaaaccaacacaaacaaaaacatctctcagcaaatgaatattctcggacaatcactccaccaatcaaacaacggcagctactcttgttcgtcgccggagactgcaaactcctctaaccttccgaccactccgaaagccgttcactccgacgaggaagtgaacacattagcatcggctcatcctaagaaacgtgcggggcgtcgaatttttaaggagacaaggcatcccgtgtacagaggagtgcggcggaggaacaacaacaagtgggtctgcgaggttcgtgttcccaacgacaagtccacgaggatttggctcggaacgtatccaacgcctgagatggccgcacgtgcgcacgacgtcgccgcgctctcgcttcgaggtaagtcggcgtgtctcaacttcgccgactcgggcgtggcggttgcccttgccggcgtcgaccaatgcgaaggagattcggcgcgtggcggcggcggctgctgtagcgattgcggcggaagacagccgcggcaagcagttgcggactaatgcgattgatgccgttgctgattgcgaagttagcagcagtgacataggcgtcgatgaaaattgcaataacaataaagcttcgcagaggttttgtgatttggatgaaattacaatgccagatgcaccggtttttgaggacatgcatgagtggcttcagactatggctgctgaaccattaagatcacctacttttgtaacatatgttaatgttagggatgtctggaactttgtggaggatgatgctgaggtttccttgtggagcttcaccgtctgaagagcatgcaatttaggctttaggtgtatttagtgtgtttagctttctttctcttcttttggtttttgtacataattaggaacggaggactacgaaaatgtacaaagaccgaaacgatataaggagatagctatctaggtaggaacataaaagtgtgaaacattgtaacttttctcattcggttgtttttgtaaaataaaaattctattttcatc

SEQ ID NO: 60501 - protein, 186 aa, Glycine max
  peptide (1)..(186): Ceres Seq. ID no. 12389451
NSHSTTQLSANQTNTNKNISQQMNILGQSLHQSNNGSYSCSSPETANSSNLPTTPKAVHSDEEVNTLASAHPKKRAGRRIFKETRHPVYRGVRRRNNNKWVCEVRVPNDKSTRIWLGTYPTPEMAARAHDVAALSLRGKSACLNFADSGVAVALAGVDQCEGDSARGGGGCCSDCGGRQPRQAVAD

SEQ ID NO: 60502 - protein, 164 aa, Glycine max
  peptide (1)..(164): Ceres Seq. ID no. 12389452
MNILGQSLHQSNNGSYSCSSPETANSSNLPTTPKAVHSDEEVNTLASAHPKKRAGRRIFKETRHPVYRGVRRRNNNKWVCEVRVPNDKSTRIWLGTYPTPEMAARAHDVAALSLRGKSACLNFADSGVAVALAGVDQCEGDSARGGGGCCSDCGGRQPRQAVAD

SEQ ID NO: 60503 - DNA, 680 bp, Glycine max
  misc_feature (1)..(680): Ceres Seq. ID no. 12398609
  misc_feature (1)..(680): Ortholog of  Ceres SEQ ID NO 13594809 as cited in SEQ ID NO 51847
  misc_feature (1)..(680): Ortholog of  Ceres SEQ ID NO 12617639 as cited in SEQ ID NO 65219
  misc_feature (1)..(680): Ortholog of  Ceres SEQ ID NO 15173998 as cited in SEQ ID NO 0
  misc_feature (1)..(680): Ortholog of  Ceres SEQ ID NO 15178333 as cited in SEQ ID NO 0
aagtgtgagtgatatttgagcttaaaccctagccgctcttctcttcattcttcactttggaaacaatcataatggcgttctgtaataaggttggaaatgtcttgaggcagggtgctgctcgcagcacacatgcccctgttgcgtccatgcttaattacatccgctgcatgtcttcaagcaagcttttcattggaggcctttcatatggagttgatgaccagtctcttaaggatgcattttctggctttggagatgtggttgatgcaaaagttataactgatagagacagtggaagatcaaggggatttggatttgtcaacttctccaatgatgagtctgcaagttcggcactctctgcaatggacgggaaggatctaaatgggcgaagcattcgggtatcctatgcaaatgataaaccatctgcacctcgacctggtggcggtggcggttatcgtggcggggattatgatggtgattttgcttctcgtagtggtggttggtgatcaaatttttgtttgttgcgccttctgcttagttgagattttatgtttatgcctagcacttcgattaaggtggtcactcaagtggtaaagtagtaattattggaattttatgtttttccccgttacatttnttggttatgttattctgtgattttaatggagcatttgtttccatcc

SEQ ID NO: 60504 - protein, 143 aa, Glycine max
  peptide (1)..(143): Ceres Seq. ID no. 12398610
MAFCNKVGNVLRQGAARSTHAPVASMLNYIRCMSSSKLFIGGLSYGVDDQSLKDAFSGFGDVVDAKVITDRDSGRSRGFGFVNFSNDESASSALSAMDGKDLNGRSIRVSYANDKPSAPRPGGGGGYRGGDYDGDFASRSGGW

SEQ ID NO: 60505 - protein, 118 aa, Glycine max
  peptide (1)..(118): Ceres Seq. ID no. 12398611
MLNYIRCMSSSKLFIGGLSYGVDDQSLKDAFSGFGDVVDAKVITDRDSGRSRGFGFVNFSNDESASSALSAMDGKDLNGRSIRVSYANDKPSAPRPGGGGGYRGGDYDGDFASRSGGW

SEQ ID NO: 60506 - protein, 111 aa, Glycine max
  peptide (1)..(111): Ceres Seq. ID no. 12398612
MSSSKLFIGGLSYGVDDQSLKDAFSGFGDVVDAKVITDRDSGRSRGFGFVNFSNDESASSALSAMDGKDLNGRSIRVSYANDKPSAPRPGGGGGYRGGDYDGDFASRSGGW

SEQ ID NO: 60507 - DNA, 594 bp, Glycine max
  misc_feature (1)..(594): Ceres Seq. ID no. 3265003
  misc_feature (1)..(594): Ortholog of  Ceres SEQ ID NO 15170337 as cited in SEQ ID NO 57970
tcacaaataaataaaaaaaattgttttcgtgtggaaacaaaaaaacaattcaaaaacaaacatatgatggtgaagccgagtagcgaaaagccagaggagcatagggattccaagtactacaaaggggtccgaaagagaaaatggggcaaatgggtatccgaaataagactacccaacagccgtcagaggatttggttgggatccttcgacacccccgagaaggccgcgcgtgccttcgacgccgcaatgttctgcttacgtggccgcaacgccaagttcaatttccccgacaacccacccgacatcgccggcggggaatccatgacgccgtcacagattcaggtcgccgccgcacaattcgccaacgctgggccccacgagggacattcgggtcgacccgaacattctcccatgcaatctctatcgccttctgtttcagaagggaccgttctaacggacagtgacgtcaccacacttaacggttcgctaacggatttgttcactcccgttgggtcgagtggttacgcatccgattacgggattttccccggtgttgatgatttcagtggcggtttttatgtgccggaaatgctg

SEQ ID NO: 60508 - protein, 198 aa, Glycine max
  peptide (1)..(198): Ceres Seq. ID no. 3265004
SQINKKNCFRVETKKQFKNKHMMVKPSSEKPEEHRDSKYYKGVRKRKWGKWVSEIRLPNSRQRIWLGSFDTPEKAARAFDAAMFCLRGRNAKFNFPDNPPDIAGGESMTPSQIQVAAAQFANAGPHEGHSGRPEHSPMQSLSPSVSEGTVLTDSDVTTLNGSLTDLFTPVGSSGYASDYGIFPGVDDFSGGFYVPEML

SEQ ID NO: 60509 - protein, 177 aa, Glycine max
  peptide (1)..(177): Ceres Seq. ID no. 3265005
MMVKPSSEKPEEHRDSKYYKGVRKRKWGKWVSEIRLPNSRQRIWLGSFDTPEKAARAFDAAMFCLRGRNAKFNFPDNPPDIAGGESMTPSQIQVAAAQFANAGPHEGHSGRPEHSPMQSLSPSVSEGTVLTDSDVTTLNGSLTDLFTPVGSSGYASDYGIFPGVDDFSGGFYVPEML

SEQ ID NO: 60510 - protein, 176 aa, Glycine max
  peptide (1)..(176): Ceres Seq. ID no. 3265006
MVKPSSEKPEEHRDSKYYKGVRKRKWGKWVSEIRLPNSRQRIWLGSFDTPEKAARAFDAAMFCLRGRNAKFNFPDNPPDIAGGESMTPSQIQVAAAQFANAGPHEGHSGRPEHSPMQSLSPSVSEGTVLTDSDVTTLNGSLTDLFTPVGSSGYASDYGIFPGVDDFSGGFYVPEML

SEQ ID NO: 60511 - DNA, 1334 bp, Glycine max
  misc_feature (1)..(1334): Ceres Seq. ID no. 12430842
  misc_feature (1)..(1334): Ortholog of  Ceres SEQ ID NO 15172560 as cited in SEQ ID NO 57325
  misc_feature (1)..(1334): Ortholog of  Ceres SEQ ID NO 13655716 as cited in SEQ ID NO 68965
tcttctaaccagtatcacctacacggtgtgtgtgtcccttcatcctggaaattagagccacaaacataacacattccgctttgactttggaggcaggtttttgtgctttgtctggttcccaatcaccgtgatatcatggaatccccacaatctgttgtgtcaccattcaagaggtctgtcttgggtgatgcagagaagtataggtctgatgttctgtctaaggacattgaagtcaatggaaaggaaggtgccgtgtgtaatgtggaggaattcattggtgttgttgatgtttacattcatcaggccagggacattcataacatctgcatataccacaagcaagatgtttatgctaagatttgtttgactagtaatcctgagaatactgtctctaccaagaccatcaatggaggaggaaggaaccccgtgtttaatgagaatcttagtctaagcgttaggactgttgattctgtagtcaaatgtgaaatttggatgctgagcagggtgaagaattatcttgaagatcagttgcttggttttgctttggtgcctttgtctgaagtactggtgaagaaggatggcaaactagagaaagagttctctctttcttcaactgatctattccattctccagccggttatgttcaattgtctcttgcttacactggtgcttcgcctgatgttatggcaatttcttcaatgcctaccaccgagaaggactccgaatcatgcgagtcactggtcagagatttggacaaaatcgaattcccggatccaaaaattgtaaatgaagaccacttgatggtttcggaatacttcggcattccatgtgaggagagccagtgttctgatagcttgaccactactgatactgaaaatcttagttctgaagcaggtgttcagcttgtggagagcttctcagcatgcagtgttagcagtgtgtcaacaaatggggtttcatctccttcagtggctgcaagctcagactcgtctcccaatgaggaaaccaaagagaaaaatgtggatgtcaaagatggtgagactgattcctcgttccctaaacctcttgtgactgttaacatcgagccggagccgaatgtggtgcagcaggattttgtagacatgtacatgaaaagcatgcagcaattcaccgagtcattggcaaaaatgaagcttcctgtggactttgaaagtggaccaactagttcaggaaactctagctctgaacacaagctacagacaccaaagagcactaactcccgtgtgttttatggcagcagggctttcttctgaactttttgatcaagggaatactttcaggtgacttagatttt

SEQ ID NO: 60512 - protein, 385 aa, Glycine max
  peptide (1)..(385): Ceres Seq. ID no. 12430843
MESPQSVVSPFKRSVLGDAEKYRSDVLSKDIEVNGKEGAVCNVEEFIGVVDVYIHQARDIHNICIYHKQDVYAKICLTSNPENTVSTKTINGGGRNPVFNENLSLSVRTVDSVVKCEIWMLSRVKNYLEDQLLGFALVPLSEVLVKKDGKLEKEFSLSSTDLFHSPAGYVQLSLAYTGASPDVMAISSMPTTEKDSESCESLVRDLDKIEFPDPKIVNEDHLMVSEYFGIPCEESQCSDSLTTTDTENLSSEAGVQLVESFSACSVSSVSTNGVSSPSVAASSDSSPNEETKEKNVDVKDGETDSSFPKPLVTVNIEPEPNVVQQDFVDMYMKSMQQFTESLAKMKLPVDFESGPTSSGNSSSEHKLQTPKSTNSRVFYGSRAFF

SEQ ID NO: 60513 - protein, 266 aa, Glycine max
  peptide (1)..(266): Ceres Seq. ID no. 12430844
MLSRVKNYLEDQLLGFALVPLSEVLVKKDGKLEKEFSLSSTDLFHSPAGYVQLSLAYTGASPDVMAISSMPTTEKDSESCESLVRDLDKIEFPDPKIVNEDHLMVSEYFGIPCEESQCSDSLTTTDTENLSSEAGVQLVESFSACSVSSVSTNGVSSPSVAASSDSSPNEETKEKNVDVKDGETDSSFPKPLVTVNIEPEPNVVQQDFVDMYMKSMQQFTESLAKMKLPVDFESGPTSSGNSSSEHKLQTPKSTNSRVFYGSRAFF

SEQ ID NO: 60514 - protein, 202 aa, Glycine max
  peptide (1)..(202): Ceres Seq. ID no. 12430845
MAISSMPTTEKDSESCESLVRDLDKIEFPDPKIVNEDHLMVSEYFGIPCEESQCSDSLTTTDTENLSSEAGVQLVESFSACSVSSVSTNGVSSPSVAASSDSSPNEETKEKNVDVKDGETDSSFPKPLVTVNIEPEPNVVQQDFVDMYMKSMQQFTESLAKMKLPVDFESGPTSSGNSSSEHKLQTPKSTNSRVFYGSRAFF

SEQ ID NO: 60515 - DNA, 837 bp, Glycine max
  misc_feature (1)..(837): Ceres Seq. ID no. 12451835
  misc_feature (1)..(837): Ortholog of  Ceres SEQ ID NO 13584275 as cited in SEQ ID NO 63905
  misc_feature (1)..(837): Ortholog of  Ceres SEQ ID NO 13597019 as cited in SEQ ID NO 64303
gaaagaaaagaactaagaagctgaaaaacaagagagagaaaaagaatagcacactcaaccatagttatctagaaccaaatcatgtctcacatagccgtcgagaggaacaggagaagacagatgaatgaacatctcaaagttttaagatctttgaccccatgtttctatatcaaaaggggagatcaagcatctataatagggggtgttatagaattcatcaaggagctacaccaagttcttcaagctttggagtcccagaaaagaagaaagagtttgagccctagccctggcccgagcccacgaacacttcagccaatgtttcatcaacttgatagcccctccatgattgggaccaattctttcaaggaactaggagcaagctgcaactctcctgttgcggatgttgaagtgaaaatctcgggttcatatgtgatcttgaaagtcatttgccacagaattccaggtcaagttgcaaagatcataactgttttggagagtctttcgtttgaagttcttcatctgaatatcagcagcatggaggagactgtcctttaccaatttgttgtcaagatagagctgggatgccaactaagtctggaggaactagcaatggaagtgcaacaaagcttctgcttagatgctataattgcgctgtgaagatgtagtatttctaaagagacccaatttcgaatcgtttgttaataaaagaatggcatgtgatagacatgcataaaaactatttcttcagtaattacttgctacaaactaggcttattatatcattactgttgtcataaacttgatgacaaggaaaatatgctgttgcttaatatttgg

SEQ ID NO: 60516 - protein, 191 aa, Glycine max
  peptide (1)..(191): Ceres Seq. ID no. 12451836
MSHIAVERNRRRQMNEHLKVLRSLTPCFYIKRGDQASIIGGVIEFIKELHQVLQALESQKRRKSLSPSPGPSPRTLQPMFHQLDSPSMIGTNSFKELGASCNSPVADVEVKISGSYVILKVICHRIPGQVAKIITVLESLSFEVLHLNISSMEETVLYQFVVKIELGCQLSLEELAMEVQQSFCLDAIIAL

SEQ ID NO: 60517 - protein, 178 aa, Glycine max
  peptide (1)..(178): Ceres Seq. ID no. 12451837
MNEHLKVLRSLTPCFYIKRGDQASIIGGVIEFIKELHQVLQALESQKRRKSLSPSPGPSPRTLQPMFHQLDSPSMIGTNSFKELGASCNSPVADVEVKISGSYVILKVICHRIPGQVAKIITVLESLSFEVLHLNISSMEETVLYQFVVKIELGCQLSLEELAMEVQQSFCLDAIIAL

SEQ ID NO: 60518 - protein, 113 aa, Glycine max
  peptide (1)..(113): Ceres Seq. ID no. 12451838
MFHQLDSPSMIGTNSFKELGASCNSPVADVEVKISGSYVILKVICHRIPGQVAKIITVLESLSFEVLHLNISSMEETVLYQFVVKIELGCQLSLEELAMEVQQSFCLDAIIAL

SEQ ID NO: 60519 - DNA, 1133 bp, Glycine max
  misc_feature (1)..(1133): Ceres Seq. ID no. 12431307
  misc_feature (1)..(1133): Ortholog of  Ceres SEQ ID NO 15225507 as cited in SEQ ID NO 55551
  misc_feature (1)..(1133): Ortholog of  Ceres SEQ ID NO 15225677 as cited in SEQ ID NO 0
aaagaaacaattaaaataataaacctaaaagccctaacatatctatccccaacagtaaaagaaagcagattcatactctctccctctctctttagtctttaccaccacctggcctgcttttaaaacttgttcttcctctctcacatgaagacactagtcatggacacaacctcatcaacccctcaagactcatcatcctccaagaggcacttccactggacgaacaaggttggaaatgaagacccccaactcgccacctcagaaacgatgtcaaaaatcatagaagaagaagacacaaacacaaaggaaaaagaacaagaagaagatgacaaggctgttccacttccaggccctgccacaaagagaaagattcaggcagtggcaatctcaaggctccgatctgttctgactgtgttcagcaaaaaccaccgttccaacctccccttcggcctcggctccagagtcgttggcaccctcttcggctaccgccgcggccacgtgcatttcgccttccagagggaccccacttcgcaacccgccttcctcatcgagctcgcgaccccaatcagcggacttgtccgcgaaatggcgtctgggctggtgagaattgctttggagtgtgacaaggacaaagactcagaggagaagaagacgacgaagaagaacaagaccctgaggctgcttcaggagtccgtgtggaggacctactgcaacggtaaaaagtgcggctttgccacgagaagagaatgtggagccaaagactgggacatactgaaggcagtggagccaatttctatgggtgcaggtgttttgcctaacagtgatgggtctgatggtgaagtcatgtacatgagggctaggtttgagagaattgttggttccagagactctgaagctttctacatgatgaatcctgacagcaatggagcacctgagctcagtatttacttgcttagagtctagtactgctgctgccactaccagcccccccccagtcatctgtttagttatttatactttaactttctttcccttttttagtttcttctttgtggatgatgttaaacactaggctattcctatactacttgtttagctccttaatcatgaacaatggtgacctagttttcttc

SEQ ID NO: 60520 - protein, 272 aa, Glycine max
  peptide (1)..(272): Ceres Seq. ID no. 12431308
MKTLVMDTTSSTPQDSSSSKRHFHWTNKVGNEDPQLATSETMSKIIEEEDTNTKEKEQEEDDKAVPLPGPATKRKIQAVAISRLRSVLTVFSKNHRSNLPFGLGSRVVGTLFGYRRGHVHFAFQRDPTSQPAFLIELATPISGLVREMASGLVRIALECDKDKDSEEKKTTKKNKTLRLLQESVWRTYCNGKKCGFATRRECGAKDWDILKAVEPISMGAGVLPNSDGSDGEVMYMRARFERIVGSRDSEAFYMMNPDSNGAPELSIYLLRV

SEQ ID NO: 60521 - protein, 267 aa, Glycine max
  peptide (1)..(267): Ceres Seq. ID no. 12431309
MDTTSSTPQDSSSSKRHFHWTNKVGNEDPQLATSETMSKIIEEEDTNTKEKEQEEDDKAVPLPGPATKRKIQAVAISRLRSVLTVFSKNHRSNLPFGLGSRVVGTLFGYRRGHVHFAFQRDPTSQPAFLIELATPISGLVREMASGLVRIALECDKDKDSEEKKTTKKNKTLRLLQESVWRTYCNGKKCGFATRRECGAKDWDILKAVEPISMGAGVLPNSDGSDGEVMYMRARFERIVGSRDSEAFYMMNPDSNGAPELSIYLLRV

SEQ ID NO: 60522 - protein, 231 aa, Glycine max
  peptide (1)..(231): Ceres Seq. ID no. 12431310
MSKIIEEEDTNTKEKEQEEDDKAVPLPGPATKRKIQAVAISRLRSVLTVFSKNHRSNLPFGLGSRVVGTLFGYRRGHVHFAFQRDPTSQPAFLIELATPISGLVREMASGLVRIALECDKDKDSEEKKTTKKNKTLRLLQESVWRTYCNGKKCGFATRRECGAKDWDILKAVEPISMGAGVLPNSDGSDGEVMYMRARFERIVGSRDSEAFYMMNPDSNGAPELSIYLLRV

SEQ ID NO: 60523 - DNA, 919 bp, Glycine max
  misc_feature (1)..(919): Ceres Seq. ID no. 12438838
  misc_feature (1)..(919): Ortholog of  Ceres SEQ ID NO 14304408 as cited in SEQ ID NO 58051
  misc_feature (1)..(919): Ortholog of  Ceres SEQ ID NO 14314759 as cited in SEQ ID NO 59915
  misc_feature (1)..(919): Ortholog of  Ceres SEQ ID NO 13661769 as cited in SEQ ID NO 61435
  misc_feature (1)..(919): Ortholog of  Ceres SEQ ID NO 13600585 as cited in SEQ ID NO 0
aaacataagagaaggtttcgtggcagtggcgagtgaagaagctatgcctgatgagtgagtcatttttttctctctggtgggtcccatcctcttctgctctgagaacctttataagtgttatatgagtcattgagaagtgaccccaggaaaaagaaaagaaaagaaaaacttcacttcacttgcatgccaaatgagaacaacctcttcttagaataatttcctcggtgtttaagccttgtcgatttccgaacaccaatccgagttaattaaacaatgagagtttcgacagaaaagttagagacagagccggagagcaaaaagataaaacgcattcgtggcggcggcggcggggactcgagcaataagcaccctttgtaccgcggcgtgcggatgcggaactgggggaaatgggtgtcggaaatccgcgagccgcggaagaagtcgcggatatggctaggcacattcccgacgccggaaatggcggcgagggcgcacgacgtggcggctctcagcatcaaaggctccgccgccattctcaacttccctcactttgccaactcgctccctcgcccggcttctctcgcgccgcgcgacgttcaagccgcggcggccaaagcggcgcacatggacccttcttccctctcctcccttgtctccgcaatggacttgtcctctgcctctgacgagttgagccaaatcatagagcttccttctttggaaagcaccgatgatggctccgtcgtcttagagaaagagtttgtttttgttgactcccttgatgcttggatgtatcagccaccctttggttttgacaccgaacaagacactggtttcgagggtttgatgtggaattactagtttcgatccatgtttctgttctattctatgtcttatgttgtataaattaatattgatcgtc

SEQ ID NO: 60524 - protein, 194 aa, Glycine max
  peptide (1)..(194): Ceres Seq. ID no. 12438839
MRVSTEKLETEPESKKIKRIRGGGGGDSSNKHPLYRGVRMRNWGKWVSEIREPRKKSRIWLGTFPTPEMAARAHDVAALSIKGSAAILNFPHFANSLPRPASLAPRDVQAAAAKAAHMDPSSLSSLVSAMDLSSASDELSQIIELPSLESTDDGSVVLEKEFVFVDSLDAWMYQPPFGFDTEQDTGFEGLMWNY

SEQ ID NO: 60525 - protein, 155 aa, Glycine max
  peptide (1)..(155): Ceres Seq. ID no. 12438840
MRNWGKWVSEIREPRKKSRIWLGTFPTPEMAARAHDVAALSIKGSAAILNFPHFANSLPRPASLAPRDVQAAAAKAAHMDPSSLSSLVSAMDLSSASDELSQIIELPSLESTDDGSVVLEKEFVFVDSLDAWMYQPPFGFDTEQDTGFEGLMWNY

SEQ ID NO: 60526 - protein, 126 aa, Glycine max
  peptide (1)..(126): Ceres Seq. ID no. 12438841
MAARAHDVAALSIKGSAAILNFPHFANSLPRPASLAPRDVQAAAAKAAHMDPSSLSSLVSAMDLSSASDELSQIIELPSLESTDDGSVVLEKEFVFVDSLDAWMYQPPFGFDTEQDTGFEGLMWNY

SEQ ID NO: 60527 - DNA, 1121 bp, Glycine max
  misc_feature (1)..(1121): Ceres Seq. ID no. 12442501
  misc_feature (1)..(1121): Ortholog of  Ceres SEQ ID NO 14316118 as cited in SEQ ID NO 52391
  misc_feature (1)..(1121): Ortholog of  Ceres SEQ ID NO 14316060 as cited in SEQ ID NO 52465
  misc_feature (1)..(1121): Ortholog of  Ceres SEQ ID NO 15177246 as cited in SEQ ID NO 57731
  misc_feature (1)..(1121): Ortholog of  Ceres SEQ ID NO 13664032 as cited in SEQ ID NO 67527
cttaacatttccctaaacataactcacacacccctcttctctagggtttcaatttcaccatgtttccctttctcaaattagggttccggcgagcatggccgacggtccggcgagtccaggcggcggtagccacgagagcggcgagcacagccctcgctctaacgtgcgcgagcaggacaggtacctccccatcgctaacataagccgcatcatgaagaaggcactacctgcgaacggtaaaatcgccaaggacgccaaagagaccgttcaggaatgcgtatccgagttcatcagtttcatcaccagcgaggcctctgataagtgtcagagggaaaagagaaagactattaacggtgatgatttgctctgggccatggccactcttggttttgaggattatatcgatcctcttaaaatttacctcactagatacagagagatggagggtgatacgaagggttcagccaagggcggagactcatcttctaagaaagatgttcagccaagtcctaatgctcagcttgctcatcaaggttctttctcacaaggtgttagttacacaatttctcagggtcaacatatgatggttccaatgcaaggcccggagtaggtatcaagtttattaaccctcctgttgtaacgtatgttttccacgccagttaccaagtgctcacggcatattgaatgtctttttatgttatgtgaatactgacataggagatggttcttgtgtcctttttttttaaaaaaaaaagtaaggtttgtatattatctttggagtcgaattattatttgaaagttattatattgtaaatcctanagccctgttgtctgaatccatcaggcggcttggcaaagaccgagattttaggactgattgtaagcataaacccgaatattcttttcctaatttctttgtgcaataatgtatgaaaaaggctcgagcttcttttcaaaaaaaaaaaaaaaaaaaaaaaaaaaaaaaaaaaaaaaaaaaaaaaaaaaaaaaaaaaaaaaaaaaaaaaaaaaaaaaaaaaaaaaaaaaaaaaaaaaaaaaaaaaaaaaaaaaaaaaaaaaaaaaaaaaaaaaaaaaaaaaaaanttttttttnccccccccccc

SEQ ID NO: 60528 - protein, 171 aa, Glycine max
  peptide (1)..(171): Ceres Seq. ID no. 12442502
MADGPASPGGGSHESGEHSPRSNVREQDRYLPIANISRIMKKALPANGKIAKDAKETVQECVSEFISFITSEASDKCQREKRKTINGDDLLWAMATLGFEDYIDPLKIYLTRYREMEGDTKGSAKGGDSSSKKDVQPSPNAQLAHQGSFSQGVSYTISQGQHMMVPMQGPE

SEQ ID NO: 60529 - protein, 132 aa, Glycine max
  peptide (1)..(132): Ceres Seq. ID no. 12442503
MKKALPANGKIAKDAKETVQECVSEFISFITSEASDKCQREKRKTINGDDLLWAMATLGFEDYIDPLKIYLTRYREMEGDTKGSAKGGDSSSKKDVQPSPNAQLAHQGSFSQGVSYTISQGQHMMVPMQGPE

SEQ ID NO: 60530 - DNA, 1524 bp, Glycine max
  misc_feature (1)..(1524): Ceres Seq. ID no. 12453502
  misc_feature (1)..(1524): Ortholog of  Ceres SEQ ID NO 15177692 as cited in SEQ ID NO 52664
  misc_feature (1)..(1524): Ortholog of  Ceres SEQ ID NO 14303959 as cited in SEQ ID NO 53709
atggagactggtggtggacgcgattctggcatgagttctgagactatcaattcctccactcaaagaacttcaatgagcaacgagagcgtttgcagcaccagcttcagccgtctctccttcgatctccctcctccttcttcttcccctgagaccctcttcgtcaaaccccaccgctcctccgacttcgcctactccgccatcctccgccgcaagtccgccctcaccttccgcgacttccacctcctccgccgcatcggcgccggcgacatcggcaccgtctacctctgccgtctccgccacgacgccggcgacgaggacgacgacgaggacccctgtttctacgcgatgaaggtggtggacaaggaggcggtggcgctgaagaagaaggcgcagagagcggagatggagaggaagattctgaagatggtggaccatccgttcctccctacgctctacgcggagttcgaggcttcgaatttctcatgcattgtgatggagtattgctccggtggggacttgcactcccttcaacacaaccaccccaataaccgattctctctctcctctgccaggttttacgcggctgaagtactggttgcgttggagtatctccacatgctgggaatcatctacagggatctgaagcccgaaaacgtgttggtcagatcagacggtcacatcatgctttccgacttcgatctctctctatgctccgatgctatcccagccgttgaatcccctgactgttcactggaccccgcattcgcacccgcgttacgctacactcgccagtactccacccccttctcctgcctctcgaaccgcgtattccggtccaggaaggtccagaccctccaacccaaccgcctcttcgtggccgaaccggtcggggcccgctcgtgctccttcgttgggacccacgagtacgtgtcgccggaagtggcctccgggaactcacacggcaatgccgtcgactggtggtccttcgggatattcatctacgagatggtgtacggtcgaacacccttcgcgggatcatcgaacgaggctacgctgcgaagcatcatcaaaaagcccctcgcatttcccacctccacgccctccagtacgcttgaaatgcacgcgcgggacctcatatcagggttgctcaacaaggacccgaaccgcaggctcgggtccaaacgaggctctgcggacgtcaaaaaacaccccttcttcgcggggctcaatctcgcgctcatccggacggtcacgccgccggaggttccatcactcagaaggcataaaacgacgccgttttactaccccgccaacgtaaataacagtagacagcagctaacggcgtttgattacttttgattaaaatccgacgatggtcgccccctgcgccacgccacgtgttcagtcggtgccccccagttttataattggcggatgggtgacttatgtgtatattttttagttgtcctttcttttttgtaacccttttttttaatataaaataacatagtttgatacttacgt

SEQ ID NO: 60531 - protein, 452 aa, Glycine max
  peptide (1)..(452): Ceres Seq. ID no. 12453503
METGGGRDSGMSSETINSSTQRTSMSNESVCSTSFSRLSFDLPPPSSSPETLFVKPHRSSDFAYSAILRRKSALTFRDFHLLRRIGAGDIGTVYLCRLRHDAGDEDDDEDPCFYAMKVVDKEAVALKKKAQRAEMERKILKMVDHPFLPTLYAEFEASNFSCIVMEYCSGGDLHSLQHNHPNNRFSLSSARFYAAEVLVALEYLHMLGIIYRDLKPENVLVRSDGHIMLSDFDLSLCSDAIPAVESPDCSLDPAFAPALRYTRQYSTPFSCLSNRVFRSRKVQTLQPNRLFVAEPVGARSCSFVGTHEYVSPEVASGNSHGNAVDWWSFGIFIYEMVYGRTPFAGSSNEATLRSIIKKPLAFPTSTPSSTLEMHARDLISGLLNKDPNRRLGSKRGSADVKKHPFFAGLNLALIRTVTPPEVPSLRRHKTTPFYYPANVNNSRQQLTAFDYF

SEQ ID NO: 60532 - protein, 442 aa, Glycine max
  peptide (1)..(442): Ceres Seq. ID no. 12453504
MSSETINSSTQRTSMSNESVCSTSFSRLSFDLPPPSSSPETLFVKPHRSSDFAYSAILRRKSALTFRDFHLLRRIGAGDIGTVYLCRLRHDAGDEDDDEDPCFYAMKVVDKEAVALKKKAQRAEMERKILKMVDHPFLPTLYAEFEASNFSCIVMEYCSGGDLHSLQHNHPNNRFSLSSARFYAAEVLVALEYLHMLGIIYRDLKPENVLVRSDGHIMLSDFDLSLCSDAIPAVESPDCSLDPAFAPALRYTRQYSTPFSCLSNRVFRSRKVQTLQPNRLFVAEPVGARSCSFVGTHEYVSPEVASGNSHGNAVDWWSFGIFIYEMVYGRTPFAGSSNEATLRSIIKKPLAFPTSTPSSTLEMHARDLISGLLNKDPNRRLGSKRGSADVKKHPFFAGLNLALIRTVTPPEVPSLRRHKTTPFYYPANVNNSRQQLTAFDYF

SEQ ID NO: 60533 - protein, 428 aa, Glycine max
  peptide (1)..(428): Ceres Seq. ID no. 12453505
MSNESVCSTSFSRLSFDLPPPSSSPETLFVKPHRSSDFAYSAILRRKSALTFRDFHLLRRIGAGDIGTVYLCRLRHDAGDEDDDEDPCFYAMKVVDKEAVALKKKAQRAEMERKILKMVDHPFLPTLYAEFEASNFSCIVMEYCSGGDLHSLQHNHPNNRFSLSSARFYAAEVLVALEYLHMLGIIYRDLKPENVLVRSDGHIMLSDFDLSLCSDAIPAVESPDCSLDPAFAPALRYTRQYSTPFSCLSNRVFRSRKVQTLQPNRLFVAEPVGARSCSFVGTHEYVSPEVASGNSHGNAVDWWSFGIFIYEMVYGRTPFAGSSNEATLRSIIKKPLAFPTSTPSSTLEMHARDLISGLLNKDPNRRLGSKRGSADVKKHPFFAGLNLALIRTVTPPEVPSLRRHKTTPFYYPANVNNSRQQLTAFDYF

SEQ ID NO: 60534 - DNA, 1816 bp, Glycine max
  misc_feature (1)..(1816): Ceres Seq. ID no. 12452690
  misc_feature (1)..(1816): Ortholog of  Ceres SEQ ID NO 14307964 as cited in SEQ ID NO 66191
  misc_feature (1)..(1816): Ortholog of  Ceres SEQ ID NO 13502874 as cited in SEQ ID NO 66298
  misc_feature (1)..(1816): Ortholog of  Ceres SEQ ID NO 12614124 as cited in SEQ ID NO 68392
cacagcccttctaaaacgcccttctaaaacgccttacttacttactctgtgccttctttcatcatccaaaaaagaaaaccgttggcattcacacaaagaaaacctttgggtttcccaaaatgtcatcatcggaactctcctctttctttcttctccgtctatcagacatactcagtttcgatgttttgctcggagttatgtttctagttgccgtgttcggctactggctggttcccggcggttttgcttgggctttttccaagttcaagcccgcgattcccgggccttccggttacccggtggtgggtctggtttgggctttcatagggcctcttactcacagggtccttgctaagttggctgaaacctttgatgcaaagcccttgatggcgttctctgtggggttcactcgtttcatcatctcttctcaccccgacaccgccaaagagatcttgaacagttccgctttcgcggatcgtcccgttaaggaatctgcttatgaacttctctttcaccgtgcgatggggtttgcaccctacggtgagtactggaggaacctgaggaggatctccgcaactcacatgttctctccgaggagaatcgcagcccaaggagtgtttcgggcccggattggagcccaaatggtgagagacatcgtgggcctgatggggagggacggtgtggtggaggtgaggaaggtgttgcattttgggtcgttgaataacgtgatgaagagcgtgtttgggaggagttatgtgtttggtgaggggggtgatgggtgtgagctcgaggggttggtgagcgaggggtatcatttgcttggggtgtttaactggagtgaccactttccactcttgggttggttggatttgcaaggtgtgaggaagagctgtaggagtttggttgatagagtgaatgtttatgttgggaaaatcattttggagcatagagtgaagagggttgctcaaggtgaggataataaggccattgatactgatagttctggtgactttgttgatgtgctgctggatttggagaaagagaataggctaaaccactctgatatggttgctgttttgtgggaaatgatatttagagggactgatacggtagctatccttctagagtggattctagcaagaatggttcttcatccagaaatacaagcaaaggcacaatctgaaatagactctgtggttgggtctgggcgtagtgtgagtgatgatgaccttccaaaccttccttacgttcgagccatagtgaaggaaaccttaaggatgcacccaccaggccctcttctttcatgggccagactttctattcatgacacacaaattggcaatcactttgttccagctggcaccactgctatggtaaacatgtgggccataactcacgaccaagaagtgtggtatgagccaaaacagttcaagccggagcgttttttgaaggacgaggacgtgccaatcatgggatctgatcttaggttggcaccttttggctctgggaggagagtgtgccctggaaaagccatgggcttggccactgttgagctttggcttgctatgttcttacaaaaattcaaatggatgccctgtgatgattctggtgttgacttgtctgagtgtttgaagctctccatggagatgaaacactctctcaaaaccaaagttgttgcaaggcctgtagtttctcttgcaatgtaatgggttggagtatcccatccttttactcccattaataataatattcctttccgttgtaaaaaaaaaaaaaaaaaacggcacgagaagccggcacgagaagccggcacgag

SEQ ID NO: 60535 - protein, 528 aa, Glycine max
  peptide (1)..(528): Ceres Seq. ID no. 12452691
MSSSELSSFFLLRLSDILSFDVLLGVMFLVAVFGYWLVPGGFAWAFSKFKPAIPGPSGYPVVGLVWAFIGPLTHRVLAKLAETFDAKPLMAFSVGFTRFIISSHPDTAKEILNSSAFADRPVKESAYELLFHRAMGFAPYGEYWRNLRRISATHMFSPRRIAAQGVFRARIGAQMVRDIVGLMGRDGVVEVRKVLHFGSLNNVMKSVFGRSYVFGEGGDGCELEGLVSEGYHLLGVFNWSDHFPLLGWLDLQGVRKSCRSLVDRVNVYVGKIILEHRVKRVAQGEDNKAIDTDSSGDFVDVLLDLEKENRLNHSDMVAVLWEMIFRGTDTVAILLEWILARMVLHPEIQAKAQSEIDSVVGSGRSVSDDDLPNLPYVRAIVKETLRMHPPGPLLSWARLSIHDTQIGNHFVPAGTTAMVNMWAITHDQEVWYEPKQFKPERFLKDEDVPIMGSDLRLAPFGSGRRVCPGKAMGLATVELWLAMFLQKFKWMPCDDSGVDLSECLKLSMEMKHSLKTKVVARPVVSLAM

SEQ ID NO: 60536 - protein, 502 aa, Glycine max
  peptide (1)..(502): Ceres Seq. ID no. 12452692
MFLVAVFGYWLVPGGFAWAFSKFKPAIPGPSGYPVVGLVWAFIGPLTHRVLAKLAETFDAKPLMAFSVGFTRFIISSHPDTAKEILNSSAFADRPVKESAYELLFHRAMGFAPYGEYWRNLRRISATHMFSPRRIAAQGVFRARIGAQMVRDIVGLMGRDGVVEVRKVLHFGSLNNVMKSVFGRSYVFGEGGDGCELEGLVSEGYHLLGVFNWSDHFPLLGWLDLQGVRKSCRSLVDRVNVYVGKIILEHRVKRVAQGEDNKAIDTDSSGDFVDVLLDLEKENRLNHSDMVAVLWEMIFRGTDTVAILLEWILARMVLHPEIQAKAQSEIDSVVGSGRSVSDDDLPNLPYVRAIVKETLRMHPPGPLLSWARLSIHDTQIGNHFVPAGTTAMVNMWAITHDQEVWYEPKQFKPERFLKDEDVPIMGSDLRLAPFGSGRRVCPGKAMGLATVELWLAMFLQKFKWMPCDDSGVDLSECLKLSMEMKHSLKTKVVARPVVSLAM

SEQ ID NO: 60537 - protein, 439 aa, Glycine max
  peptide (1)..(439): Ceres Seq. ID no. 12452693
MAFSVGFTRFIISSHPDTAKEILNSSAFADRPVKESAYELLFHRAMGFAPYGEYWRNLRRISATHMFSPRRIAAQGVFRARIGAQMVRDIVGLMGRDGVVEVRKVLHFGSLNNVMKSVFGRSYVFGEGGDGCELEGLVSEGYHLLGVFNWSDHFPLLGWLDLQGVRKSCRSLVDRVNVYVGKIILEHRVKRVAQGEDNKAIDTDSSGDFVDVLLDLEKENRLNHSDMVAVLWEMIFRGTDTVAILLEWILARMVLHPEIQAKAQSEIDSVVGSGRSVSDDDLPNLPYVRAIVKETLRMHPPGPLLSWARLSIHDTQIGNHFVPAGTTAMVNMWAITHDQEVWYEPKQFKPERFLKDEDVPIMGSDLRLAPFGSGRRVCPGKAMGLATVELWLAMFLQKFKWMPCDDSGVDLSECLKLSMEMKHSLKTKVVARPVVSLAM

SEQ ID NO: 60538 - DNA, 1338 bp, Glycine max
  misc_feature (1)..(1338): Ceres Seq. ID no. 12456365
  misc_feature (1)..(1338): Ortholog of  Ceres SEQ ID NO 15176803 as cited in SEQ ID NO 52778
  misc_feature (1)..(1338): Ortholog of  Ceres SEQ ID NO 14302283 as cited in SEQ ID NO 68688
  misc_feature (1)..(1338): Ortholog of  Ceres SEQ ID NO 14302772 as cited in SEQ ID NO 69055
gtcataactttgctagatccatcaaagaagcagtgattcccccagcttccacatcaaatgaagccataatcatcatcatcatcaccacgcctcttctttctctttctccctaccattcacaatgtcatcgatacaccactactcaccggaaacaacactatactggaccagcgaccaccagcaacaacaacaacaacaacaacaacaacaacaacaagctgccacgtggcttagtaattcccacactccccgtttcaacctgaacgaagacgacgacgaggaagacgacgttgtcgtttcggacaaggctactaataatttggcgcaagaacaggagaaagaagcgatgttcgagaagccgttgacgccgagcgacgtcgggaagctgaaccggctcgtgatcccgaaacagcacgcggagaagtacttccctcttgactcgtccggcggtgactcggcggcggcgaaagggctcttgctgagtttcgaggacgagtcggggaagtgctggcgcttccgttactcttattggaacagtagccagagttacgttttgaccaaaggctggagccgttacgtcaaagacaaacgcctccacgcaggcgacgtcgttttgttccacagacaccgcgcccaccctcaacgcttcttcatctcctgcacccgccaccaacccaaccccaaccctcccgcgcacgttagcatcagatcctcctcctactctgcgctcccagcttatcctacgcaccatcatcatcacctccccttcccataccaacctcactctcttcacgcaccaggtggagggtcccaaggacagaacgaaacgacaccaggagggaacagttcaagtggcagggtgctgaggctgtttggggtgaacatggaatgccaacctgataatgataatgattcccaaaactccacacatgaatgctcctacacccacttataccaccatcaaacctcttcttatccttcttcaaaccctcaccatcacatgctacctcaacaaccataatagaaattagatatatatgcccccctctttattagattctcccccgttttttttttttcatttccagcttcagggttgaagtatgcccttaaattaattttagtcaatgaccgtgtcgttaacatgaacccgtgaaaggaacccttcttttattattagtatatttaggttgacgttgaagattatagaggatctttcttgtcttgaattagggagatgcatgcaaatggaaatgccttgtttattcgttttatcggatcttcttgttccctgtcactcgagcatattaattatcgactaagctgtgaatgcatgcc

SEQ ID NO: 60539 - protein, 299 aa, Glycine max
  peptide (1)..(299): Ceres Seq. ID no. 12456366
MSSIHHYSPETTLYWTSDHQQQQQQQQQQQQQAATWLSNSHTPRFNLNEDDDEEDDVVVSDKATNNLAQEQEKEAMFEKPLTPSDVGKLNRLVIPKQHAEKYFPLDSSGGDSAAAKGLLLSFEDESGKCWRFRYSYWNSSQSYVLTKGWSRYVKDKRLHAGDVVLFHRHRAHPQRFFISCTRHQPNPNPPAHVSIRSSSYSALPAYPTHHHHHLPFPYQPHSLHAPGGGSQGQNETTPGGNSSSGRVLRLFGVNMECQPDNDNDSQNSTHECSYTHLYHHQTSSYPSSNPHHHMLPQQP

SEQ ID NO: 60540 - protein, 224 aa, Glycine max
  peptide (1)..(224): Ceres Seq. ID no. 12456367
MFEKPLTPSDVGKLNRLVIPKQHAEKYFPLDSSGGDSAAAKGLLLSFEDESGKCWRFRYSYWNSSQSYVLTKGWSRYVKDKRLHAGDVVLFHRHRAHPQRFFISCTRHQPNPNPPAHVSIRSSSYSALPAYPTHHHHHLPFPYQPHSLHAPGGGSQGQNETTPGGNSSSGRVLRLFGVNMECQPDNDNDSQNSTHECSYTHLYHHQTSSYPSSNPHHHMLPQQP

SEQ ID NO: 60541 - DNA, 1681 bp, Glycine max
  misc_feature (1)..(1681): Ceres Seq. ID no. 12452925
  misc_feature (1)..(1681): Ortholog of  Ceres SEQ ID NO 15170792 as cited in SEQ ID NO 52707
aaaagggtgtccaaagaaggaatcacacaagagaaattttgggtggatcttggtaatttaaatttggtccaaaaatagtaagaaaaaaaaaccatagttcatttaattttcatgtccttgctaacggtggcgcaccaaagggggtcaggtgagtttatccggttcacggaaagtcatggcggtggtggcgatgacgtcagtggtgacggtgaacatggttgtggacatgatgatggaagtggtgctggaggttcactagggttgaattttaaccaagtgatgcaacaaggtgaggtgacaatgcaaggtggttcattggtttcagggtataacaggggtgatccagagttgagagaaatagtttcagctttgacacacgtggtgtcttcagggtctggccagaggagcaccgaattgacccagcaaagtggttttcctatgatgtctgcttcttctctttcacgtttgtctgctttctcttcttcttctccttctccttcttctggagcctcttgggttggccacaaaagaggcagagaagaagaagagaatagtacttcacataacttgatgcaacaacaacaacaaagtgctccaagactcttcagaaacattggtgacttcatggtgccttctcaaggagactcatcatcagtgacagaagaagcccccacctccacaactacaactgtaaccgccgtcactgaaaacccaccaggaggtggggaaaggaggagaaagtacagaggagtgaggcagaggccatggggaaaatgggcagcagaaatccgtgatccacacaaagcagcaagagtttggctaggcacatttgacacagaagaagcagcagcaagagcctatgatgaagctgcattgaggttcagaggcaacagagcaaagcttaacttccctgaaaatgtaagagcagttccacccattcaaccttttcaagccaccactaggctaaccgtttctgattccaccacctctcaattccggccactctccgcggtggcgccacccttcattcagcagccacagattcagggctcctctgacttgatcagagactacttgcaatactctcagcttctacagagtgattttcaacagcaacaaatacaacaacaacagcagcagcagcggcagcagcagcagcggcagcggcagcagcggcagcagcagcagcaacaacaacaacaaccatctagtttgcttcagcagttgtactataatgcacaatttgcttcacttcaatcaccttcaatgctatcatcatctccttcattttcttcttctgtgtctccagcaccattcccattattcacaacctctgcttctttccccttgttttcaagtcaacaaatgggctatttccagccaccggaaagccgcaatcccgctggcggcgtgccggagtttccaacgtccacatggtcggataccagtagccagccaccaccttctggttgatacagtgttttagtttccttcatattttcctttttcttttttctttctttcattcttagcataaaaaaaaaagacttgttatacttatttcttttttcaagggtgaaactatgatatagttttttttaagtatttttggtactattctcgtatcagaattagagtttcagtaatttatgttgatattcaatacaaatctttattatgt

SEQ ID NO: 60542 - protein, 453 aa, Glycine max
  peptide (1)..(453): Ceres Seq. ID no. 12452926
MSLLTVAHQRGSGEFIRFTESHGGGGDDVSGDGEHGCGHDDGSGAGGSLGLNFNQVMQQGEVTMQGGSLVSGYNRGDPELREIVSALTHVVSSGSGQRSTELTQQSGFPMMSASSLSRLSAFSSSSPSPSSGASWVGHKRGREEEENSTSHNLMQQQQQSAPRLFRNIGDFMVPSQGDSSSVTEEAPTSTTTTVTAVTENPPGGGERRRKYRGVRQRPWGKWAAEIRDPHKAARVWLGTFDTEEAAARAYDEAALRFRGNRAKLNFPENVRAVPPIQPFQATTRLTVSDSTTSQFRPLSAVAPPFIQQPQIQGSSDLIRDYLQYSQLLQSDFQQQQIQQQQQQQRQQQQRQRQQRQQQQQQQQQPSSLLQQLYYNAQFASLQSPSMLSSSPSFSSSVSPAPFPLFTTSASFPLFSSQQMGYFQPPESRNPAGGVPEFPTSTWSDTSSQPPPSG

SEQ ID NO: 60543 - protein, 397 aa, Glycine max
  peptide (1)..(397): Ceres Seq. ID no. 12452927
MQQGEVTMQGGSLVSGYNRGDPELREIVSALTHVVSSGSGQRSTELTQQSGFPMMSASSLSRLSAFSSSSPSPSSGASWVGHKRGREEEENSTSHNLMQQQQQSAPRLFRNIGDFMVPSQGDSSSVTEEAPTSTTTTVTAVTENPPGGGERRRKYRGVRQRPWGKWAAEIRDPHKAARVWLGTFDTEEAAARAYDEAALRFRGNRAKLNFPENVRAVPPIQPFQATTRLTVSDSTTSQFRPLSAVAPPFIQQPQIQGSSDLIRDYLQYSQLLQSDFQQQQIQQQQQQQRQQQQRQRQQRQQQQQQQQQPSSLLQQLYYNAQFASLQSPSMLSSSPSFSSSVSPAPFPLFTTSASFPLFSSQQMGYFQPPESRNPAGGVPEFPTSTWSDTSSQPPPSG

SEQ ID NO: 60544 - protein, 390 aa, Glycine max
  peptide (1)..(390): Ceres Seq. ID no. 12452928
MQGGSLVSGYNRGDPELREIVSALTHVVSSGSGQRSTELTQQSGFPMMSASSLSRLSAFSSSSPSPSSGASWVGHKRGREEEENSTSHNLMQQQQQSAPRLFRNIGDFMVPSQGDSSSVTEEAPTSTTTTVTAVTENPPGGGERRRKYRGVRQRPWGKWAAEIRDPHKAARVWLGTFDTEEAAARAYDEAALRFRGNRAKLNFPENVRAVPPIQPFQATTRLTVSDSTTSQFRPLSAVAPPFIQQPQIQGSSDLIRDYLQYSQLLQSDFQQQQIQQQQQQQRQQQQRQRQQRQQQQQQQQQPSSLLQQLYYNAQFASLQSPSMLSSSPSFSSSVSPAPFPLFTTSASFPLFSSQQMGYFQPPESRNPAGGVPEFPTSTWSDTSSQPPPSG

SEQ ID NO: 60545 - DNA, 438 bp, Glycine max
  misc_feature (1)..(438): Ceres Seq. ID no. 4620132
  misc_feature (1)..(438): Ortholog of  Ceres SEQ ID NO 15173624 as cited in SEQ ID NO 60470
acaaattctatacaccactctatcccccgttctctctcgcccgctttggtaaggcaagatagttctggccaacatggtgcaatcaaggaaattcagaggtgtgaggcaacgcaattggggctcttgggtttctgagattcgtcacccattattgaaaaggagggtgtggcttgggacattcgagacagctgatgaagcagctagagcatatgatgaggccgccattttgatgagtggaagaaatgccaaaacaaacttcccagttggtgaaaaccaaatgggaaatcatagttcaagtacttcatcttcctccaccactacattgtctgcagttctgagtgcaaaacttaggaagygttgcaagyccccttcaccttccctcacttgcctgaggcttgacactgagaattcccatattggtgtgtggcagaagcgagc

SEQ ID NO: 60546 - protein, 121 aa, Glycine max
  peptide (1)..(121): Ceres Seq. ID no. 4620133
  misc_feature (95)..(95): Xaa is any aa, unknown or other
  misc_feature (98)..(98): Xaa is any aa, unknown or other
MVQSRKFRGVRQRNWGSWVSEIRHPLLKRRVWLGTFETADEAARAYDEAAILMSGRNAKTNFPVGENQMGNHSSSTSSSSTTTLSAVLSAKLRKXCKXPSPSLTCLRLDTENSHIGVWQKR

SEQ ID NO: 60547 - protein, 69 aa, Glycine max
  peptide (1)..(69): Ceres Seq. ID no. 4620134
  misc_feature (43)..(43): Xaa is any aa, unknown or other
  misc_feature (46)..(46): Xaa is any aa, unknown or other
MSGRNAKTNFPVGENQMGNHSSSTSSSSTTTLSAVLSAKLRKXCKXPSPSLTCLRLDTENSHIGVWQKR

SEQ ID NO: 60548 - DNA, 467 bp, Glycine max
  misc_feature (1)..(467): Ceres Seq. ID no. 4865327
  misc_feature (1)..(467): Ortholog of  Ceres SEQ ID NO 14304408 as cited in SEQ ID NO 58051
  misc_feature (1)..(467): Ortholog of  Ceres SEQ ID NO 13661769 as cited in SEQ ID NO 61435
  misc_feature (1)..(467): Ortholog of  Ceres SEQ ID NO 13600585 as cited in SEQ ID NO 0
aaaaacaaaatagtctctcttctctcaaacgattacaaaaaaatgacgtcatccaaccgttcttcatcaccaacatcatcgtcttcggaccaatctgatgtaactacaacaacaagcacccacttgtccgaaacttcaccgagaaacaacaaaagaaagagaagcaaggattcttcttcttcttcttcttcctcttcttcaaagcttaagcatcctgtttacagaggtgtacggatgagaagctggggcaaatgggtctccgagatccgacagcctcgcaaaaagactcgaatctggctcggtacattcgccaccgcagacatggcggcgcgtgctcacgacgtcgctgctctcgccatcaaaggctcctccgccgtcatcaacttyyccggagcttgcctctatcctccctcgtccggcgtcatcctcgccgcatgatatccaagcagcagctgcggaagccgccg

SEQ ID NO: 60549 - protein, 145 aa, Glycine max
  peptide (1)..(145): Ceres Seq. ID no. 4865328
  misc_feature (129)..(129): Xaa is any aa, unknown or other
  misc_feature (130)..(130): Xaa is any aa, unknown or other
KNKIVSLLSNDYKKMTSSNRSSSPTSSSSDQSDVTTTTSTHLSETSPRNNKRKRSKDSSSSSSSSSSKLKHPVYRGVRMRSWGKWVSEIRQPRKKTRIWLGTFATADMAARAHDVAALAIKGSSAVINXXGACLYPPSSGVILAA

SEQ ID NO: 60550 - protein, 131 aa, Glycine max
  peptide (1)..(131): Ceres Seq. ID no. 4865329
  misc_feature (115)..(115): Xaa is any aa, unknown or other
  misc_feature (116)..(116): Xaa is any aa, unknown or other
MTSSNRSSSPTSSSSDQSDVTTTTSTHLSETSPRNNKRKRSKDSSSSSSSSSSKLKHPVYRGVRMRSWGKWVSEIRQPRKKTRIWLGTFATADMAARAHDVAALAIKGSSAVINXXGACLYPPSSGVILAA

SEQ ID NO: 60551 - DNA, 1002 bp, Triticum aestivum
  misc_feature (1)..(1002): Ceres Seq. ID no. 13661565
gaaactaaaaacattaatcttcaatacttgtctaaacaagaaaggagtgaactacaaaaacctcacatgctgctcacacaaccatcttaagataactaatgaaagtttaaaatttacaatgcaccatcaggataaagagttgaatccatttcattgagattaaaccaaagaaatattttaacatatctagtagtcatccaaaatctcatcttcctcttctttaccttcagcctctttcttctcaacttcattctcctcagcctcatcatcatcagcttgcttctcctcagcctcatcatcagcttgcttctcttcagcatcatcagcttccttctcctgctcattctcttcctcatcatcatcgttgctgctctccagtgacttgttgtattcagcctttagttcagcagctttctccaaataaactttcttctcttcctcatccaaagacttccacttttcaccaccctgctttgcaacatccttaacgccagcgtcaggattctcttctttgaaagttttgcggaaatcagccatgaagatgaagaaggctgtaagaggtcgcttgggcttgttggaggaagagctcttcttcttattctcatccttggacttcctgagtctctttgccttaggttcatcagatgttgacttcttcctctcagcaggtttcttcttagcctcggtttgtgtctcaacaacttgtgcttcgagattgactcgaattttagcgtcgaggctgcaattgtgcatactgataagcgcaacagctacgttcttgttgcatccttcacatttagcaaaggcgctgccatctttagcgcgaagcaaggtgttgatgttgttgttggtggttgtttcgggtttggattcagcttcaaccctcttcctcggtttgggtgcagttgatttcgacgatccacgaccaccggccatctctttcttttttttctagatctgaaggagagaatataatcttttttgttgagattgaggatcgat

SEQ ID NO: 60552 - protein, 139 aa, Triticum aestivum
  peptide (1)..(139): Ceres Seq. ID no. 13661566
MKMKKAVRGRLGLLEEELFFLFSSLDFLSLFALGSSDVDFFLSAGFFLASVCVSTTCASRLTRILASRLQLCILISATATFLLHPSHLAKALPSLARSKVLMLLLVVVSGLDSASTLFLGLGAVDFDDPRPPAISFFFF

SEQ ID NO: 60553 - protein, 137 aa, Triticum aestivum
  peptide (1)..(137): Ceres Seq. ID no. 13661567
MKKAVRGRLGLLEEELFFLFSSLDFLSLFALGSSDVDFFLSAGFFLASVCVSTTCASRLTRILASRLQLCILISATATFLLHPSHLAKALPSLARSKVLMLLLVVVSGLDSASTLFLGLGAVDFDDPRPPAISFFFF

SEQ ID NO: 60554 - DNA, 818 bp, Triticum aestivum
  misc_feature (1)..(818): Ceres Seq. ID no. 13598143
ataccaagctagcaaagccaacctagctcagccacaagccagtacactttagctagctactagcttcgtagcaatggcgcctccaagctcaccctcttcctcgccctgagcctggtcctcgtgggaacctcgcacggttgcggatcgtgcggcaacacgccgtccgtgccagtcccaacgccgccgatcgccgtaccaccgccacccgtcccagtgccaaccccgccgatcgccgtgcccccgccggccgtcccagtaccaaccccgccaatcgccgtgcccccgccggccgtccgagtaccaacccctggcgggggcggcacttgtttgatcaacacgttgaagctgagcgcgtgcaccaacgtactgaacctgctgaagctcaacctcggcgtgccggcgagcgagcagtgcttccccctgctgagcggcctcgccgacctcgacgcagccgtgtgcctttgcccagccatcaaggccaacgtttttggcatcaagctcaacgtccccgtcgacctcgtgctgcttttcaaccagtgcggcaagacctgttccgccgacttcacctgccccaactaaatccaaggatacgtcgatcgatttacatatgacaaaccatgcattttgtacatgcatgcgtacttgtcgccccgtgcatgcatgcaagcttacgttttttttgttcccctgagtatgtataagctagtcatcgatcattgtatcccgtacgttatggtatttagatgatttgcatatttgtaaaagtatatacatacttgtccccgtacgtggaataaaaagtttgttcaagttgtgtt

SEQ ID NO: 60555 - protein, 38 aa, Triticum aestivum
  peptide (1)..(38): Ceres Seq. ID no. 13598144
MHAYLSPRACMQAYVFFVPLSMYKLVIDHCIPYVMVFR

SEQ ID NO: 60556 - DNA, 1451 bp, Triticum aestivum
  misc_feature (1)..(1451): Ceres Seq. ID no. 13661842
aaaggttccttttgggattgatctctttgaggcattgtgatgtactaataacagttcagtttccaggattcgtgtgattcagttgaacccctattctcatcgccaggataacgaaagaagatctgggaataatgaatcgccgttttgtgaatctgctggtcagtaaatcgggcgactgccgcccggccttcaacctgcatcgcatcaatccggcgagcttattctgccctactagatctctaaaaccagcagatccagcagcaacaaagaagaagactctgtctcggctgcctcctgcggccatatccttcgaattgccctgcccgtggaagaagttcgggtggatggatttcatggcccgcaagaacgacatcattgctgtcgaccatgagggccacaccctcctctacaacggcacggttggcgccctctgcgccatgaacaggatggtagacccctgtcacagctcaatctccgtcgttgttggggacgagctgtatgccatggccatcaaccgtggcctgctcccaaggtggactattttaaggctcttacctatggccgctcgttcggccactgccagccagaggactggcactggcgccctctccagccgcctccccttgaatacgaccacgagaaggatcaacgctacaaccccactgcggcgcctgtgacacacccctgtgctattggcgcatacacggttgttcgtgattcacagatctggatatctacaacgggcgctggcacgtactcctttgacacaactagcggcgtgtggagaaagattggcgagtgggctctgccgttcaaaggtcacgccaagtatgttcctgagcacggtctctggtttggcttctcagacagtgatggtcagctctgtgcttctgacctcgagcagatgccgccggtgcagcagaatgcgtgtgaagacctagtccttcctgtgctggaaggttggaatccaacggggtcgcacctcttggcgttgggatctggtaagttatgcatcgtgagcttcttccagagaattaagcgggtgaggccgcgtccgtcgacgtgctattggagcttcaaaattgagaacgctgctgttcttgctggtgtggaagttgttgccgcaggtccaggaatcctccgtatggtcaagcacaagtccaaatgttatcacttcggagatgataacgtgaagctgctgtgatattgcaggcatgccatctttagatttgaagaccctggtcttaaaaaaaagagaatcttccgggcgagtctctgtattgtgatcctactttgtctgtggatgtggtctgtttgttgcgagttacttactctttatttctatatatgtgtatttagctgtgtgcgcccgcagcagcgctggaatctgggttaaaccttgactgattgtaacattacctctgtgtcgcccttaacagtgctggtaggtt

SEQ ID NO: 60557 - protein, 181 aa, Triticum aestivum
  peptide (1)..(181): Ceres Seq. ID no. 13661843
MNRRFVNLLVSKSGDCRPAFNLHRINPASLFCPTRSLKPADPAATKKKTLSRLPPAAISFELPCPWKKFGWMDFMARKNDIIAVDHEGHTLLYNGTVGALCAMNRMVDPCHSSISVVVGDELYAMAINRGLLPRWTILRLLPMAARSATASQRTGTGALSSRLPLNTTTRRINATTPLRRL

SEQ ID NO: 60558 - protein, 110 aa, Triticum aestivum
  peptide (1)..(110): Ceres Seq. ID no. 13661844
MDFMARKNDIIAVDHEGHTLLYNGTVGALCAMNRMVDPCHSSISVVVGDELYAMAINRGLLPRWTILRLLPMAARSATASQRTGTGALSSRLPLNTTTRRINATTPLRRL

SEQ ID NO: 60559 - protein, 107 aa, Triticum aestivum
  peptide (1)..(107): Ceres Seq. ID no. 13661845
MARKNDIIAVDHEGHTLLYNGTVGALCAMNRMVDPCHSSISVVVGDELYAMAINRGLLPRWTILRLLPMAARSATASQRTGTGALSSRLPLNTTTRRINATTPLRRL

SEQ ID NO: 60560 - DNA, 1083 bp, Triticum aestivum
  misc_feature (1)..(1083): Ceres Seq. ID no. 13662117
agtcattctcctcctcacccacgtctccctcctctctgtcagagaggaagacgctccaggagagattaggccgcaggagtagcggtgaccgacaggctcatggaggagcagcagcggccaatggcggcagaccagatcagcgcgccgcgggaggggatggggcagctctcatgggccaagcagagcagagtcggcgggccatgccaggaccagcgtgataggtcgcgggcgaagaggggccagggcggcgaagacaccccaggaaaggtgccgccggccacgacctttttcctccttgcccttgttttctccttcccgtctagggttatcgccgccgccgccgccatcgtccccatccttgctcgcggcctcggtctctgcgtctctaatcgtcccaagatcccaaacccgtcgtcgtcttctacttccctctcttattcccctatggccccggcaaggtgtgccaatccggcgccacacggcaaagtacatcagcatccagtataccccttgacacggccaaggtcaggctacaactgcagaagagggtcgtcgccagggatctcgctgggcccaagtaccgtggcctgctcggcaccgccgccaccatcgccaaggaggaaggcgccgccgcactctggaagggcatcggccctggcctccatcgccggtgcatctacgacggtcgctatgagcccgtcaaatccttctatgttggtgccatgttggggatgtacctttgtccaagaagatagccgttggcttcaccactggtaccctcatcgctgtattctcaaacaattttccgttccatgtgaaatgaaatatgcagcaacataagatggtttggctgacctgcattaggtgcccttataatctctgtggccaaccccattgaccttgtcaaagtcaggcttcagtccgaggggaagatggcacctggtgtgtcgcgctgttatactggggcaatgtatgcgccaagactgttaggcaggtctattgtttctgctcttgttctgcaaactaattgtggattgttacatttcccgaattgcttgcttcaaatatgtcggtatcatcttt

SEQ ID NO: 60561 - protein, 246 aa, Triticum aestivum
  peptide (1)..(246): Ceres Seq. ID no. 13662118
MEEQQRPMAADQISAPREGMGQLSWAKQSRVGGPCQDQRDRSRAKRGQGGEDTPGKVPPATTFFLLALVFSFPSRVIAAAAAIVPILARGLGLCVSNRPKIPNPSSSSTSLSYSPMAPARCANPAPHGKVHQHPVYPLTRPRSGYNCRRGSSPGISLGPSTVACSAPPPPSPRRKAPPHSGRASALASIAGASTTVAMSPSNPSMLVPCWGCTFVQEDSRWLHHWYPHRCILKQFSVPCEMKYAAT

SEQ ID NO: 60562 - protein, 239 aa, Triticum aestivum
  peptide (1)..(239): Ceres Seq. ID no. 13662119
MAADQISAPREGMGQLSWAKQSRVGGPCQDQRDRSRAKRGQGGEDTPGKVPPATTFFLLALVFSFPSRVIAAAAAIVPILARGLGLCVSNRPKIPNPSSSSTSLSYSPMAPARCANPAPHGKVHQHPVYPLTRPRSGYNCRRGSSPGISLGPSTVACSAPPPPSPRRKAPPHSGRASALASIAGASTTVAMSPSNPSMLVPCWGCTFVQEDSRWLHHWYPHRCILKQFSVPCEMKYAAT

SEQ ID NO: 60563 - protein, 227 aa, Triticum aestivum
  peptide (1)..(227): Ceres Seq. ID no. 13662120
MGQLSWAKQSRVGGPCQDQRDRSRAKRGQGGEDTPGKVPPATTFFLLALVFSFPSRVIAAAAAIVPILARGLGLCVSNRPKIPNPSSSSTSLSYSPMAPARCANPAPHGKVHQHPVYPLTRPRSGYNCRRGSSPGISLGPSTVACSAPPPPSPRRKAPPHSGRASALASIAGASTTVAMSPSNPSMLVPCWGCTFVQEDSRWLHHWYPHRCILKQFSVPCEMKYAAT

SEQ ID NO: 60564 - DNA, 781 bp, Triticum aestivum
  misc_feature (1)..(781): Ceres Seq. ID no. 13664389
agctccaycgcggtggcggccsctctagagactagtggatccyccgggmtgcaggaattcgcrcgagaccattacctagaacatcctaatcgaaaaaacgatcaatctgattcctctctcgaatctcatcaatccacctcctctctcgaatctcattaatctgcctcctctctcgaatctctttctttgactcgacggggcagctgcggaaggagcagacgctcgccgggaagcctgctggattcttcttgagtacgaggactcagggaggtggacaagagaccattgcatggacaacaatcacacggctggtgcatcacgggatgctaatcgtccccatggtctacacatttggagcaggaatgttctaaatggactcgatccgtggaggctcgtgtgttcgctggtgatggctcaagagaagctagggagacagagttggctcttgctgaacatcaaggaaactacatggcttcaattgttaagagacttgcacaaccttgagaagaaatacaaaagacaaccttggtggcttctttattttctttctcgttttattcaattctatccatttttttctgagtgtttttgagttttgccattatcggaagaacattgaaccatcataaggttcttacggtaatggtcgtgtgtacaagcttcttcttattactattctctctttgattgttctcctccacaaatgtgaattcctgtcgaataaaaaaaggtttattgtgtgttaaaaaaaaaaaaaaaaaagcttatcgataccgtcgac

SEQ ID NO: 60565 - protein, 100 aa, Triticum aestivum
  peptide (1)..(100): Ceres Seq. ID no. 15220318
MDNNHTAGASRDANRPHGLHIWSRNVLNGLDPWRLVCSLVMAQEKLGRQSWLLLNIKETTWLQLLRDLHNLEKKYKRQPWWLLYFLSRFIQFYPFFSECF

SEQ ID NO: 60566 - protein, 60 aa, Triticum aestivum
  peptide (1)..(60): Ceres Seq. ID no. 15220319
MAQEKLGRQSWLLLNIKETTWLQLLRDLHNLEKKYKRQPWWLLYFLSRFIQFYPFFSECF

SEQ ID NO: 60567 - protein, 52 aa, Triticum aestivum
  peptide (1)..(52): Ceres Seq. ID no. 15220320
  misc_feature (3)..(3): Xaa is any aa, unknown or other
  misc_feature (8)..(8): Xaa is any aa, unknown or other
  misc_feature (15)..(15): Xaa is any aa, unknown or other
  misc_feature (17)..(17): Xaa is any aa, unknown or other
  misc_feature (21)..(21): Xaa is any aa, unknown or other
SSXAVAAXLETSGSXGXQEFXRDHYLEHPNRKNDQSDSSLESHQSTSSLESH

SEQ ID NO: 60568 - DNA, 1063 bp, Triticum aestivum
  misc_feature (1)..(1063): Ceres Seq. ID no. 13661994
acggtatcgataagcttttttttttttttttttggaagatcaaatgatgttactctgactgaggctctgagcaattcctctggtagctaaaaagagacttccttgaaagaacttatgctcagcagtgtcattcagtacaacagagctaacatatagcaaatccatattgtgctcgatctgattcaaaggcagcatggtatgttatatgtagactggatacaataatctccatcctgagcgtctaaaaatgtcactcccaacaacatacacgacaacaagcatgatgtaacattttaattaccttgcaagcagttcagtacataggactcaaggcgctaacgggcaattagctggcatcacaactggatgcagcgactttagtctgcagtccagctttgctccacgacctcacgtactttacggttgtactcccgcttgttctcgctgaataggcgggccgcttctgagttggcaggtgaatttgggtttgggtcgcaaagcagtgactgaatggatgtcaatatagcagctacatcatatatcgggctccactggttttggagaatatctaaacatatgcttccatctgcataaatattgggatgaaacattcgagaaacaaaccgcactgtaggtggcttattaggataatcttcagtaaactgaagtgtcagcttgaacgtaccaccatcccagggagtatcatcaggaccaaaaattacagcattccacagcattatattgttatcctgaggtgtgccacttatgcccgcaggaggatcctgcatcagtcgtttgaaatccctcatcagcctcttccttgcaggggttgacatcgtcgccttctccggctccgggcgccccggcagatcccgcgggaatctactgccgtacaaccaacgccccaggctccacgggctatagcatattgcagtggagtcgatcgggtggagacgccagcgaactaaaccgaaccggatcggggtgcagaaggtttgttcggcaacggaaagggggcggaggggaatggatttggggcgaagcgaggaagatgacaggagtg

SEQ ID NO: 60569 - protein, 76 aa, Triticum aestivum
  peptide (1)..(76): Ceres Seq. ID no. 13661995
MKHSRNKPHCRWLIRIIFSKLKCQLERTTIPGSIIRTKNYSIPQHYIVILRCATYARRRILHQSFEIPHQPLPCRG

SEQ ID NO: 60570 - protein, 52 aa, Triticum aestivum
  peptide (1)..(52): Ceres Seq. ID no. 13661996
MPAGGSCISRLKSLISLFLAGVDIVAFSGSGRPGRSRGNLLPYNQRPRLHGL

SEQ ID NO: 60571 - DNA, 711 bp, Triticum aestivum
  misc_feature (1)..(711): Ceres Seq. ID no. 15227029
tagaacatcctaatcgaaaaaatgacttttccttctccttatcgttctgtacacatctctataagtttatgggtctagactttgcactgtgagtcatctcctttagtcaacgtcgtttcttgttcttgacctacacgtttcgcaggagatcagaaacctagaaaagaaacaacaatgactcagtacaatcaacctcccgttggtgtccctcctcctcaaggcttcttcccaactcctttatcttcatgctgaacttttgggttcgttaaactgctttgatcttgtgataacaggttatccaccagaggggtatccaccgcaaggttacccaccgcagagctacccacagcaaagctatcctcctccgtatgcgccgcaatatcctccaccacagcagaatcagcagccgcatcaacagagcagtactactgggtgtctacaaggatgtcttgctgctctatgctgttgctggctattcgaatgttgtgcagagctggcactttaattgcaagagagtgtttgcaacacaagaaccttggttggaattaaaataattgctggatacaatctctggtctattatatttctttatgtttttatgttcttaggctcataaaaaaaactatggtctatccacgttctagctcgatttggatttgagaataatgggaatgtaaactggtgtagtgacattattcctttgcctccctc

SEQ ID NO: 60572 - protein, 61 aa, Triticum aestivum
  peptide (1)..(61): Ceres Seq. ID no. 15227030
MRRNILHHSRISSRINRAVLLGVYKDVLLLYAVAGYSNVVQSWHFNCKRVFATQEPWLELK

SEQ ID NO: 60573 - protein, 34 aa, Triticum aestivum
  peptide (1)..(34): Ceres Seq. ID no. 15227031
MSCCSMLLLAIRMLCRAGTLIARECLQHKNLGWN

SEQ ID NO: 60574 - DNA, 1206 bp, Triticum aestivum
  misc_feature (1)..(1206): Ceres Seq. ID no. 13661693
accccacgcaccaccagcctcccatgccccaccttctaatcccatgcaccaccgacacatagggccatggccaccccccgatctcccaccttcttccccgcccggggccccagacccctaccttcttcctcgccggagccccacaacccaccaccttctccatggcctcctcccccaccggtggccgcgctcgtcaggcccgacctcgtcggaaccccgcggcgagcccctaccccgacgggggcctatcctcctccagtggctcggaccaccatggctccgccacaaatctgaaacaagactccggcgggggactgccccccgcgctggccagggtcgtcctctctgtccatggccagacgaagactagtcgtgcgcccnntcaccgccatcgacgcgacttggtcaacagccaaagccatggccaccaagcgcgtccgcaacagcaacataattgaagtgcgccggggcacgcgatgcggttcggtgacgcgtggtcgtgtagttcgcggccaccacaggccccctcacctctacctccatggccacgtcctcaactagcggcgccctgccctcgtcgccggccatggcgccgcagccaccaggctcgagcgtctgctcttctcccttgaccctttgctagccggcgtcaccccgggccgatccaggcagttgggcgggggtgtggatgtgcagggtagtgctccccgaggtgcagtgcggcgtgcgtgcgtgcagtccaaaaatcggaggcgtgcagtgtagtagagcaccagatggcagtggccaacagcccctcgatcccgtctctctgccgacggcaactactcacatggcgctgctccttggacccgctccatcaccggcatcccgccgatacgacgagcagcaatggaggacccctgcagatcccgtgctcctcgtcaacggcagccgccacctgttgtctagatgaagaagaagcggtttgcagtccacgcgatgccggcgtgcagtctgtgtgtgcagctcccagcccaacgacggcctgatcctctccatttttggagttaatttatttcccccaatgtcacctcactccttgtagaaaggttatatatagcaactgaacctcttagttagcaatttggtgttgtcactatggaattcgaatttggtgtttggtgcttcccattgatccattttttatcctaaaatcctcaatgc

SEQ ID NO: 60575 - protein, 122 aa, Triticum aestivum
  peptide (1)..(122): Ceres Seq. ID no. 13661694
PHAPPASHAPPSNPMHHRHIGPWPPPDLPPSSPPGAPDPYLLPRRSPTTHHLLHGLLPHRWPRSSGPTSSEPRGEPLPRRGPILLQWLGPPWLRHKSETRLRRGTAPRAGQGRPLCPWPDED

SEQ ID NO: 60576 - protein, 108 aa, Triticum aestivum
  peptide (1)..(108): Ceres Seq. ID no. 13661695
MHHRHIGPWPPPDLPPSSPPGAPDPYLLPRRSPTTHHLLHGLLPHRWPRSSGPTSSEPRGEPLPRRGPILLQWLGPPWLRHKSETRLRRGTAPRAGQGRPLCPWPDED

SEQ ID NO: 60577 - protein, 98 aa, Triticum aestivum
  peptide (1)..(98): Ceres Seq. ID no. 13661696
  misc_feature (74)..(74): Xaa is any aa, unknown or other
MASSPTGGRARQARPRRNPAASPYPDGGLSSSSGSDHHGSATNLKQDSGGGLPPALARVVLSVHGQTKTSRAPXHRHRRDLVNSQSHGHQARPQQQHN

SEQ ID NO: 60578 - DNA, 1022 bp, Triticum aestivum
  misc_feature (1)..(1022): Ceres Seq. ID no. 13661747
aataataataatatcattattgcaaatgagtctgttatcatcacaggtacacaagtgaagcttcctaggtagcatcatctagataattctcaaaagctcagtttcattttcccttttttttacaaagagacaaatgaagaaagaaaggcagaggattgttctgttgtgttttcttaagcaacactgaaagaagtggctgctttctcgacgaatttattggctcccttgaaccacctcttgtctccagcttgtgctttgcagatatatagcttccctccattcacagtggctgtgatcagctgatgcttaccgccttcgtctccatctgctgttcttgtcaacaccgacaagtaatagtatggtttcccaccaacgtcctgaatgtttgtgtccaaaatgtttgctgtcgccactgcattgttgtcaaaacctatctcagaggcagtttcaccaaagtaagcttgtttacctaggagatagttgacctgagagaggaactcttcaggggaaccatagtcagtgatggatttcttgtcagtaggagtgaccatgacattgagattactagtggcgtcaaagttgtcttcatacctaaggacttgtcctggatactctacctctctgcttgggttccatttagctggcacctgcacaatgaacccatccccactgtatgcagtgaagtctgtgttcttctttggcttcccaaacacatttgcagcttcaccgtaggcggcatcagcgggtgatactttggagccaacggcggcggcgccgaccaagagtgtgagagcgagacggcgagagacggcggagttatcgtcttcatggtgttgttgtgctttacacactatctgaacgggtttggagagtgacaagtggcgctgggatgagttggaagatgatgatcgcgcggcggaggaggctagtgcgctctggtgtaggaaacacgcgctgtacgccatattctctctctctctctctctcctttactttttctctctctggtttatgatggaagt

SEQ ID NO: 60579 - protein, 69 aa, Triticum aestivum
  peptide (1)..(69): Ceres Seq. ID no. 13661748
MDFLSVGVTMTLRLLVASKLSSYLRTCPGYSTSLLGFHLAGTCTMNPSPLYAVKSVFFFGFPNTFAASP

SEQ ID NO: 60580 - protein, 60 aa, Triticum aestivum
  peptide (1)..(60): Ceres Seq. ID no. 13661749
MTLRLLVASKLSSYLRTCPGYSTSLLGFHLAGTCTMNPSPLYAVKSVFFFGFPNTFAASP

SEQ ID NO: 60581 - protein, 56 aa, Triticum aestivum
  peptide (1)..(56): Ceres Seq. ID no. 13661750
MLTAFVSICCSCQHRQVIVWFPTNVLNVCVQNVCCRHCIVVKTYLRGSFTKVSLFT

SEQ ID NO: 60582 - DNA, 788 bp, Triticum aestivum
  misc_feature (1)..(788): Ceres Seq. ID no. 13598139
aattcgcacgagatccwttmccccctccagtwmcawcytwatygtgtttaaamaccattgtcgcgcgcagcagctcgatcgtagacaagtgcagtgtatacttgtgtggcaggcggcgagcgacagaagagaggcggagcttggaggtggatcataggctgatagcgcgcacggtgctcccctctcctcctcatcgttttcgttgtggccttgtgtggtagagggcgatggagtgcaggaagatgaagcccgtccttgctctcgtgctgctgctgtcgtgccatcttcttcttccgctggtctcctctgtgcccgtgtcgagaagcgtgtccttggcaaatcatcaagcctcagcttctagtctgactccggaggcggtgcctgttcagggcgtcgtgacgacgggcgccgaggagcaaagcgtcgtcggcgaagtggtggcgcggatggacatcgagatcaacgactaccctggatccagcgccaacggccgccatgagccgcctaggagccctgggagggggtgaagtcgatccgcagaacctccgtgtatagggagattagtaatgggttagtctagtctagatagcacttgttggtgatgactcatgagttcaacgggttaaacatgtccgagcaaggaaagaagcattctaactactttctaatagtgtcaaaattggtcttacaaaaaaaaaaaaaaaaaaaaaaaaaaaaaaaaaaaaaaaaaaaaaaaaaaaaaaaaaaaaaaawtaaaaaaaaaaaaaaaaargyttatcgatmccgyc

SEQ ID NO: 60583 - protein, 99 aa, Triticum aestivum
  peptide (1)..(99): Ceres Seq. ID no. 15222258
MECRKMKPVLALVLLLSCHLLLPLVSSVPVSRSVSLANHQASASSLTPEAVPVQGVVTTGAEEQSVVGEVVARMDIEINDYPGSSANGRHEPPRSPGRG

SEQ ID NO: 60584 - protein, 94 aa, Triticum aestivum
  peptide (1)..(94): Ceres Seq. ID no. 15222259
MKPVLALVLLLSCHLLLPLVSSVPVSRSVSLANHQASASSLTPEAVPVQGVVTTGAEEQSVVGEVVARMDIEINDYPGSSANGRHEPPRSPGRG

SEQ ID NO: 60585 - protein, 72 aa, Triticum aestivum
  peptide (1)..(72): Ceres Seq. ID no. 15222260
  misc_feature (5)..(5): Xaa is any aa, unknown or other
  misc_feature (6)..(6): Xaa is any aa, unknown or other
  misc_feature (10)..(10): Xaa is any aa, unknown or other
  misc_feature (11)..(11): Xaa is any aa, unknown or other
  misc_feature (12)..(12): Xaa is any aa, unknown or other
  misc_feature (13)..(13): Xaa is any aa, unknown or other
  misc_feature (14)..(14): Xaa is any aa, unknown or other
  misc_feature (17)..(17): Xaa is any aa, unknown or other
FARDXXPPPXXXXXCLXTIVARSSSIVDKCSVYLCGRRRATEERRSLEVDHRLIARTVLPSPPHRFRCGLVW

SEQ ID NO: 60586 - DNA, 804 bp, Triticum aestivum
  misc_feature (1)..(804): Ceres Seq. ID no. 13661547
aagagccacctcccacgaacccagaacgctgaacgctgaacctgagggttggacgggagctagggttttagccgccggccatggccctctcctcgtctgcctccacactgctccgccgcctcctcggatccacccccatctcatcctcccgctcctctgtacttcgcgccgccttctgctcctcctcctcctcgggcccctcccccaccttgccaccctccgtcgaccatctccggcgatgacaccgaggtcgccaacgtaccgccgctcaccacccccaagctcttcgtcagcggcctttcaaggctaacgacagatgagaagctcaagagcgcgtttgctcccttcggacagcttcttgaagtgaaagtcataacagatagagtttctgggagatcaaagggctttggttttgtaaggtacgcgagtttacaagaagctgagaccgcatggcaggaaatgaatgccaagtttctggatggatgggtcatttttgtcgaccctgcaaaacaaagggagcagaagcctgctcctcagccggatactgcttcctcccacaccggcttcacgataaataaaactgtaggatggtgtggttagttgcttaggctcttgagtcctacagatcacctagcaagggcatggatatgctgttctcgtgtgtttagggttattaatctgctgtaagatgcttctgattgttgttctagccatagaaagttaatggcattactacctgtattaatacataaaatgataacgctgttccttttttgagataataatgttgcaacgggagggggg

SEQ ID NO: 60587 - protein, 102 aa, Triticum aestivum
  peptide (1)..(102): Ceres Seq. ID no. 15220113
RATSHEPRTLNAEPEGWTGARVLAAGHGPLLVCLHTAPPPPRIHPHLILPLLCTSRRLLLLLLLGPLPHLATLRRPSPAMTPRSPTYRRSPPPSSSSAAFQG

SEQ ID NO: 60588 - protein, 53 aa, Triticum aestivum
  peptide (1)..(53): Ceres Seq. ID no. 15220114
MALSSSASTLLRRLLGSTPISSSRSSVLRAAFCSSSSSGPSPTLPPSVDHLRR

SEQ ID NO: 60589 - DNA, 484 bp, Triticum aestivum
  misc_feature (1)..(484): Ceres Seq. ID no. 14302474
acacatcgaaaacacacaagcgaatctcaatttaaaactttccgagaaaagaaaaatgtctgggcgaggaaaaggagggaaagggattgggaaagggaggagccaagaggcacaggaaggtcctccgtgacaacatccagggcatcacgaagcctgcgattcgtcgtttagctagaagaggtggcgtgaagcgtatcagcggtttgatctacgaggagactcgcggggttctcaagatctttctcgagaatgtgattcgtgatgccgttacttacactgagcacgctaggaggaagacggtgacggcgatggatgttgtctacgcgttgaagaggcagggacgaactttatatggattcggcggttgatgggatgattttgtaaatcgcgtttgtctttagggtttgtttaatctattaaagctgttttagagtttcgtttagaatgtttcagcgttttgaattgaatgaaaacactttttctc

SEQ ID NO: 60590 - protein, 56 aa, Triticum aestivum
  peptide (1)..(56): Ceres Seq. ID no. 14302475
THRKHTSESQFKTFREKKNVWARKRRERDWEREEPRGTGRSSVTTSRASRSLRFVV

SEQ ID NO: 60591 - protein, 42 aa, Triticum aestivum
  peptide (1)..(42): Ceres Seq. ID no. 14302476
HIENTQANLNLKLSEKRKMSGRGKGGKGIGKGRSQEAQEGPP

SEQ ID NO: 60592 - DNA, 894 bp, Triticum aestivum
  misc_feature (1)..(894): Ceres Seq. ID no. 13664169
cggccggccgcatcatcggcggcgagtaaaactcccgccgcgctcgtcctcacatgaagaaccaccggggagatgggagcccggctccgcgtgccggagcggccggaatggccgttcgacggcaagcacgccagtgggacgccgagggccaagaggcggcggcgaacttccacgcgcggcgaaggcgggtgggtggccggagtcggggacagcaggcacggcggcgcggcagcgtcgcccgggacgcgcgcaaccgtcggcaacctctgaagcggtgcgtcgccgacagtctcaacaaccgctggagtcggatgctgcagcggcgcggccccgacggttccaacctcctgaggcgctgctaccaccgggtcaaactacccatccatgcgctgagcaccaaaacggcggcggcggagccgccagtgccggatcgatgcccccatgggcctcgagccttggtgcagccggaccggcgagaagccgggcgggcacatcgggctgcacgggctggttcgagggccccgcgccgtgccggtggttgcgacggaggttctggcggcgctggttccaacctccacgccggaagcggcggaggtcgcgcacatgacgctggaagcggcgatgtccgccaacaccatggcggcggtggcgagcgacgaagcggtggccacggccattggcgcgaaggaggcgaagaaacagggacattggaactcgaggcatggttccgtttctcaccttttctctgttcttctcgtcggaatcgctctcgccggagtgcgtgctgataacgtgttagtgtcgattgagagccaaagcgaacgagagacaaatgaatcaattgtatctttattgatggttacagatgccttatatacaggggaaacagacgcc

SEQ ID NO: 60593 - protein, 244 aa, Triticum aestivum
  peptide (1)..(244): Ceres Seq. ID no. 13664170
MKNHRGDGSPAPRAGAAGMAVRRQARQWDAEGQEAAANFHARRRRVGGRSRGQQARRRGSVARDARNRRQPLKRCVADSLNNRWSRMLQRRGPDGSNLLRRCYHRVKLPIHALSTKTAAAEPPVPDRCPHGPRALVQPDRREAGRAHRAARAGSRAPRRAGGCDGGSGGAGSNLHAGSGGGRAHDAGSGDVRQHHGGGGERRSGGHGHWREGGEETGTLELEAWFRFSPFLCSSRRNRSRRSAC

SEQ ID NO: 60594 - protein, 226 aa, Triticum aestivum
  peptide (1)..(226): Ceres Seq. ID no. 13664171
MAVRRQARQWDAEGQEAAANFHARRRRVGGRSRGQQARRRGSVARDARNRRQPLKRCVADSLNNRWSRMLQRRGPDGSNLLRRCYHRVKLPIHALSTKTAAAEPPVPDRCPHGPRALVQPDRREAGRAHRAARAGSRAPRRAGGCDGGSGGAGSNLHAGSGGGRAHDAGSGDVRQHHGGGGERRSGGHGHWREGGEETGTLELEAWFRFSPFLCSSRRNRSRRSAC

SEQ ID NO: 60595 - protein, 201 aa, Triticum aestivum
  peptide (1)..(201): Ceres Seq. ID no. 13664172
GRPHHRRRVKLPPRSSSHEEPPGRWEPGSACRSGRNGRSTASTPVGRRGPRGGGELPRAAKAGGWPESGTAGTAARQRRPGRAQPSATSEAVRRRQSQQPLESDAAAARPRRFQPPEALLPPGQTTHPCAEHQNGGGGAASAGSMPPWASSLGAAGPARSRAGTSGCTGWFEGPAPCRWLRRRFWRRWFQPPRRKRRRSRT

SEQ ID NO: 60596 - DNA, 1225 bp, Triticum aestivum
  misc_feature (1)..(1225): Ceres Seq. ID no. 13664309
gtcgacggtatcgataagcttttttttttttttttttgtgtagtgctaacaaagtacactattcgcaatagattatagttttgtttctcgagctgtaaactgaagttggtctagaatatcagttcatgggtagcatgaaagaggtggaatggaagcaccggccaccgggtgattcctcgagctgcagcgacatctatgcgagctggacaaatcctctggcgatggtgccgttggcgccctggggcaggaacccgccggggacctgctcgttgcgagagccgtagaggatgcgcagcgcctccgccggggtgcgctggtacccaagcgagtccacgccggcgccgaggatgttgctgatggtgcgccgctcggcgccctggtgccggtccagcaccttgactccctcgtccttggcgccgcagccggacaggtcgttgcgccagtcggagatccggcgcgtgaactcggccaccgtgcggcccttgtagggcgccaccgtctcgtcggcgcgctggtacagcagcatcctgatcaccgcgtcctgcccggcctccaccgccaggacgctggcgtggaggcgcttggaggcgtagcccatgaggttggggctgatgccgacggcggcggcggcggtgacgtgaggcaggatgtaggaggcgaggaggaagttgacggtgccgttgtaggcgtcgaagggcgggtcgaggcgcgcgcccatggcgtcgtccatgatggcggcgaagcggtcggcgctgaggtcgatgggcgggcgcgggaacccgccgttggcctgcgtgatggccctgatgtggcccacctcctggtacccgagctcggcggcgatctcggtggtgcgaaagtcgaggttggccttgcgcgcgccgacgggcgccgggccgcccgccgagaggttgcggtcgaggtagtcgatgccccgccccagcgcggcgtggaggaaccactcagcctccacgaacttggggttgagcaggaactgcagctgctccatgtcgctcgggtacaccgcgatggcgccccgccgcggcaggctcggccggcaccgcgggtcgtccgtctgtgtgactgtgacggtcgccgcgagcgcgacgacctgcaggcccgcggccagcagctgtagcaggaaggcgccgtgcgcgcgagccatggccagggaggacggagcgcctgtcgtgccgtgctagtgagagctcgcgtgcttggctct

SEQ ID NO: 60597 - protein, 90 aa, Triticum aestivum
  peptide (1)..(90): Ceres Seq. ID no. 13664310
MPRPSAAWRNHSASTNLGLSRNCSCSMSLGYTAMAPRRGRLGRHRGSSVCVTVTVAASATTCRPAASSCSRKAPCARAMAREDGAPVVPC

SEQ ID NO: 60598 - protein, 69 aa, Triticum aestivum
  peptide (1)..(69): Ceres Seq. ID no. 13664311
MASSMMAAKRSALRSMGGRGNPPLACVMALMWPTSWYPSSAAISVVRKSRLALRAPTGAGPPAERLRSR

SEQ ID NO: 60599 - protein, 66 aa, Triticum aestivum
  peptide (1)..(66): Ceres Seq. ID no. 13664312
MRSASAGVRWYPSESTPAPRMLLMVRRSAPWCRSSTLTPSSLAPQPDRSLRQSEIRRVNSATVRPL

SEQ ID NO: 60600 - protein, 64 aa, Triticum aestivum
  peptide (1)..(64): Ceres Seq. ID no. 13664313
MSLGYTAMAPRRGRLGRHRGSSVCVTVTVAASATTCRPAASSCSRKAPCARAMAREDGAPVVPC

SEQ ID NO: 60601 - DNA, 1019 bp, Triticum aestivum
  misc_feature (1)..(1019): Ceres Seq. ID no. 15173917
agttttcgcaacagaagaaccaccgcgcgcgccagagagagagagagagagatggcggcttctgcgctgccgtggaagcctcttttctgggagcgcttcgaggattcgcgtgccctcgccgccgccgcccgcggcgacctcgccgctgccaccgccaccatcggcatcgcactcgcatcgcctctgcgcggtggtgacgtcgaccgcgctctctcgctgattggagagtcggcggacaagcttgccatggcgagcaagcatcttgccatcctgctttccggccttgggaccgtcgagctcctcgcgcgccgacggatccgcggcgacgactcactagagcagcaggcccgaccgagggcgcgcgaggccagggcacgggccggcgccgcctacgacgacgtggctctctctcgcggccacctgggagccgcggcacgtctggttgcctgcggcgacctccccgacatccacttcggcgccgagtttctcgccgccaccagagccgcggcggcggcctcggagcacctccgcggggtggacgacgccctgcgcatccgcgacgacctcgcgtctccccttcgccccctgcaccgcagcgtccaccccgacacgcgcccagaggcggcggcctcggagcacctccatggggtggacgacgccctgcgcatccgcggcgacctcgcgcctcgttagtgttgcgttctgttactctacatggttaattcattcatttactcaatgttgatgtacacgttgtatagcttgcacgtgctgtcatgatgtactacaggaccgagggcaagtgattcacacacatactagcccacaaacgtatatggtgcccggtgtatgggtcagcgttggaggcaggcaaatatcagatgataccgaggtttaggtaataccgtgatgcaggctcatgacagccattggatctcagatctgacggctcatgggagcttttaggggggtgtttggttcaggggactttttagtcccagagactagaaaaagtcccc

SEQ ID NO: 60602 - protein, 230 aa, Triticum aestivum
  peptide (1)..(230): Ceres Seq. ID no. 15173918
SFRNRRTTARAREREREMAASALPWKPLFWERFEDSRALAAAARGDLAAATATIGIALASPLRGGDVDRALSLIGESADKLAMASKHLAILLSGLGTVELLARRRIRGDDSLEQQARPRAREARARAGAAYDDVALSRGHLGAAARLVACGDLPDIHFGAEFLAATRAAAAASEHLRGVDDALRIRDDLASPLRPLHRSVHPDTRPEAAASEHLHGVDDALRIRGDLAPR

SEQ ID NO: 60603 - protein, 213 aa, Triticum aestivum
  peptide (1)..(213): Ceres Seq. ID no. 15173919
MAASALPWKPLFWERFEDSRALAAAARGDLAAATATIGIALASPLRGGDVDRALSLIGESADKLAMASKHLAILLSGLGTVELLARRRIRGDDSLEQQARPRAREARARAGAAYDDVALSRGHLGAAARLVACGDLPDIHFGAEFLAATRAAAAASEHLRGVDDALRIRDDLASPLRPLHRSVHPDTRPEAAASEHLHGVDDALRIRGDLAPR

SEQ ID NO: 60604 - protein, 148 aa, Triticum aestivum
  peptide (1)..(148): Ceres Seq. ID no. 15173920
MASKHLAILLSGLGTVELLARRRIRGDDSLEQQARPRAREARARAGAAYDDVALSRGHLGAAARLVACGDLPDIHFGAEFLAATRAAAAASEHLRGVDDALRIRDDLASPLRPLHRSVHPDTRPEAAASEHLHGVDDALRIRGDLAPR

SEQ ID NO: 60605 - DNA, 626 bp, Triticum aestivum
  misc_feature (1)..(626): Ceres Seq. ID no. 15173565
actgatcatccacgcatcgatcccgtagcttcttcccaagttgcgagatcatggtgcgcgcgctctcaccttcttctcccgtcgccccctcctccttctacgctctgctgctgctcgtagtggccgcgttcatcgggccgctgcgggtggcgacggcgcagagcgtgccggcgccggtgccggtccgcgtcggggtgatcctggactgggcgaacaaggggtcgtcggcggtgtcgctgcggcggcggaccggcattcagatggcggtggaggactactacgcggcgcacccggggtcggccaccagggtggagctccatttcggggactccaaaggggacgtcgtcggcgccgcttccgccggacttccgcaccaagagcgagatcgtcaggtgcaatagttccggcgaactctaccctttctggtggccgtcttccactccgcaagctctctccgccaccacgtcatcctcaacattgtggcatcgtcgcctaggccatctcagtagtcaagctttgtcacacctagcacgtgctttttcttttccttgtaacaaaaacaataacgatgaccatttatgtcatgcttgtcaattaggaaaacatgttcgcctaccttttgatac

SEQ ID NO: 60606 - protein, 116 aa, Triticum aestivum
  peptide (1)..(116): Ceres Seq. ID no. 15173566
MVRALSPSSPVAPSSFYALLLLVVAAFIGPLRVATAQSVPAPVPVRVGVILDWANKGSSAVSLRRRTGIQMAVEDYYAAHPGSATRVELHFGDSKGDVVGAASAGLPHQERDRQVQ

SEQ ID NO: 60607 - DNA, 1015 bp, Triticum aestivum
  misc_feature (1)..(1015): Ceres Seq. ID no. 15172627
accaataactcctctctgaattttccgtggctgcacgttcggcacaggccacactccgcgcgcgcgcgcatacaggccacactacaaatcacactccacacacactgcccgaagtgcggcgccggcgatggatgctggtggaggtggggctgctgccggtggcggtgaagcagcagctgcaggtggagatggtgccagggcggcgacgggagccatccgtgcggtggcgaaggtgcacctcgccctcggctgggcggcggcgactttcgccctctgcgccgtcaccctccagccccagctgaagccgcggggaggtcagtgcgcggccaccgaggtggacgcagcgaccatgcgcgccaaggggctgctgttgctgctccccgccggcgcccaggcagcggcggccacggtggccgccttcgcgccggacgcctggagatggaggcggctgcacgtcggctggaccttcgcggccttcgcgcacgtcctcagcgtcttcacctacttccacctcgaggacgccttcactgctgcggccgccgtcgccttcagcggctgccccggccacatgtacgtggagacggccatgttcatcgcccacaacgtcctgctcttcgtgcccctctgcgtcttcttcattgtaggcatcgccgcactcgtcgccgccgtggtagccctttgattcctacaaacatatcgatgcatccatgcctagcgaagcttgtccagtactatgctatgtcgtccagcactccagtctaagctactagctaatgattgatcaatgtggcactaattagggttaattggtgtacatgctgctctgttggaatgctagatcgatgcatgatgtgcatatggttggagatgagcatgggatcgagtttgtactctttagagctagttattatatgaatgcatggagcttagtttgattctgtgctaaaactgcagcttgctgtgatgtgtttgtggcttgttttcttcttctttattttcgagattagtttgatgt

SEQ ID NO: 60608 - protein, 184 aa, Triticum aestivum
  peptide (1)..(184): Ceres Seq. ID no. 15172628
MDAGGGGAAAGGGEAAAAGGDGARAATGAIRAVAKVHLALGWAAATFALCAVTLQPQLKPRGGQCAATEVDAATMRAKGLLLLLPAGAQAAAATVAAFAPDAWRWRRLHVGWTFAAFAHVLSVFTYFHLEDAFTAAAAVAFSGCPGHMYVETAMFIAHNVLLFVPLCVFFIVGIAALVAAVVAL

SEQ ID NO: 60609 - protein, 110 aa, Triticum aestivum
  peptide (1)..(110): Ceres Seq. ID no. 15172629
MRAKGLLLLLPAGAQAAAATVAAFAPDAWRWRRLHVGWTFAAFAHVLSVFTYFHLEDAFTAAAAVAFSGCPGHMYVETAMFIAHNVLLFVPLCVFFIVGIAALVAAVVAL

SEQ ID NO: 60610 - protein, 107 aa, Triticum aestivum
  peptide (1)..(107): Ceres Seq. ID no. 15172630
MEAAARRLDLRGLRARPQRLHLLPPRGRLHCCGRRRLQRLPRPHVRGDGHVHRPQRPALRAPLRLLHCRHRRTRRRRGSPLIPTNISMHPCLAKLVQYYAMSSSTPV

SEQ ID NO: 60611 - DNA, 1154 bp, Triticum aestivum
  misc_feature (1)..(1154): Ceres Seq. ID no. 12613472
agctaaaatgaagattcaattacccaattcagttacacaaatacataagcttgctacaacgcgatcgtcgccaccgtttctcacaacacacacaaaggggtgcacaggatcaccagtgcaccccaacccagatttcaaatttacagcctagcacccccgacacagcccggacatctcgactaacagcacagaacaggaaaaactgctactggaaaactatcgccaagccctaggatctccctccaaggatctacttcttggccttcttggcggccggggccttcttcgccggcgcagccttcttggcgggcgcggccttcttcaccggcgtggatctcttggtgggcggcttcctggcggcggccttcttgggcgccgcggcggcaggggccttcttccctggcgcgtccttggccgaggtcttggcagccttggcggggcggcccttgggcttggcggcagccttgggcttcgcggcggccttggccttgggcttcgcggcggccttgggcttcgcggcggccttgggcttggcgggcgccttggccttgggcttcgcggcggccttcttggcgggcgccttggccttggtcttggtggcggtcttcttggctggcgccttcttcttcgccgcgggcttcttcttcgccgccggcttgggcttggccgcggcggccgacagcttgtacgaggccttgaccttggtcagcttgccggaggcgaccagcttcttgagctgcaccgacagaatcttgcggaagttggccgggaggtgcgccttgtgcttgtcctcgacgaacttggcgatggcgtactggctcgaccccgtccgctccttcagggcggtgatggcctccgacaccatctcggcgtaggtcgggtgggcgggggtggcgcggggcttcctcggggcggagggcttcttggccttggccgccttggccttggtctccttggccggcttcgcgtcgccggcggcggcctcggccgtggtctccacgacggggtcggcggccacctccacctcaggggccgggacatcggcggccacgtcggtcgacattgcagcgaggaagcgaggggagaggagagcgctggtgcttgcttgccggagccgagagagatgcgtgagctgaggcgcggtggtgggtgag

SEQ ID NO: 60612 - protein, 49 aa, Triticum aestivum
  peptide (1)..(49): Ceres Seq. ID no. 12613473
AKMKIQLPNSVTQIHKLATTRSSPPFLTTHTKGCTGSPVHPNPDFKFTA

SEQ ID NO: 60613 - protein, 47 aa, Triticum aestivum
  peptide (1)..(47): Ceres Seq. ID no. 12613474
MKIQLPNSVTQIHKLATTRSSPPFLTTHTKGCTGSPVHPNPDFKFTA

SEQ ID NO: 60614 - DNA, 1292 bp, Triticum aestivum
  misc_feature (1)..(1292): Ceres Seq. ID no. 13654213
attgggtaccgggccccccctcgaggtcgacggtatcgataagcttttttttttttttttttcttttttttttttttttttttttttttttttttttttttttttttttttacaacaggttaacagctaccatatgtagaataacattattctcatttcaattctcaggaagcgaaacagcaaggactggtccatgatctacatgagtctgatacaaactcagaagtgcaaagcagagtggaaagaccactcagttacaagggggtttggcatcaagcaagacttggtctctcctctttcatctggctgctcggtgctttgctattaccctcagttttctttctgcccctctggtgcctcatggaacaccacctcgttctcaggcaccgtccttagctcatcccccacagactcggcaccgcccgacgctccggcgtcatcagggtatctgacaaccaccacggggcagacgcagtggtgcacgcagtagtcgctgacactccctagcctgccattacctgccctgcgggaggcgccgaagccgcggctgcccatgatcatggcggagaggccgaggcgctcggcctcgaggcagaggcgctccttcatgtcgtggtccttgacgatgtggatcttgaagggaatctgcgcggcgacgagcggctgcgccaggtcctgcgacttggtggaggtgaaggcgtcgaagtcctcctcccgcttcttgcgcgcgtcctcctccgggtccccggacgccggcgccgcgcctcctccccccttctcgtcgccgtcgtcgacggtgacggggatggagccccagtcggcgccgtagagcacggaggtggggcgcacgtggaggagcacgacggcgtcgcccgggcgcaggtagttctgcacggcccacttgacggcgaaggcggactcgtcggacaggtcgacggcgatggcgatgcggcggtgcggcgaggaggaggcggcgagggaggagaagaagtagcgcggcgagctgggctggatcgccgccaccgccgccgcctgcgacgccgccaggcgcacggccggcggcggcgagggcgaggaggagggggacttgccgccggcgccggcgccggtcggggaggccgggtggtgcgtcgccatgatggttgttggtcctccggctgctcgatccgaatgcggaacactactgtgcagctctcgatctgatgaggggaatctcaggagagaatggggggagaggagacgagggttttgccaaagattgagatttggggctgtgcaacttgcggtggact

SEQ ID NO: 60615 - protein, 98 aa, Triticum aestivum
  peptide (1)..(98): Ceres Seq. ID no. 13654214
MIYMSLIQTQKCKAEWKDHSVTRGFGIKQDLVSPLSSGCSVLCYYPQFSFCPSGASWNTTSFSGTVLSSSPTDSAPPDAPASSGYLTTTTGQTQWCTQ

SEQ ID NO: 60616 - protein, 95 aa, Triticum aestivum
  peptide (1)..(95): Ceres Seq. ID no. 13654215
MSLIQTQKCKAEWKDHSVTRGFGIKQDLVSPLSSGCSVLCYYPQFSFCPSGASWNTTSFSGTVLSSSPTDSAPPDAPASSGYLTTTTGQTQWCTQ

SEQ ID NO: 60617 - protein, 91 aa, Triticum aestivum
  peptide (1)..(91): Ceres Seq. ID no. 13654216
MIMAERPRRSASRQRRSFMSWSLTMWILKGICAATSGCARSCDLVEVKASKSSSRFLRASSSGSPDAGAAPPPPFSSPSSTVTGMEPQSAP

SEQ ID NO: 60618 - DNA, 922 bp, Triticum aestivum
  misc_feature (1)..(922): Ceres Seq. ID no. 13596572
aacatctatgaaacgttttctataatactccagcaaaatcgttgggtttaattcttacaaatcacggtgtattcctgtgctcaaaatctgcctcatcattacgatagacggcattatttttacagaaccacgcagagaaagccaaacaggcttgattaatcagtactcgttgaaatgtatggcgccgagcttccacacgaggtacgtggtcccgaacatgacggtggtgatgatcccgaaggacgcggcgacgatgagcacgtccgtgcccacgggcagcgccgccagccagtcgaacgtccacccgtccttgggcatgccgcgcttggtgtcgtccagcaggttgctcggcgcctccggcagccccgaccgcttccgcccgcccttcttcccgccgtccgtctcccgcagcgcgtccagcacccggctcccgaactccggcttggacgatgaagagcccttcttgtccgccggcgacgccccgccccctggctccgcgtacttgcccagcacgcgcgccgcgcgcagccgctcccgcgccgtcagcggcacccgcttcggcggttcgcccggctgcggctgctggccgttgccggacgccaccgggttcacgccagcgctgatggttgtactttcctgcgcctccgccggcgccgcccggtcgttgtccgtggtcgcgcagggtcttgcgtgcttgagctcattctgaggcctttgcggggcggcagcggttcctatcttgtggaaagcatgcctggagcagaaggcgagctgggtgtaggacggggaagatctggagatgcctcctagtttggcagtggcagtcttggagggagaggaaccgaggctggtggcagccatcttcttctcacctgctcggccactgcattttgtgctctaggccagaagagatagaatttgt

SEQ ID NO: 60619 - protein, 176 aa, Triticum aestivum
  peptide (1)..(176): Ceres Seq. ID no. 13596573
MAPSFHTRYVVPNMTVVMIPKDAATMSTSVPTGSAASQSNVHPSLGMPRLVSSSRLLGASGSPDRFRPPFFPPSVSRSASSTRLPNSGLDDEEPFLSAGDAPPPGSAYLPSTRAARSRSRAVSGTRFGGSPGCGCWPLPDATGFTPALMVVLSCASAGAARSLSVVAQGLACLSSF

SEQ ID NO: 60620 - protein, 163 aa, Triticum aestivum
  peptide (1)..(163): Ceres Seq. ID no. 13596574
MTVVMIPKDAATMSTSVPTGSAASQSNVHPSLGMPRLVSSSRLLGASGSPDRFRPPFFPPSVSRSASSTRLPNSGLDDEEPFLSAGDAPPPGSAYLPSTRAARSRSRAVSGTRFGGSPGCGCWPLPDATGFTPALMVVLSCASAGAARSLSVVAQGLACLSSF

SEQ ID NO: 60621 - protein, 159 aa, Triticum aestivum
  peptide (1)..(159): Ceres Seq. ID no. 13596575
MIPKDAATMSTSVPTGSAASQSNVHPSLGMPRLVSSSRLLGASGSPDRFRPPFFPPSVSRSASSTRLPNSGLDDEEPFLSAGDAPPPGSAYLPSTRAARSRSRAVSGTRFGGSPGCGCWPLPDATGFTPALMVVLSCASAGAARSLSVVAQGLACLSSF

SEQ ID NO: 60622 - DNA, 723 bp, Triticum aestivum
  misc_feature (1)..(723): Ceres Seq. ID no. 13596504
gacagaaaatgaatcttccatttgcaacgctgattcaatgttgatacaaagatcagataacattaaagaggggccatgtctgcagagcgactccaatgactacagaaagaattgttcaaacagacgggaaaaaagagagaatattacatgcgaccctggaaatatcaacaggaaaattcagaactcaagcccattctctctagcagcatcggctagagctttgatgcggccatggtagaggaaaccccctcggtcaaagaccactttggtgattcctttctccaagcaggacttggctatcacttcaccaatcttttgtgccacttcagttgttggcccagcagagtactcaagctcctttgaaagagctttgtgcattgttgaggcagaagccagagtgcatgactttgtatcgtcgatcacctgagcatacaaatgcttgtttgagcggaaaacgctcagtcttggcctctctgtggtgccactcaccttcttgcggagacggtcgtggcgggcgatgcggtcggcattgggcgtggacaccttggccttggcgaggacgaccagggcggcccgccgcgccggcgagtgcgagggcgcggaggcggacgggaggtggacgccgcggctgcccgacacgaaggccgggaaggagtgggtggcgccggcgagcgccggcgaggctagcatggctcactttgcgctgctctgctggtcgctggg

SEQ ID NO: 60623 - protein, 107 aa, Triticum aestivum
  peptide (1)..(107): Ceres Seq. ID no. 13596505
MTLYRRSPEHTNACLSGKRSVLASLWCHSPSCGDGRGGRCGRHWAWTPWPWRGRPGRPAAPASARARRRTGGGRRGCPTRRPGRSGWRRRAPARLAWLTLRCSAGRW

SEQ ID NO: 60624 - protein, 78 aa, Triticum aestivum
  peptide (1)..(78): Ceres Seq. ID no. 13596506
TENESSICNADSMLIQRSDNIKEGPCLQSDSNDYRKNCSNRREKRENITCDPGNINRKIQNSSPFSLAASARALMRPW

SEQ ID NO: 60625 - protein, 68 aa, Triticum aestivum
  peptide (1)..(68): Ceres Seq. ID no. 13596507
MRSALGVDTLALARTTRAARRAGECEGAEADGRWTPRLPDTKAGKEWVAPASAGEASMAHFALLCWSL

SEQ ID NO: 60626 - DNA, 1775 bp, Triticum aestivum
  misc_feature (1)..(1775): Ceres Seq. ID no. 13589042
gtgtttaaacacttcaaaggcattgttcttatttattctttctgtgtcggagaaaataaagtaaacaggctgatatccccacaacgctatactaaagctggaagtggatcttcatgggaaacaacactggaaatgactaatgcacatacattctcatcagtttaacaagtctcacaagttccacatatattaagctgtttacagtatgcactagaacgcacaacatcgttcctaaaagcacttgtgagcggtgagctcacatgacgatctcaggcttcaggatgcttgacttgatctctttgtgcgggagaacaacaccgccattgctgtagacctcgtcacctacatgtacatcttctcccaggatcgtcatattctctatgcgtgcccattgtccgaccgtcgaatgccagccgataatgctgtttgagatgcacgcatgcttcttaatgcgcacaccacgcatcaccgtgcatcgggagagcctcacaccatcctccacgacgcatccaggtccaatagcgacatcaggaccaatcaggcaaccctccccaatcttggcgctgtcgtgcaccaggacattccccacaatatgtgctccggcggccagcttggcagctgacttcttcctgagtgaatctagataaagacgcaagccagtaatgtagtcccttggctggccaatatccatccaaaaacctggaagaaccatggcgtagagcttctgatcagcagcaattcgcggaaagacctctttctcgattgaagttggctttaactcgatgcggtccaggacagacggatttaacaggtaaattccagcattgatcttgttgcctacaaatatttttggcttctctacaaatctttccacaactccagttgtgtcctccataaccacaactccatatttcgaaggttcatccaccttagtgaccataattgttgcctcaccgccatggctcttgtgaaactgtatgagctcggcaaatgggtattcacttatgacatcactgttgaggacaaagaacggctcaccagatccatccacgagcttgtcccttgccagggcaagagggccagcagttcccaagggttcagtctcttgggagcatgtgattgtgatgccaagcttatcctcaaaatccttcaagaaattaatcatgacctctgggcggtagttgatggctaaaataacctctgtaacaccgacatctttcaaggcttcaatctgcacaaattggcaggttttaatcaataaaatttcctttcctcgactttgcacaaattgttctgcatttgtgacaaaaagagaagaaggggaaatcctgatggtgacacacaaagttttttcccaggcacgcgcacacagcaattttgcaaccacctaagctagcaagggaattgattaacgtttgcagggcgaaagatttcttagctcccatcagaactctgaactgaacacattgaaatgctactaatggcaattggctataaaagttaaagcatcatctacatgactactaagggtttgaagtttagctattgttgttgcggtaaggcgaatgatgcgcaacagcagtaggattaactcgcacacaactcactgactcacagcaccatactacacaatctctatcaagcgcagccgtctgtctacctggtgcagaatcatttttcgattaggatgttccaggtaatggtctcgtgcgaattcctgcagcccgggggatccactagttctagagcggccgccaccgcggggagctccagct

SEQ ID NO: 60627 - protein, 88 aa, Triticum aestivum
  peptide (1)..(88): Ceres Seq. ID no. 13589043
MRAHCPTVECQPIMLFEMHACFLMRTPRITVHRESLTPSSTTHPGPIATSGPIRQPSPILALSCTRTFPTICAPAASLAADFFLSESR

SEQ ID NO: 60628 - protein, 77 aa, Triticum aestivum
  peptide (1)..(77): Ceres Seq. ID no. 13589044
MALVKLYELGKWVFTYDITVEDKERLTRSIHELVPCQGKRASSSQGFSLLGACDCDAKLILKILQEINHDLWAVVDG

SEQ ID NO: 60629 - protein, 75 aa, Triticum aestivum
  peptide (1)..(75): Ceres Seq. ID no. 13589045
MLFEMHACFLMRTPRITVHRESLTPSSTTHPGPIATSGPIRQPSPILALSCTRTFPTICAPAASLAADFFLSESR

SEQ ID NO: 60630 - DNA, 1421 bp, Triticum aestivum
  misc_feature (1)..(1421): Ceres Seq. ID no. 13598722
gagagttgtactgtagttatattataggcgtcgaatttaccagagccgggcgaacacataccataggttcaacataagatggatcacagtatcaacataataaacatggacaggtgaataaggcagatgggcacaacgagctaataagaaaccaaccaactttgctgcatacaagcttgaatagatgggacagatatgatgttgaacggctaggctcagcagcatcatataaaatccccaagttcttcggaataacggaggatcccgtcctcgctgctggcgaagcggaagcggctgaagtcaatcttgttccactcttccctcagctcctcccaaaatttgccactgttgtcatagtagtcttcgtcaacctcggcgtaccccttctcgatcagatccttgcggaccttggcctgcaactctccaaacctgtcatcggcctccttgtcgttccccggcggcagctccttgtccagctcctcgcttctcttgatcatatcagcgggggatattgtggacggaaggatgtggatgttggggggctcccacttgtcggccaagatcagccttatgtcgtttttcagcagacgaaccttgcctggggcggccacgtccctgtactcgggcttggactgctcgaggaccctctccaccgcggcatccagctcttgaggttccagattggcggcctcgggaaagtttaacaacgtctccctgaccactggccggtgcttcgcaaattcagactcccagtcataatcatgatcatcctcgtattcagattcataatcatcatcgtcatattcagactcatagtcatcctcatcctcatcataataaccatcatagtcagcatcatcttgataataaagatcggcatcctcatcagcataaacatcctgttccccagcctcagcctgaggctcagaaacaggctcctgaatctccgcctcagcctgaagctcagaaacaggctcctcgatctctgcgtcagcctgaggcccagaaaacgttgccttagcgatgccctgctccaggaaggggtcgaccaccataggctcggcggcggccacagacacaacatcagcgcgtctggggagttttgccgtggccagaatctcattgatctccttttcctgctcctgctcttcatcatgatcctgatctgcctccttggccttccttttcagaagagcatactcgcggtttaacgccgtaggctcggtggcgcatcgctccggcgtgccgaacccgtcgatggctgacttctgctgcgcgggattggaggaaatctcttcggccgtgcaccgccccagcacgcgcttggtggcgaaaccctcgttgccggccatcggcggatgtgatcctgatgccgaatccactcgcttcgccaagtttagtgagattgggatttgttgtag

SEQ ID NO: 60631 - protein, 149 aa, Triticum aestivum
  peptide (1)..(149): Ceres Seq. ID no. 13598723
MIILVFRFIIIIVIFRLIVILILIIITIIVSIILIIKIGILISINILFPSLSLRLRNRLLNLRLSLKLRNRLLDLCVSLRPRKRCLSDALLQEGVDHHRLGGGHRHNISASGEFCRGQNLIDLLFLLLLFIMILICLLGLPFQKSILAV

SEQ ID NO: 60632 - DNA, 1058 bp, Triticum aestivum
  misc_feature (1)..(1058): Ceres Seq. ID no. 13583438
gctagaagacttttattttatttttatgtcattttatttggcgtaccatgagggaattaaaatttgccattgcctgatgtaggtgcaaagcaacccacatatttagttactgctgatgatctggactctttactagccatagaggtccagcctctagatgaccgaaaaagctttcagggtttacgtcgtccaagaggatggccatgatagcctcctctggttgacactgtcgagtccatcactttcagggtttacgtcgtccacttggttccagctattgagcatcgagccctctctccactgaggtggcgtcaagaactttgaatcatcactggagccacctggggtcattgacagagaaggaccaacacgtagtgtttgaagagtagaaaaggattccctcatcgcagacatggcctcgaagaaccgggtgcaggatgcaagcgcagcaggtatcggtcgtagcatttcaccccatacagcaggcgactctctgaagttttgactccactggaaatctccaactgatgctgtcaatgccccatagtcacttgccgctttcagaagcagctccgagaattgtttctggtattcagcttcaacaggaatgcaatcaagcgaataaggttgctgcagacgggcaataatgcggtccttgttttgaataacatctttcaaaatagcagtaattctggccaacgattcacacttcttttccatttcactaacatgagtcaaatgagcaatgtttttatcatcctttctgccttgtagctcgacttgcaaattggcaatgttccgctgcacgaccgtcagctcccttaataccctcaccaggttatcacttttgtcggtgttctgatcttcctgcgcgggaggggccgggaagccgaggtccccggcgatggcgagcgcctccgccatgccaccgagccgcttcgccggcttctgcgccgccgccatggcctcgaccggttgttgggtgagctggtgcgcgttgcgatttcgcctcgccggccggttgagcgtttgctgtaagtcgagtacggagtactggt

SEQ ID NO: 60633 - protein, 51 aa, Triticum aestivum
  peptide (1)..(51): Ceres Seq. ID no. 13583439
MASASAMPPSRFAGFCAAAMASTGCWVSWCALRFRLAGRLSVCCKSSTEYW

SEQ ID NO: 60634 - protein, 48 aa, Triticum aestivum
  peptide (1)..(48): Ceres Seq. ID no. 13583440
MTEKAFRVYVVQEDGHDSLLWLTLSSPSLSGFTSSTWFQLLSIEPSLH

SEQ ID NO: 60635 - protein, 45 aa, Triticum aestivum
  peptide (1)..(45): Ceres Seq. ID no. 13583441
MPPSRFAGFCAAAMASTGCWVSWCALRFRLAGRLSVCCKSSTEYW

SEQ ID NO: 60636 - DNA, 1395 bp, Triticum aestivum
  misc_feature (1)..(1395): Ceres Seq. ID no. 13596745
agcaaaagatgcatctttttataaatatactttttggataacaaacactcatcctcacaatacatctcgtacgcgactttatttttctctcacttcgaaagatcttattgctgggagtacaacatgggcatcctatcatcaattgtgtgagaaggatgttccaccgcattcatgccaacctatgctcactggagagcatcacttggcacattcgatgaaacctttgatgtcgaaacttccattaggatcagactttgtgatcacacccttttctgtaatgattgcagtaattagatttgctggagtaacgtcgaaggcggggttccagactgatatacctgacgcggcaacttgctttcctagaccaccttcagagttcaacaattcctttggagatctttcttctatgacgatttgcttcccagacgggagggagagatcaatcgaagttactggtgcggccacgtaaaactgcatgccgtgatgctttgcagaaatcgagaggttgtatgtgccaatcttgttggctgtgtcaccatttgcagctatacgatcagcacccacaattacagcttgaacttgtccattattcataagtgcagctgcagcagagtctgctatcagcgtcgcaggtattttgtcatgaactaactcgaaagctgtaagcctggaaccctggttaaatggacgagtttcagtgcagaaggccttctccaaaactcctccagagtgaagagcacgaatgacccctagggcagttccgtaaccagcggttgcaaggctgccagtattacaatgggttagaacagagatgtttctcgaacttccaagctgccgttgaaggaattcagctccatgcgagccaattgccttattatcggccacatcatcaactagcatagcttctgcagcttcaataaagacctgaaagatagatttggcatcttttgctgtttcagctgttcttgacactaagttctgaagctttgtagcagcatcagacaggttcactgctgtgggccggctggatacaaggtattccaacttcttggaaacgaatgaggctgcttccacaggtgtaccagtgaaatcgtgatcattaacttccacagccaatgacagtgctgccgctatggctatggcaggagcaccacggacaaccatgtctctgatcgcattccatccatccgcggagtccttgacatcgatgtaggcctcctcgaggggcagcttcctctgatcgaggaggcgaagcgcgccgcggccgtagaggatggactgaagcgcgctggattcgcccattctggccggggaaattcggagggctcggacggctcagatggaaaaagtgaagaacagaggatggaggccgcactgcgcaatcttgccctttat

SEQ ID NO: 60637 - protein, 155 aa, Triticum aestivum
  peptide (1)..(155): Ceres Seq. ID no. 13596746
AKDASFYKYTFWITNTHPHNTSRTRLYFSLTSKDLIAGSTTWASYHQLCEKDVPPHSCQPMLTGEHHLAHSMKPLMSKLPLGSDFVITPFSVMIAVIRFAGVTSKAGFQTDIPDAATCFPRPPSEFNNSFGDLSSMTICFPDGRERSIEVTGAAT

SEQ ID NO: 60638 - protein, 95 aa, Triticum aestivum
  peptide (1)..(95): Ceres Seq. ID no. 13596747
MLTGEHHLAHSMKPLMSKLPLGSDFVITPFSVMIAVIRFAGVTSKAGFQTDIPDAATCFPRPPSEFNNSFGDLSSMTICFPDGRERSIEVTGAAT

SEQ ID NO: 60639 - protein, 84 aa, Triticum aestivum
  peptide (1)..(84): Ceres Seq. ID no. 13596748
MKPLMSKLPLGSDFVITPFSVMIAVIRFAGVTSKAGFQTDIPDAATCFPRPPSEFNNSFGDLSSMTICFPDGRERSIEVTGAAT

SEQ ID NO: 60640 - DNA, 1482 bp, Triticum aestivum
  misc_feature (1)..(1482): Ceres Seq. ID no. 13596911
gaacaaagtataccgttatcacttatcagttgacaaattgcttctgaataaccagaaaatgtggctgtgagatattattgcatgcaccacagcccacagccttatgactaaccctagactgcacgcagaccatggccaacagttcgagggccatttgccgccgcagtcgaaaaacacaaccggccaccctaggcactagctctaagtacctgaaaaccggcaccgattggcaagtgctcactaggatggtggaagttgggcaggcctccttccacatccggggaaccccctcgtgggatccgaagtaagctggtaggttttattgaaccgccttccgacaggaatatgtagtccaatgttccagtaaaacctggagtgcaatttgtgaactccggctcccctccgttctcagcatacaggctgcgcaatttgatcagggcttcgtccgtagattcggagccagctgatacaaggtaattgtataccttatcaccaggggtggagttaaaatcaccagcaatgatcacagaaggtttacaggtgaacttatttgcgataattttctcaaactcagagacttttgaaagaagatactttgcttgagccaacttcacatcaatccattctggatcccaataaatatgtgtgttcgccacaatcaggatatgctcacaaggatcgccaagcttgaaagcagcaagtaaaccaacgcagtcacgcttcaatctcacacgtggatcatttggatctccacgtttcttattatcttcctttccactagattcttctgatggtgaagaattattcgagggggcactaattacattatcattaagatgacatgtttccaccaagtcattgtaatgtattacttccttctgtaacagttccacactttttggtttataaaatataccacatccatcccgtttgtctccagatcgctggacataaatacttgaatatccagtactttccatgtttttcctatagaatgtctcatattcatccaactcctgtatgcacatgaggtcggcattaaaactcttgagttctgttagaacggcttttgaacgagctttccacttaagagacgcggatggagaatggggaaaaaatgcgctcttcacataaacctgggcgagtatgttgtaggaaaccagccgaaactggtacccgtctgccccggcatcaggctcggactgcgctgtggggagaggggcgaatctgggctccgcctgcgcgctcatccgccgcttgcaaatcgggcggaaggggaggcggcggccggagggagggggagaggaactggggaggaggcggcggccgaggaagagagggagggaagccgcccagattgcctggggttttaggagcatcggcggcggctgtgtttgcttgcgcgcaaccgaaaaggaaaagatggtgtgtgcggaaggcgacctctgcttcgcctgttcgcggcgtgactgtgtccgggtc

SEQ ID NO: 60641 - protein, 127 aa, Triticum aestivum
  peptide (1)..(127): Ceres Seq. ID no. 13596912
MENGEKMRSSHKPGRVCCRKPAETGTRLPRHQARTALWGEGRIWAPPARSSAACKSGGRGGGGRREGERNWGGGGGRGREGGKPPRLPGVLGASAAAVFACAQPKRKRWCVRKATSASPVRGVTVSG

SEQ ID NO: 60642 - protein, 121 aa, Triticum aestivum
  peptide (1)..(121): Ceres Seq. ID no. 13596913
MRSSHKPGRVCCRKPAETGTRLPRHQARTALWGEGRIWAPPARSSAACKSGGRGGGGRREGERNWGGGGGRGREGGKPPRLPGVLGASAAAVFACAQPKRKRWCVRKATSASPVRGVTVSG

SEQ ID NO: 60643 - protein, 88 aa, Triticum aestivum
  peptide (1)..(88): Ceres Seq. ID no. 13596914
MGKKCALHINLGEYVVGNQPKLVPVCPGIRLGLRCGERGESGLRLRAHPPLANRAEGEAAAGGRGRGTGEEAAAEEEREGSRPDCLGF

SEQ ID NO: 60644 - DNA, 740 bp, Triticum aestivum
  misc_feature (1)..(740): Ceres Seq. ID no. 13596865
cccccctcccgttccaactttattgtgtttaaacacaatgagcagatataactgaaattcctgaactaggataaatgtggaggggcgcactacttggtccctcaggtggtttcatttgcggcgtcggctttacaaaccgggcaggcgttcttcacctccagccacttcttgatgcagcccgcatggaagtcatgcccacatttcagcttcccaagggagtccttgtgcttgtattcctccaggcaaattatgcacctttccttgtcttgatcattctgtgtacgggcagaattacgacaggctagctccatcacgcagcctgagattttttcgtcagccaggccagtgtttacattgccaattcgttcttccaacgccaggagctcctcatagctcatgtcatcaatgtccagtctcatgtcccagtgaggatctaatgcttctctagattcgtggatgaccaactggtccagcatcataaaacgctcagctgccgatcttcctaggttattctcctcgatcatcaaaggatgaaagcaatgataggaatccctcatccttctactccttgcactaccaccatgccccacagagacgtgccttggctgtctaaaagatgcagcagcttcggcatgtaatggctggacacttgatgatgctgcagcggtagcaggaggatagctgggcatggcaggttgatagcgagggttagcaggctcacaccgaactgctccagagtt

SEQ ID NO: 60645 - protein, 76 aa, Triticum aestivum
  peptide (1)..(76): Ceres Seq. ID no. 13596866
MWRGALLGPSGGFICGVGFTNRAGVLHLQPLLDAARMEVMPTFQLPKGVLVLVFLQANYAPFLVLIILCTGRITTG

SEQ ID NO: 60646 - protein, 40 aa, Triticum aestivum
  peptide (1)..(40): Ceres Seq. ID no. 13596867
MEVMPTFQLPKGVLVLVFLQANYAPFLVLIILCTGRITTG

SEQ ID NO: 60647 - DNA, 946 bp, Triticum aestivum
  misc_feature (1)..(946): Ceres Seq. ID no. 13585110
agatcaataacaatcacttgtagttccaatactgactccgtacaaacttctctgccataaatgtgacagaaggttgcactcatttgtcatttctgattgccagcacacaactaagatcatttggtttattctaaatacaacacagaatcaatatttcattacatttaagacaaatttgagaacatcatatcaaaacaaaatctgccattttgggatggctgttgagaggaggggtacagccaaagtttcaccgagaagggttgtggcattgttggcaactgtagcacagaaaaaaagagacgaaacggagcagcagaaacgagttagacgccttgccgtttccagaggagctcctcaagccattgcagctttcttttctgcctctatctgctttagctctgccaacctttccacccatgcccggtctcttgccactgcagccatctttctttctgtccgttctgcctccttcctcttcacagcaacagaatactgtgctttgcgcttcctcttctcagccatgatgaagtccttgcgctgcttgatccgcttcttctccttcctcccctgcacgctgcccttattcggctggctcgaagggataggctcccccggcgtgcacctcacccagtagtgcggacctttgggtcgcaggctggccctcttgcgccgggacacgaaccccgggcgccgcttggggaacctggtctccgtgagccctctgaagaggctggcccccatttccggcacccgcgcgacggcggtggcggtggcggccgcggcggagaacggccggaacccgatcggatccaggagccggagagggcgggaagggagcggaggaggacctggtgcgcgccgggaaagaggcgccgccggcgagtagagcggcgggagggctcgccggagggctcggaggaacgccatcgtggagaaggttctagaa

SEQ ID NO: 60648 - protein, 139 aa, Triticum aestivum
  peptide (1)..(139): Ceres Seq. ID no. 13585111
MAVERRGTAKVSPRRVVALLATVAQKKRDETEQQKRVRRLAVSRGAPQAIAAFFSASICFSSANLSTHARSLATAAIFLSVRSASFLFTATEYCALRFLFSAMMKSLRCLIRFFSFLPCTLPLFGWLEGIGSPGVHLTQ

SEQ ID NO: 60649 - DNA, 679 bp, Triticum aestivum
  misc_feature (1)..(679): Ceres Seq. ID no. 12585371
attcccctctcctctcctctcctctccttgcagtgagtcgtctctgctctcgcctagtcgcctccccgtctcccatcctccccacccctctcaccgccgaaccctagcgagcagatcgccgccgatggatcagggctgggcgagctggttcggcgccggcgtcacctccgccttcttcgcctccctcgagcgctgctcctgcatcaacctctctaccgacgacgacgacgacgacgccgacgacgccctcatgctctccgccgccgccccctccgacaagccccagctcgacgccgcccccgccgtcgcccccgccgtcgccgccgacaaggaggaggggcaggagcaggggcctcccctcccgcccgtatgacccgctccccacatccatccatcgcttgcgtacgccttactcctcgtcccgtctgagtcccgtccgcgtcctgtgctctagatctgatgaactgctgctcgtggccgactaataaatcctgccgattttgttgctggccatgttaaattaattgaattagtagtactatgcgtgtgtgtgtatgccatggattcctcttgttgtgttcatgtgaatatcatcatcccgtcgtgtggtaatttctttcgtagcggatcgatgtgccggatggacgatggatcaatctctatatatcatctgttgttg

SEQ ID NO: 60650 - protein, 123 aa, Triticum aestivum
  peptide (1)..(123): Ceres Seq. ID no. 12585372
FPSPLLSSPCSESSLLSPSRLPVSHPPHPSHRRTLASRSPPMDQGWASWFGAGVTSAFFASLERCSCINLSTDDDDDDADDALMLSAAAPSDKPQLDAAPAVAPAVAADKEEGQEQGPPLPPV

SEQ ID NO: 60651 - protein, 82 aa, Triticum aestivum
  peptide (1)..(82): Ceres Seq. ID no. 12585373
MDQGWASWFGAGVTSAFFASLERCSCINLSTDDDDDDADDALMLSAAAPSDKPQLDAAPAVAPAVAADKEEGQEQGPPLPPV

SEQ ID NO: 60652 - DNA, 855 bp, Triticum aestivum
  misc_feature (1)..(855): Ceres Seq. ID no. 12593187
ccctcgaggtcgacggtatcgataagcttttttttttttttttttatattaaacatggtctttaaacagagataaagtgcaatcagcttataagtgcagagatactcagtttatctctgaagacaacacaatcatccattgtttcagagcacacccacgcgaaattgacgagctacatgcataggtccagcacactggagcacttgcggaccttaattaaccagggccgaccttcgggatatcatagtgctcactaagatttgcgaggtactggttgaagtcctggatgcggtccctgtgcgacttgtcagccaccttggccaacttgtgtacgtcgatcttctgcttctgttcaatgtaacgcctctcagctggagtgaggtgatcataatcggcttgcgcactcccttcctctcccagcttgtcagcttcactgaactcattgtcagggtcacctggcaattcagagcttccaccttcgcggagctcgccgtgctcgccttgagacgactcctcgcggcggtgcttcttcttattcttcttcttgactccgccctccttgacatccagcggtttccccttcagcttgagcctccccccaacgacgttctggtactccgacatctcgactgcctgacaggaggaatcgcttcgcgggagcctccgatccgcgccgatccggtggaggatggcaggcacgaggaggaggacgaggggttcgaggcgcttcggtggttggctcggcggctccggtgacggtcgagggctcggcggcggccgatttgggttggggaaggggattctaatggtgcgagaccaccagggtctttttcgattaggatgttctaggtaatg

SEQ ID NO: 60653 - protein, 54 aa, Triticum aestivum
  peptide (1)..(54): Ceres Seq. ID no. 12593188
MAGTRRRTRGSRRFGGWLGGSGDGRGLGGGRFGLGKGILMVRDHQGLFRLGCSR

SEQ ID NO: 60654 - DNA, 1198 bp, Triticum aestivum
  misc_feature (1)..(1198): Ceres Seq. ID no. 13585332
atccatctagtcagtggcggagacaggcctggggcagctagggctatagccccaggcctaaaaacaacttcttttgtaatttcttcatgcaaagcatagaaaatcatagaactttatcactcaacatagcatagccccaggcgtagtctgcatctagctccgcccgtgcatctagtactacaaagctactatctctgttcatgcatgaacaggatctaattgattagcacacctatgaacgcaagaacagagaggagacaagtaatgctctggaaatgattcaattcatcgtgttctacgttgatatatctcagagtatatatgtatcaacgtatgtatgtatgtatgtattctttcaccattcttgtaataagatccctgcatgttttgctcgagttttactgcatctgcatgccatggctaggacaggagccgtacatctgcagcggcaggcgcggttgagcggcggcgatgagcggcttggccttgggcatggtcatcccgtagacctcgtcggtgtcgatgtcctcggggcggaggccgtcgggcggggaccagtcgaagcagtggaagagcctggcgagcgccatgagcaccaggatcacgcccagcggcgccccggggcacttgcgcttgccggcgctgaagggcaggatcttgaagtccggcaggtggctgatctccacgcgcccgccgtccgccgggaggtgcctctcggggcggaactcgtcgacgtcgtcccagatgcgcgggttccggcccagcgcgtgggtgttgatgaagatcctcgtctgcgccgggatgtcgtagcccatgatggtcgtcgccttgagtgactcgtgcgggatcaggaatggccccgccgggtgcatccggaaggactcccggacgacgcagcggaggtacgtcaggtgggggaggtccgcctccaccaccatgcggctggtgccgacgacggcgtcgagctcctcctggatcttgcggaggacgcgcgggttcttgatcacctcggccatcacccactcgttggtcactgatgaagtgtcagtagcagcggcgatcatgtcctgcgtatacacacattcagaatgatcatgtatgcatgttcatatgcactttctcttttaacagcagcagcagcagtgttcatttgtaataccaaacatctacagtacaaacctaaatgaagatgatctac

SEQ ID NO: 60655 - protein, 186 aa, Triticum aestivum
  peptide (1)..(186): Ceres Seq. ID no. 13585333
MIQFIVFYVDISQSIYVSTYVCMYVFFHHSCNKIPACFARVLLHLHAMARTGAVHLQRQARLSGGDERLGLGHGHPVDLVGVDVLGAEAVGRGPVEAVEEPGERHEHQDHAQRRPGALALAGAEGQDLEVRQVADLHAPAVRREVPLGAELVDVVPDARVPAQRVGVDEDPRLRRDVVAHDGRRLE

SEQ ID NO: 60656 - protein, 164 aa, Triticum aestivum
  peptide (1)..(164): Ceres Seq. ID no. 13585334
MYVFFHHSCNKIPACFARVLLHLHAMARTGAVHLQRQARLSGGDERLGLGHGHPVDLVGVDVLGAEAVGRGPVEAVEEPGERHEHQDHAQRRPGALALAGAEGQDLEVRQVADLHAPAVRREVPLGAELVDVVPDARVPAQRVGVDEDPRLRRDVVAHDGRRLE

SEQ ID NO: 60657 - protein, 139 aa, Triticum aestivum
  peptide (1)..(139): Ceres Seq. ID no. 13585335
MARTGAVHLQRQARLSGGDERLGLGHGHPVDLVGVDVLGAEAVGRGPVEAVEEPGERHEHQDHAQRRPGALALAGAEGQDLEVRQVADLHAPAVRREVPLGAELVDVVPDARVPAQRVGVDEDPRLRRDVVAHDGRRLE

SEQ ID NO: 60658 - DNA, 1329 bp, Triticum aestivum
  misc_feature (1)..(1329): Ceres Seq. ID no. 13590991
ggaccagattatcagaaatgttatttcaggcacagattatcatcaaagccaagccatacaatgagttaaacacagtgcaaggtacacattatgtttctgggaccagattattagacatgttatttcactcaatcagacaaacggtgtgtgttaactacgtgtcgtggcgaaaactggcacttggtggggacactataaacttcattagttttcaggagatctcaggacagagatcacgaattaggtatacgcattggggtttgtctgacttctgataagtgggacaccatcgtctcgccaaacaattcgatcctcacacaaggcagcaactgcctcaacgtaaacttggtgctcctcgtgaagaacccttgcagccaattgctctggagtatcattggctaacacaggcacaactctttgggctaaggtcttccctgtgtcaaactgctcatccacaaagtgcacagttggtcctgagtatctggctccagatgcaatgactgctttatgcacttttaaaccataataacccttgcctccaaatgccgggagcagtgaaggatgtatattcagcatggatctgggaaatgccttaactagctcaccaggtatgagcttcaagtaaccagcaagtagaatgaagtctaccttcagatccctcagaacattcagaagttcatctgtggagaccccctccggtgccgatttcgacttcgtaaacacgaccacgggaatgccattgcacattgcgtactcggcgccaccgcagcctggcttatcggtgacgagcgcaaccacatccccgttcaccttcccacccagggcggcctcgtggatcgaccggaagttggagcccccaccggacacgaacaccgcgagcctcttcctcctcaccccggagtccccggcgccgctatctatcaccgccgacgccgacgccgatgccgccgtgtatacgcgagcgttcggacggagcagcaaccgcccgcaagcgacggcgcagcgctgctgcctcttggccgctaagcccaggcgagcgcctctcctatgctggttcgggacggggtaaagcgagcagcgcagcccgcagccggaggaagcgacggcggccgcctccatcgggggagattccgctgcctcggcagagaaggtgggtatccggaggacggaacgagattagcgagaaggctaaggtgtgcttaggtatgaaggtggaggtgaagaaccctagcaccggcggccgccgtcgaggggctcctgctgcgcgccgcgcggcggctggtcgggtggactctcaaaaggccgacggatgaagggaaatgcttttgc

SEQ ID NO: 60659 - protein, 143 aa, Triticum aestivum
  peptide (1)..(143): Ceres Seq. ID no. 13590992
MKSTFRSLRTFRSSSVETPSGADFDFVNTTTGMPLHIAYSAPPQPGLSVTSATTSPFTFPPRAASWIDRKLEPPPDTNTASLFLLTPESPAPLSITADADADAAVYTRAFGRSSNRPQATAQRCCLLAAKPRRAPLLCWFGTG

SEQ ID NO: 60660 - protein, 123 aa, Triticum aestivum
  peptide (1)..(123): Ceres Seq. ID no. 13590993
MPPCIRERSDGAATARKRRRSAAASWPLSPGERLSYAGSGRGKASSAARSRRKRRRPPPSGEIPLPRQRRWVSGGRNEISEKAKVCLGMKVEVKNPSTGGRRRGAPAARRAAAGRVDSQKADG

SEQ ID NO: 60661 - protein, 111 aa, Triticum aestivum
  peptide (1)..(111): Ceres Seq. ID no. 13590994
MPLHIAYSAPPQPGLSVTSATTSPFTFPPRAASWIDRKLEPPPDTNTASLFLLTPESPAPLSITADADADAAVYTRAFGRSSNRPQATAQRCCLLAAKPRRAPLLCWFGTG

SEQ ID NO: 60662 - DNA, 1087 bp, Triticum aestivum
  misc_feature (1)..(1087): Ceres Seq. ID no. 13584373
caatccaatccaatccccaaaccagcagcagcccagcgaccaccagcatccaaatccaacctccatcgggaggaggccatggcgggtagggaggaggaggaggagaggtggacgatgaggccgtgcaccgccgtcaggtctacgatggccggcgaccatggtccggcgacgcgggttgtctccaagtccaagagggggaaggcggtggcgcggtccagccgcaagaagggtgagcggaggcccgagtgtgcggcggcgggagcaggagatcgggcgttgccggatccacacgggaaggctgcgatgccgaccaagaaggttgtcggcgcggcggcggcagcacaggctggaggcaaagggaagcgtccgctcaagaaaagcgagatcaggaccataatcgcgctgaagccggagcctttccccgaagacgactacctggacggcatggccaagtactacccgccggagtggctcgagcagaagaagagggagcacgcacaagacgccgcgtatttcgggaagattgacgccgactacgaggacttccggaagaaggtgatcgacggggtcaaggagaagggctacttcgaggtcgacgagggctacatggagaagaagcccgatcaacacccaaagccacaactgcagaaggtcgatttaagtgaactcatgcgctttgctgctacccctgaagaagagttgcggcggcgaggtggtaatggttatcatgagtactctactgatgaagaggatgatgctgttctggctcatgtgcgtgatgaagacgatgatgatgactttctgagtgattcttctgtgagcgatgaggagaatgctcaaaccgagggagcggatgttcacaaggttgctgctattgtggccagctgaaggcatttggtccatctctatctgtcttcatctaactagtagtatatgtttacttactggcagatgtctctttgctggatccgtctgtgttaaatgtacccctgttgtgtcttgtttcgaacaccgactatataatttacaatgtggttgtcgcttcgaaaaaaaaaaaaaaaacattctctggataccattcacctag

SEQ ID NO: 60663 - protein, 295 aa, Triticum aestivum
  peptide (1)..(295): Ceres Seq. ID no. 13584374
QSNPIPKPAAAQRPPASKSNLHREEAMAGREEEEERWTMRPCTAVRSTMAGDHGPATRVVSKSKRGKAVARSSRKKGERRPECAAAGAGDRALPDPHGKAAMPTKKVVGAAAAAQAGGKGKRPLKKSEIRTIIALKPEPFPEDDYLDGMAKYYPPEWLEQKKREHAQDAAYFGKIDADYEDFRKKVIDGVKEKGYFEVDEGYMEKKPDQHPKPQLQKVDLSELMRFAATPEEELRRRGGNGYHEYSTDEEDDAVLAHVRDEDDDDDFLSDSSVSDEENAQTEGADVHKVAAIVAS

SEQ ID NO: 60664 - protein, 269 aa, Triticum aestivum
  peptide (1)..(269): Ceres Seq. ID no. 13584375
MAGREEEEERWTMRPCTAVRSTMAGDHGPATRVVSKSKRGKAVARSSRKKGERRPECAAAGAGDRALPDPHGKAAMPTKKVVGAAAAAQAGGKGKRPLKKSEIRTIIALKPEPFPEDDYLDGMAKYYPPEWLEQKKREHAQDAAYFGKIDADYEDFRKKVIDGVKEKGYFEVDEGYMEKKPDQHPKPQLQKVDLSELMRFAATPEEELRRRGGNGYHEYSTDEEDDAVLAHVRDEDDDDDFLSDSSVSDEENAQTEGADVHKVAAIVAS

SEQ ID NO: 60665 - protein, 257 aa, Triticum aestivum
  peptide (1)..(257): Ceres Seq. ID no. 13584376
MRPCTAVRSTMAGDHGPATRVVSKSKRGKAVARSSRKKGERRPECAAAGAGDRALPDPHGKAAMPTKKVVGAAAAAQAGGKGKRPLKKSEIRTIIALKPEPFPEDDYLDGMAKYYPPEWLEQKKREHAQDAAYFGKIDADYEDFRKKVIDGVKEKGYFEVDEGYMEKKPDQHPKPQLQKVDLSELMRFAATPEEELRRRGGNGYHEYSTDEEDDAVLAHVRDEDDDDDFLSDSSVSDEENAQTEGADVHKVAAIVAS

SEQ ID NO: 60666 - DNA, 807 bp, Triticum aestivum
  misc_feature (1)..(807): Ceres Seq. ID no. 13598732
aaacataatccacaaagaatagttggtacatcatacaacttcagctcagagagcagtcaaagagcacatgacactaggctgtgttgtaatacaaattcatcatgttcatcttaagcacgcatgacctaccgaagaagagacgggtgatgaggcggctcattattgttgctagggtctgttaagacacctatatcgtctatatgtacagccatcagcagggttttacttctccgagctgagtcttcctgtgtccacctggggatcccaggtaaacttgcaaggacaaattagctttcctcatcatcagttttagcatttttccttgacttcttcactggatgccaaactttcccttggacgaaataggcctctgacggccatccccgctgcgtggtgaagcacatggcctcctccttggtcatcgcggccttaaccatggtggccctcgtcatctccgccgcgtccacggcggccctcgcgttgtagacgacggtgccgacgagatcggacaccccgagcggccgccgcatcggcggcacccagtacgaccccccgggcacgaaggggagccactccggagcggcccgccgaaccaggacgccgtggatggcgtcgttcaggcgccccatccccatcggctcctccccggagtccccggaggaggtggaggaggcggattcctcggagaggtcgatctcgatcagctccaccttgtctgagagggcgcggtggggctgcagggaggagcccggggcggccgggcggcctagggttagggttcgcgcgaggaggcgagccatggtagat

SEQ ID NO: 60667 - protein, 67 aa, Triticum aestivum
  peptide (1)..(67): Ceres Seq. ID no. 13598733
MASFRRPIPIGSSPESPEEVEEADSSERSISISSTLSERARWGCREEPGAAGRPRVRVRARRRAMVD

SEQ ID NO: 60668 - protein, 37 aa, Triticum aestivum
  peptide (1)..(37): Ceres Seq. ID no. 13598734
KHNPQRIVGTSYNFSSESSQRAHDTRLCCNTNSSCSS

SEQ ID NO: 60669 - DNA, 1639 bp, Triticum aestivum
  misc_feature (1)..(1639): Ceres Seq. ID no. 13584157
attctcgcgctcttttttgcatttaggctggtcatagtggggagtaacttagactagtaacatacatatgttactagtctatgttactaccttcatagtgggtagtgtcataggtgtggtaacatagttgtcttcatttattactttgtagactcattatgcattgaaaaccgctatgtgatggtaacatattctgttactctatttgcctctctcctcattaactacttgccacatcatcattttttcttatgtggcatctatgttactacctatgttactttcactatgaccagccttagtgccctcaccatcaccctccgcctccatctccgtcgtctgctgctgtcggccaccgttgttgtctaagcgggcaagaagagcacgatgaagaggcggcggctgcttcttgccagagtaacaacgcaacacggcccaaccgacccagccggcgatgaaggcgccggacgtgactccgaggacggccatgaagctgaacaccaggccggccatggtgaaggttggtggcagcggcgcgcgccgtcgcaggaccctctccgacctaccgacatcctcctccagctcccgcacctgccacggctccagcccctacgccagcagctgccgtgtgcgcagctcccgcacctgccacggctccagccccgacgccagcagccgccgtgcgcgtagctcccgctgccgtcgatgccacagcaggcggtgctcctccgggcccaggtcgtcatagtagtcgtcatctccgtcgttgtcgtggtagacggcttcctctgcttccgccatgctcactgttgtgaatatcaaccgatccatctctcttgcgacgggcccgggcgtaggagcgagtggagcagcagctggttgctggccgtggtagggctctgctgctgacgctgttctggtggcgcaagccctcgcccgtccttccgaccatgccgccggctccccgtgcccctttcagcgccggccttcatcttcgctgtaagccgccgaggtgaagcaggaatgcaggatcgtagatgccgaatccgtgaggaaggcggaacccaggccgaggcggcgcgaggtcgacgcaatggctgcgggctcgagcagctggtgtgtgcggtgctgaccaacgaggtggacgcgtccaggcggtagatggtgcgggggacagccagcgctggccgaagtgggaggccctgtggtgccggcgggcgccttttgatttttttacgcggcgagcctccgccctccgctgcatctgccggcgccggtgaccccaccgtcgtccagtgcttctgccggcgccagcatggcgtgtcttgaggcgtgcctgtgtgccaggagcaacgcggggagcagaggagcatggtctttccctaagctggacgctggcccgcagctccgcgacactctgctcgagcgcactcgggcgcttgctcgggcgggtcgtacgcgtcggcgagcgtagggaacggatcgcatgcggctgtgtcgtcctcggcagcggtgttagagtacmctgtgtatataccgtytagcgcatgtatatggtcvcctgctgtacgtgtgatcgtggcacgcgatctgtgcatagtggttcatgamccccctwcatctccaaaaaannnnncac

SEQ ID NO: 60670 - protein, 100 aa, Triticum aestivum
  peptide (1)..(100): Ceres Seq. ID no. 15222778
MKRRRLLLARVTTQHGPTDPAGDEGAGRDSEDGHEAEHQAGHGEGWWQRRAPSQDPLRPTDILLQLPHLPRLQPLRQQLPCAQLPHLPRLQPRRQQPPCA

SEQ ID NO: 60671 - protein, 97 aa, Triticum aestivum
  peptide (1)..(97): Ceres Seq. ID no. 15222779
MKAPDVTPRTAMKLNTRPAMVKVGGSGARRRRTLSDLPTSSSSSRTCHGSSPYASSCRVRSSRTCHGSSPDASSRRARSSRCRRCHSRRCSSGPRSS

SEQ ID NO: 60672 - protein, 86 aa, Triticum aestivum
  peptide (1)..(86): Ceres Seq. ID no. 15222780
MKLNTRPAMVKVGGSGARRRRTLSDLPTSSSSSRTCHGSSPYASSCRVRSSRTCHGSSPDASSRRARSSRCRRCHSRRCSSGPRSS

SEQ ID NO: 60673 - protein, 67 aa, Triticum aestivum
  peptide (1)..(67): Ceres Seq. ID no. 15222781
MPQQAVLLRAQVVIVVVISVVVVVDGFLCFRHAHCCEYQPIHLSCDGPGRRSEWSSSWLLAVVGLCC

SEQ ID NO: 60674 - DNA, 1166 bp, Triticum aestivum
  misc_feature (1)..(1166): Ceres Seq. ID no. 13597416
ttttttttttttttatttttttttttttttttttttttttttttttttttttttaactttacaagatcttttttcacttgataaactgctatctagctagcttaacaaacatccaacgaaatgttgacaacaagtcctttccaactagccaaccagggccacacatatataatcttcactaatgatggaactatgtacaatgagtcgagattgacagggtgaatgggtgcacaaatgtatgtagtgtgcattacaccatggaatatcacaatatactacaaatatgctgcacaggtgcttccaacaaggccatgcatgcccttccttcctcatcacctgtcacacagaagcttctcactgcggtggcgctgcattttgacccagtgtgttgtaggtgtagtcccctgaggagttcagtccatacttctgcctcattgatgagctccataggttcggatggacacctctggggtcagccgtggtagggagataggatggagcaccttgggcaataagcagcggcctccttatgaccacaaaatcttcatcgctgtcgtagtcgctactcgtgggtgaaaccatggctcgtagaaccatcgccaacaaaagcgagagtgcctgggtggcaacggtagcgagagcagcccatttgcagaggtcgaggttgtcatggacgaaggagacgaggttctggagctctccggtgcggtcatacggcagatcctggatccagtgctcgttgaggaggatgcgtccggccacggcggcctcgagcagcatcatcaccattgccaagccggtgtagaagcagaggcagcagccgctgctgatctcggcggcgacgtagcccgcgaggaggatggcgcagtagaggaggccggcggccatgacggcgcacgcgaaccagaggtctgggaggaggtggtggatgtggagctcatggtggcgcgcccaccgggagaggatggaggcggcgtagaggacggcggagagggcggcgaaggcctgcaggaaggcgaggagcttgagcaggaaccccaggcagcaccgcccgcacccgccgccgcccttctcggagcggccgccgcgcgccatcgccgccggtgggttgggggatttggatttgggtttgggttgagttttcgattaggatgttctaggtaatg

SEQ ID NO: 60675 - protein, 164 aa, Triticum aestivum
  peptide (1)..(164): Ceres Seq. ID no. 13597417
MDEGDEVLELSGAVIRQILDPVLVEEDASGHGGLEQHHHHCQAGVEAEAAAAADLGGDVAREEDGAVEEAGGHDGAREPEVWEEVVDVELMVARPPGEDGGGVEDGGEGGEGLQEGEELEQEPQAAPPAPAAALLGAAAARHRRRWVGGFGFGFGLSFRLGCSR

SEQ ID NO: 60676 - DNA, 1393 bp, Triticum aestivum
  misc_feature (1)..(1393): Ceres Seq. ID no. 13584839
ccaaaacgtttcaagtctcaaacaagtgatgatttttacatgctcaaattcaacaagtgatgaaccaaaagggtgattctgtaattgattgaaatctagcattcatctctgtcaacaacactcgctcgaattcttctggttcatgtacccaagttgacgatccaatcctcacgagtctcatataacttgaaatgattaataaccatgcctgcccggagaccgggacctgctcctcatcctccccgggtctcctcttcttgaaaaatcaccaccgttcctgtctctgggcctcgccctttcagaatccctccggctgttataggaaccgcctctatagtccgaccctctacctccctgctcatagggcctctctctgtcacggctccgctcatagtagcggtcacggtcgtgctccctggatctctccctatagtcgtcgcggtggcctctgttatggtatcctctctcccggttctgacgctcctctgcttccttctcccttgcaagcttctccgcttctttcgcagccttgtattctgcgaggaattccctgaccagaccataaccaatgtgctgcttgccagtgacatgggactgcgtcctctcaaggacgtcgttggtgacgagaaaggagccgcactgctcgcagagctccatcttcttctcttgcgggaccatggagagcttggtctcaatctggtgggtgagagccgacttctcgaggttgagaatgtccaccttcctcatgagggcggtggcctcgtcgatcttgccggtgtcgccgagctgctcaatctgctcgagcagcttcttgatcttctcttcgaggatggagagctgctcgaccttttcggcgtgggcagcagggggcggcagctcgacgacgtcctgagccagcctgtcgcggccgcgcctgatcttcttatccaggtcctggaccagcctctcgcagcggtgggcgagatcggcctcgaatttggggagggcggcggcgtagcggggggaggattcgaagctttgctttagggccgggtcgtggatctttgggcatactccgaggttgctcttggtgttgatgaagaggtcgtgggggcagaagcgggccatgtagggggcgcacacgtcggggtcgtcccacgccacctcccggtgctccttcttctcctcctccgtcaggtcccgcgacgaacccatcagcgcgtcaagcagagcacgctgcgcgtccatcgaatcttttcgattcgattccaccacgctgcgccggccgcttcaatccaatccaatccaatcgggtcaatcctctccgctccggccgcaaaccctaaccctagggagagatcagcaggcggcggcgatggaggcggaccagttgagcgagaggagaaaataaaat

SEQ ID NO: 60677 - protein, 190 aa, Triticum aestivum
  peptide (1)..(190): Ceres Seq. ID no. 13584840
MVSSLPVLTLLCFLLPCKLLRFFRSLVFCEEFPDQTITNVLLASDMGLRPLKDVVGDEKGAALLAELHLLLLRDHGELGLNLVGESRLLEVENVHLPHEGGGLVDLAGVAELLNLLEQLLDLLFEDGELLDLFGVGSRGRQLDDVLSQPVAAAPDLLIQVLDQPLAAVGEIGLEFGEGGGVAGGGFEALL

SEQ ID NO: 60678 - protein, 145 aa, Triticum aestivum
  peptide (1)..(145): Ceres Seq. ID no. 13584841
MGLRPLKDVVGDEKGAALLAELHLLLLRDHGELGLNLVGESRLLEVENVHLPHEGGGLVDLAGVAELLNLLEQLLDLLFEDGELLDLFGVGSRGRQLDDVLSQPVAAAPDLLIQVLDQPLAAVGEIGLEFGEGGGVAGGGFEALL

SEQ ID NO: 60679 - protein, 120 aa, Triticum aestivum
  peptide (1)..(120): Ceres Seq. ID no. 13584842
MINNHACPETGTCSSSSPGLLFLKNHHRSCLWASPFQNPSGCYRNRLYSPTLYLPAHRASLCHGSAHSSGHGRAPWISPYSRRGGLCYGILSPGSDAPLLPSPLQASPLLSQPCILRGIP

SEQ ID NO: 60680 - DNA, 1084 bp, Triticum aestivum
  misc_feature (1)..(1084): Ceres Seq. ID no. 13598479
gacaaaaacacatatagttcaagtcacaacggttcacatagcgcgggcaagaccactggagatcacatcgtttgtttgtttacagcaggtgaaatagagcgagcgagcaaacaacaggccaaatgaattgggattcgctgattctccattccaggtacaaaatggaactagtctactattgtactgttagcctctcatacgtaatatagctttttgccaagataatccactacagaaccaccgagtctcttcaagccaatatcatcaactcaatttcgataacacttctggcccatgcaatgcaatgtgtgctttttctcgcatggacaaagcatgctcaggcaggcagctcaagcttcacgttgttcttccaacttaagaaatagtagtagaagaaatctgcgtatagaccagtttggaccaaaccagcaatccaagggatccatctgctttggtgaccctctgtgaaataacggtagatccagtttagaatgtagaatgcacggtaggccccgagaaagagaacatattgtccagtcaagttatccacatttctgcttctctggagtagaactaactgaggtagaatcgccactgcctccaggtaaatcgaaaatgcccagcatatctcgcggagggtgaagcgctcgttgaagatgagcgcgagcgcgaaggccgcggcgacgaggaagacgtggcggaaggtgtcctggtcccggtcgtaggtgcggcgcacctgcgggtggcggcgcatgtaccagacgatagcggcggaggtggtgatgaagacgatcttcatgacggagttgtagagcgagatgtagtcggtgaagaggtcgaggtagcgcgccacgaacaccgccaggtacagctcctgcgtcttcctcgacacccctgagcatgacttgttggcgtagatcttgaggaggaggacgatgaccgagaagaggtgggtcatgtccccgaggaacctgaaggcgttcatggctgctgcggctgcggcggcgccggcgacggcggctaggttttgggggtttattcggtgggaggtcgctccagatgcggcgggggagtggcgaggcgt

SEQ ID NO: 60681 - protein, 57 aa, Triticum aestivum
  peptide (1)..(57): Ceres Seq. ID no. 13598480
MQCNVCFFSHGQSMLRQAAQASRCSSNLRNSSRRNLRIDQFGPNQQSKGSICFGDPL

SEQ ID NO: 60682 - protein, 49 aa, Triticum aestivum
  peptide (1)..(49): Ceres Seq. ID no. 13598481
MTEKRWVMSPRNLKAFMAAAAAAAPATAARFWGFIRWEVAPDAAGEWRG

SEQ ID NO: 60683 - protein, 47 aa, Triticum aestivum
  peptide (1)..(47): Ceres Seq. ID no. 13598482
MHGRPREREHIVQSSYPHFCFSGVELTEVESPLPPGKSKMPSISRGG

SEQ ID NO: 60684 - DNA, 1475 bp, Triticum aestivum
  misc_feature (1)..(1475): Ceres Seq. ID no. 13584853
aaccatcaccgcacccagcccatactttctatatggcgcgagagctgccttcttttgtttcctctcccgatttagtcttcctctcggatgatgagggagaaaaagaggtgatcaagattgaggattcagactgcggtggcgacacgcatgtctacctcagctctgacgaggaggacgacgcggtctacgccgatgatggctcctcctacgccaactgcaaagccgcatctgcggctgccacgtctttggccacggtgagctgcaccgactatggcgacgacaaccccaatggcggcgactctaatggggacggcaaccccaacaacagctacttcgatgacaacgacaacgactctgaagatggcggtgacgacgccagcgatttttcgtcggccgccacaagtaagtcgccaaaagccccatacaattattggcatcccaccgacctctgcaccctcgtggaaatagatgggcagctcctcaaggattttgaaggcgcgacagtaccatcgtctgtgctctatgaggcgtttatggaggatccacggccgatccgccgtggcgggctgacctcaagaaaaatctcatacaaaaggtatcagttgaaaaaaaaaattcgtgccttctgcaagttggatccgaggcgtgccttccgtacgtgtcgcacggctcaagaacgcaagttttacacctgctgcaaggaggcgtggcctcatattgtagaagagggccgtgtctgacttgctaataagaagtaaaccacagtcatgttcaatccggtcttttttggtttcaccaataaacaatagtagctttctttcccattttttccatgatcagtattactctggatttgatctgtttttcctttgcttgtattagtttatttttcttttgctttgtatgagattgttcagtacaagaatcatcagtacttttatttagcagtccacaattttattttattttattaaaaaaaaaaaaaaaaaaaaaaaaaaaaaaaaaaaaaaaaaaaaaaaaaaaaaaaaaaccaaaaaaaaaaaaaaaaaggtttttcattcccgccaacctcagggggggccccggaaccaatttcccccaaaagggagtcaaataacccgcccccctgggccgccttttaaaaacgccgggatgggaaaaccccgggggttcccaaattaaatccctttgaaaaaaatccccttttccccagttggggaaaaacaaaaaaggcccgccccaatcccctttccaaaaatttgcccacccgaaagggaaaaggaaatttgaaaccgtaaattttttgtaaaaatccccgtaaaatttttgtaaaaccacctcattttttaaacaaaaaggccaaattcggaaaaaccctttataattcaaaaaaaaaaaccaaaaaagggttaagggttttcccatttggaaaaaaaagcccactataaaaaaacgggaaccccaacgcaaaaggg

SEQ ID NO: 60685 - protein, 245 aa, Triticum aestivum
  peptide (1)..(245): Ceres Seq. ID no. 13584854
PSPHPAHTFYMARELPSFVSSPDLVFLSDDEGEKEVIKIEDSDCGGDTHVYLSSDEEDDAVYADDGSSYANCKAASAAATSLATVSCTDYGDDNPNGGDSNGDGNPNNSYFDDNDNDSEDGGDDASDFSSAATSKSPKAPYNYWHPTDLCTLVEIDGQLLKDFEGATVPSSVLYEAFMEDPRPIRRGGLTSRKISYKRYQLKKKIRAFCKLDPRRAFRTCRTAQERKFYTCCKEAWPHIVEEGRV

SEQ ID NO: 60686 - protein, 235 aa, Triticum aestivum
  peptide (1)..(235): Ceres Seq. ID no. 13584855
MARELPSFVSSPDLVFLSDDEGEKEVIKIEDSDCGGDTHVYLSSDEEDDAVYADDGSSYANCKAASAAATSLATVSCTDYGDDNPNGGDSNGDGNPNNSYFDDNDNDSEDGGDDASDFSSAATSKSPKAPYNYWHPTDLCTLVEIDGQLLKDFEGATVPSSVLYEAFMEDPRPIRRGGLTSRKISYKRYQLKKKIRAFCKLDPRRAFRTCRTAQERKFYTCCKEAWPHIVEEGRV

SEQ ID NO: 60687 - DNA, 1196 bp, Triticum aestivum
  misc_feature (1)..(1196): Ceres Seq. ID no. 15225407
atacttcgattcatttgtctctctgatggttgtctctctcgttcctttacaatcaacttgtaacacgttatcagcactgctcgcgagagcgattccgatgagaagaagcggaagaacaggcaaaaggtgagaagaaaaatgcctggtttcctgtcttttttcttcttcgcctggctcgcgacgccagccgtcgccgccgcttcatcgcacgcaactgtcgccacggtgtgggcggacgtcgccgcttccaccgtcgtgtgcgcgaccttcgccgtttccggcgtggaggtcgaaaccagcgccaccaggatcttcgtcgccaccaccgaaacggcgtggggccgtcgaaccagcctgtgcagccacctgcgcatctgcagcccgatgtgcccgcctggcttctcgccggtccggcagcaccaaggctcgaggatgacccggcgctggccgcgccgccgccgccgttttagtgctcggtacacggctgggtcgtatgccccctgcatcagtacaacttggacgtcaggaccgagccggtcgtggaggaagccgcgccaccgctgctgccatctccgaccccgcggtcgtcgaggtcgccgcccgcgacgcgctggcctctggctcctccaaccacggggttattgatgccgaagcaccgcgtctaccgtccctgacgccggccaccctctccagcccgccgtcggcttcgccttcaagcggccgcggccgaggccgccgtgccggcgcgtggagcccggccgcgcttgggctcgcgaaaggcgtctccaacagcgtcgcgccgggcactccacttcccggaggatcctccgacgaggacaggcgcggtgggagctcctcccgtcgcatgtgatgcggctatggtgatgtctgtctcggtgctatcgggagtttgaggatgaatcgctgggatttttttgtccttcggttggctctccttatccactcttttgactagcaccggactgccctacgtggcctggagcccatgtgttgtcgctgggcacccatgtgctgccgacagtaggcatcaacaggatttctttatttgctacttgcttgatcgatgcattagtactagttcagtatgtgagcaaataacactaattcaagcagtagttttattcctgtttagattgttaaattcagtacaactattttagtattgttttctgtcg

SEQ ID NO: 60688 - protein, 168 aa, Triticum aestivum
  peptide (1)..(168): Ceres Seq. ID no. 15225408
MPGFLSFFFFAWLATPAVAAASSHATVATVWADVAASTVVCATFAVSGVEVETSATRIFVATTETAWGRRTSLCSHLRICSPMCPPGFSPVRQHQGSRMTRRWPRRRRRFSARYTAGSYAPCISTTWTSGPSRSWRKPRHRCCHLRPRGRRGRRPRRAGLWLLQPRGY

SEQ ID NO: 60689 - protein, 125 aa, Triticum aestivum
  peptide (1)..(125): Ceres Seq. ID no. 15225409
MPPASVQLGRQDRAGRGGSRATAAAISDPAVVEVAARDALASGSSNHGVIDAEAPRLPSLTPATLSSPPSASPSSGRGRGRRAGAWSPAALGLAKGVSNSVAPGTPLPGGSSDEDRRGGSSSRRM

SEQ ID NO: 60690 - protein, 86 aa, Triticum aestivum
  peptide (1)..(86): Ceres Seq. ID no. 15225410
MCPPGFSPVRQHQGSRMTRRWPRRRRRFSARYTAGSYAPCISTTWTSGPSRSWRKPRHRCCHLRPRGRRGRRPRRAGLWLLQPRGY

SEQ ID NO: 60691 - DNA, 854 bp, Triticum aestivum
  misc_feature (1)..(854): Ceres Seq. ID no. 12617531
catccctaatcgaaaactaaattttttctccctgccgccgccacccatagaacccacctttcttcctcacgagcggcgagcgatgtcggaccgcagatctcgctctcgccatgtcctcagcactgccgcagatagccgcggcagatctgtcgctccctattccatcagcgctgctgccaggggctgccgcagatctgtcgatcgctctgctgccgagggccgccgcagatctgtcgatcgctctgctgccctcagatctcttgcgtctaccctgccgcctgggtacgatccgtcgcttcttcctacgtgtacgtggccaccgacgcagagctcgcgcgactccttggtgcgcggactcctgagaagctggtagggcccagcctctactgccagcactacggcgccgtcccggagcccgaggccaagcgcgctgccgcagccattgaggccgaggccttcgctgccatctccgagtacgcctccggcgtgaccttggcctcccgcaaggagcgtttcgccgtctacaaaatgtacttgaaggaggcttgcgattggctcctcgggttcttcaaatcccgagcggccgcaaggggggccatggtggaaccgggggattcgtcggcgcctactttggctcttgccgcttccacttccgaggagtagggctttcatcatatgggaatttaattgctgttattttgttggttcgttggacacttgttcatgatttcctacgtctatggttagtactactatatgctgtctatcagagattcgcacgcgtgaaaacttatgtttgtttctgaaactccttcgctatctataaataatatcgagaaagttattaaaggtgc

SEQ ID NO: 60692 - protein, 123 aa, Triticum aestivum
  peptide (1)..(123): Ceres Seq. ID no. 12617532
IPNRKLNFFSLPPPPIEPTFLPHERRAMSDRRSRSRHVLSTAADSRGRSVAPYSISAAARGCRRSVDRSAAEGRRRSVDRSAALRSLASTLPPGYDPSLLPTCTWPPTQSSRDSLVRGLLRSW

SEQ ID NO: 60693 - protein, 96 aa, Triticum aestivum
  peptide (1)..(96): Ceres Seq. ID no. 12617533
MSDRRSRSRHVLSTAADSRGRSVAPYSISAAARGCRRSVDRSAAEGRRRSVDRSAALRSLASTLPPGYDPSLLPTCTWPPTQSSRDSLVRGLLRSW

SEQ ID NO: 60694 - protein, 83 aa, Triticum aestivum
  peptide (1)..(83): Ceres Seq. ID no. 12617534
MSSALPQIAAADLSLPIPSALLPGAAADLSIALLPRAAADLSIALLPSDLLRLPCRLGTIRRFFLRVRGHRRRARATPWCADS

SEQ ID NO: 60695 - DNA, 498 bp, Triticum aestivum
  misc_feature (1)..(498): Ceres Seq. ID no. 12616266
caagaaggttcatgccgccatccgtgctgatcccaccatggccaagtcaaccaaggcgcctcccaagactcacaagaggtacaaccccaagaagctgacctatgagcagaggaaggccagcctcgtcgaaaggctcaacgccctcaacaactctgccggtgccgccgatgatgacgaggaggacgacgagtgaagagcgttcttgtccaccccagtgtagtattgcaacgtgcgtttttgttgaagtctggcaccctgcccaacgggcctgttcctttgagttttggttatgtcgcttgagttatagattgtgttatctggattatgtgccgtgctggcatttggatcttaatcttaatcctttagtctggcaccctttctttattttttgtggctgttccatgctggttggccttaggttgacatgaccttcgttgaggtcttttcagcttattactaaccatactaagtttatgattttaatgttgctgcgaagcc

SEQ ID NO: 60696 - protein, 108 aa, Triticum aestivum
  peptide (1)..(108): Ceres Seq. ID no. 12616267
MSRGRPASSKGSTPSTTLPVPPMMTRRTTSEERSCPPQCSIATCVFVEVWHPAQRACSFEFWLCRLSYRLCYLDYVPCWHLDLNLNPLVWHPFFIFCGCSMLVGLRLT

SEQ ID NO: 60697 - protein, 86 aa, Triticum aestivum
  peptide (1)..(86): Ceres Seq. ID no. 12616268
MMTRRTTSEERSCPPQCSIATCVFVEVWHPAQRACSFEFWLCRLSYRLCYLDYVPCWHLDLNLNPLVWHPFFIFCGCSMLVGLRLT

SEQ ID NO: 60698 - protein, 85 aa, Triticum aestivum
  peptide (1)..(85): Ceres Seq. ID no. 12616269
MTRRTTSEERSCPPQCSIATCVFVEVWHPAQRACSFEFWLCRLSYRLCYLDYVPCWHLDLNLNPLVWHPFFIFCGCSMLVGLRLT

SEQ ID NO: 60699 - DNA, 491 bp, Triticum aestivum
  misc_feature (1)..(491): Ceres Seq. ID no. 13584184
ctttctccttttatgtctgtcgcaagacatgcaaggaatgcgggccgacgctatcgacatgccccttgtgccgcgcgccaatcactgtccgtgtaaggctcttttcataaagatgatgcagacttctggaagtgaagaatcagccattcatgcaatatgttatcggcagtaatcaaggagcaagaagttgggcgggcaaggagatatgtacatgttcataaagctttactgtataacatgtccagcgccaactgtttcggctgtctgagtctgatgaataatttccatcacctcttgtgcagtttattcctgtcatcttgtaaaaaaagtagcagcagtagtcgtagttgaaaatcgtgttttcctgtaaaacctaaatgaatcaatacttcctccgtttttatttagttcgcgtattagctttagtcaaagtcaagctttgtaaactttgaccaattttataaacaaaaatattaacatatacgaaaact

SEQ ID NO: 60700 - protein, 64 aa, Triticum aestivum
  peptide (1)..(64): Ceres Seq. ID no. 13584185
MLSAVIKEQEVGRARRYVHVHKALLYNMSSANCFGCLSLMNNFHHLLCSLFLSSCKKSSSSSRS

SEQ ID NO: 60701 - protein, 56 aa, Triticum aestivum
  peptide (1)..(56): Ceres Seq. ID no. 13584186
FLLLCLSQDMQGMRADAIDMPLVPRANHCPCKALFIKMMQTSGSEESAIHAICYRQ

SEQ ID NO: 60702 - protein, 47 aa, Triticum aestivum
  peptide (1)..(47): Ceres Seq. ID no. 13584187
MQGMRADAIDMPLVPRANHCPCKALFIKMMQTSGSEESAIHAICYRQ

SEQ ID NO: 60703 - DNA, 1302 bp, Triticum aestivum
  misc_feature (1)..(1302): Ceres Seq. ID no. 12586751
agtagttgctgcagcttgtcatcagcttcggattctgcaggttgaagcacacttgcatggcgaattactacaatccattcataattaactaagcgcaggcgtcgatgcatgtcctgttgtcttctcggtcatcttcttgatccaccaactccagctcgtcgtcgtcggcggcggggttggcgaaccggagcctgagccggccccctcgcgggacgcctgcagcagctccttcccggggatcaccacctgcgtcagcacgaaccgcccatccgcgcggaacgtccggaagcacacgcacggcttcccgccgcgcccgatcgatcgtatcggcggcgggaacgacggcggggactccctcagccctggttccgccgcagcagctgcgtccctcagcgttgcttcctgcctctccctccctcggagggcggcggccgcgtcggcgccgtcatccctgaccatgtcgtccgagtccaccgtgctctcggacccgagcccctctgtgcacagcagcagcgaagccgagctcttcttcaggcagaagctcgcgctcctcctgacgccgccgggggcggccgcggcgccagcgggcttcggcctgaggagcgcgtccagcgacgagtcgtccttgctcttctcggcctgactagcgatgtcgagccacgacgccgccgtagcgcgtgcatcagggagtggcacccgtggcaggacgtgtcgggcggcggcgccgtcgggcttctcgtggaagtggagctcaccgaagatctccgtgaaggacgacgggtccacggccggcagcagcttcttgtggtgggtgtggttgttgcaagccgacagcacctccagcagcgtggggttctccggcaacggcttctcgaacagccgccgcagcgcgccgtcccccatccaacaagcagcgcccctcagtcagtcagacgtaataaaaaggctgcagtattttttgtgaccgtcgaattttgctcaagtaatctccgaggaagagaggtatatatagcgagagaaaaggagaggccaggaaaggcggatgcttttatgtggctgtcgaatcgggattcggaaatttgtttcttgttttttaggcttttcatttcacaagtggagccggtatatactcctactgcaacttgggaggaactggaaacgtgcatcttgcacagttgtctctgttcttcagcactggcctgcacaacatgtcagggagatggaaatatgcaggtagagctgatgcagcattgcatttgcatttgcagctcgcacaaatttgatggtgatctttgccctggc

SEQ ID NO: 60704 - protein, 104 aa, Triticum aestivum
  peptide (1)..(104): Ceres Seq. ID no. 12586752
MSSHDAAVARASGSGTRGRTCRAAAPSGFSWKWSSPKISVKDDGSTAGSSFLWWVWLLQADSTSSSVGFSGNGFSNSRRSAPSPIQQAAPLSQSDVIKRLQYFL

SEQ ID NO: 60705 - protein, 84 aa, Triticum aestivum
  peptide (1)..(84): Ceres Seq. ID no. 12586753
MWLSNRDSEICFLFFRLFISQVEPVYTPTATWEELETCILHSCLCSSALACTTCQGDGNMQVELMQHCICICSSHKFDGDLCPG

SEQ ID NO: 60706 - protein, 64 aa, Triticum aestivum
  peptide (1)..(64): Ceres Seq. ID no. 12586754
MLLCGCRIGIRKFVSCFLGFSFHKWSRYILLLQLGRNWKRASCTVVSVLQHWPAQHVREMEICR

SEQ ID NO: 60707 - DNA, 1316 bp, Triticum aestivum
  misc_feature (1)..(1316): Ceres Seq. ID no. 13597590
caatgatcgatcatcattcaccatttattgttagtgtcggctcccaggcacatataaattactagagacaacaacattacccacaaattccaaatgacggtcttccatttggttgccttggataatcccatttcaatcaacatgcaaggctgcagatgaacatatatgactctattaactaatagcacatatattcatcccaatggatttcatctgcctaagctaatgttgactcagacattacgcttgctgaataccactgggccaggtcaagtttttaacaggctctagaattgcttcgacttcgtgcaaaagttcttcatctatgcctgaagtcgacaattccactgcagcagcaacattctcctccacctgttctggagagttcattccaacaagaactgtagaaatttcattgttcatcaagctatacttcatggctagctttgtaatatgtttccccttctttctacagtgatctgctgctgtcctgcatgccagcttgagttcttctggtgcagggtgccactcaggtggcccgttatccgtgagaagccccatagcaaggggcgaagcactgatcaccccaacacctttgctcttcaagtacggtagcaaatccaccagcgcggtatcattgattccgtagtggcagtaggacagaaccaaatctactgagccgggaggcacccggtcaagcacgtaggtgaagatgctcaacggcaatccagtaattccaatgaaccgcgccttcccactctccttgatcttttgcagcgcaggaatcgtctcgttcacgatctggtctaggctggtgaactcgatgtcgtggcagtgaaggatgtccacgtagtcgagcccgaggcgcgcgaggctctcgtcgatgctgcgcgtgacacgggtggcgctgaagtcgaagccctccttgtagcggccgcacttggtggcgaccacgaagctgtcgcgcgggacgcccgagaagcggaggcagtccccgagcaccgactccgacaccgtgccgccgtagtacggggatgtgtcgaagaagttgatgccgaggtcgagggcgcggcggacggtggcgcgggcgacgtcgcgggggacgtcgccgaagacgttgccgagcggggaggcgccgaagccgacggggctaacgcggaggcccgtgccgccgagggtgcggagctccattgctcgggttggtgttggttgcgccgagtggaggaggtgggtggtggttgccttgcctggctgatggtccagctcgtcgtgtctttgtcttgtctcggcggggaatttgcgggagagatggtgag

SEQ ID NO: 60708 - protein, 67 aa, Triticum aestivum
  peptide (1)..(67): Ceres Seq. ID no. 13597591
MPRSRARRTVARATSRGTSPKTLPSGEAPKPTGLTRRPVPPRVRSSIARVGVGCAEWRRWVVVALPG

SEQ ID NO: 60709 - protein, 53 aa, Triticum aestivum
  peptide (1)..(53): Ceres Seq. ID no. 13597592
MFPLLSTVICCCPACQLEFFWCRVPLRWPVIREKPHSKGRSTDHPNTFALQVR

SEQ ID NO: 60710 - protein, 50 aa, Triticum aestivum
  peptide (1)..(50): Ceres Seq. ID no. 13597593
MPEVDNSTAAATFSSTCSGEFIPTRTVEISLFIKLYFMASFVICFPFFLQ

SEQ ID NO: 60711 - DNA, 1914 bp, Triticum aestivum
  misc_feature (1)..(1914): Ceres Seq. ID no. 13584573
cccctcgaggtcgacggtatcgataagcttttttttttttttttttcatccaaacgactcaaagtattaaataccaaagttttttccagaaaccacagtattccagaaaaccacaaaaatactttggcttccaaacgcacccttaatttttttaaaaagcccgtagcaactcacgggcattctagtatctctagtctatctgtgataatcgtgagagggaagaccagtaacgttatataacactataacaacactaactcaaacaacaccagactgaaactgaggcggtcgtggatcctatcatactcttagaaaccaaaggcaccagctggccctcctctataactggtctcttccaagcacgagtacaagacagtgagggcgaacatgatcccggtgccagagccgaccacgccagcaaggtctgccagaagcgtaagtgcaccaatgcagagtcctacaagaaacgctgccttgcctacatagcacctccatagctgcagaggaacagagtccggctgggcgactgttacatttcgtcgctccccaagcaacctgccaacgcactgaaaagggaaaatgacgtaaggccacaccccagaagctgccacagcgcataaaccagtgtgaggaatgggtgtcttcctacttcagccaaggttggtggtgtagtaacgtagtaggctaagccactgactggaactgcttgcccaaaatatctggatttcttccatttgcccagcaaaatgaccaccttgttcttttcaccaaacttcacgtacaccaactctgagatgatgtataggaatatggccattacatcctggaagagtaggggtgcaaaggacaggtaggaaagcttgatggcatagttcatttgcatactaggcacctcactggatctcagtggcaacatggcatggaagccttgcaggctgaggacgagtagaaagaaggcgcacgtggaaagcacactagccatctccgggaggtctcgacatccgtacaccttatgcatcgaagacaatttgtagtttccattaccaacgaatcgatgaataagggaggaagtgagagcttccccatgttgatcaccatgctgcccaccgtatagctttatgatacaggggctaaaagctttccagaaaatacttgtacaaatgtcggtggcactgaacaaggggatactcgaaagaaacccatatccctttttaaggagatcatcaagataaatgacgatgacacttccaaagaaatgctgaagcacgatcagaattgactgccctaaggtcagtttgcccaagataggtgaaattagcaccctgcagactgagaaatcagcggcaaaaattatcccaaccaacttctgcacccgactcaggagcatccggtcctcaggattgtttgctctaagaaccttacaccacagcaggaaatgaagcaccgcctcagacagaacaaggggcatgatcccagcagacatgacggagttgcagtcgggcatgtcaacccagtactgagagtcagcaaccgatggagaacggactccatatccatacacaggcagttggctgccgacaaggtagatgaggagggaaatggccgtgtaagccaccttctggcagcgagggaccatgctgctaggcctctggacctccggtaagatccccaccacttgcagggccagattgggcagctccagccagcgatctgccattgaatttgtgatgacgtgcagctagattacaattgttagtaccttccgtcgaagctggacggggagggccaagccaagccaacccaaggcggtagggttcttgccgcagttgcgctggccgcacgagaccgagccgctgctaagccttagccgctgtggtgctgcctgtgtggcgacgggcggcgagaggagagaat

SEQ ID NO: 60712 - protein, 79 aa, Triticum aestivum
  peptide (1)..(79): Ceres Seq. ID no. 13584574
PLEVDGIDKLFFFFFSSKRLKVLNTKVFSRNHSIPENHKNTLASKRTLNFFKKPVATHGHSSISSLSVIIVRGKTSNVI

SEQ ID NO: 60713 - protein, 75 aa, Triticum aestivum
  peptide (1)..(75): Ceres Seq. ID no. 13584575
MKHRLRQNKGHDPSRHDGVAVGHVNPVLRVSNRWRTDSISIHRQLAADKVDEEGNGRVSHLLAARDHAARPLDLR

SEQ ID NO: 60714 - protein, 39 aa, Triticum aestivum
  peptide (1)..(39): Ceres Seq. ID no. 13584576
MAWKPCRLRTSRKKAHVESTLAISGRSRHPYTLCIEDNL

SEQ ID NO: 60715 - DNA, 1278 bp, Triticum aestivum
  misc_feature (1)..(1278): Ceres Seq. ID no. 13584646
agatcaaattgcagtttctccttgattcatccatgatgatgagtaattaagcgcactggcaaacaatcaaagctaactagtaattaaacagtataggagcacctaaaacaaaacaaggagaccacaaacaacactgatttgtgaagctggaaagaaagaaagaaaggaacaagaatcaaaagagggggatcgagagtggagacaccttgctcgctggctagagctagagctagagctagaaggccggcggtggcggccggaaggagccaaacacatcgtgcgccatctgaccgccgccattaggcatctgcaggtttggcggcaagttgtagaatggcatcgacgacgggtctggcagtccgggcacgcccacggccgcacccatcccgccgtttcctcccggagccggcccgtccggcagctgcatgccgtcggatccggtggctgccgcggccgcctcgccaggctcttcatctgcgagcgggaggcgctcgtaggtggcgttggagaaggtagcagcgacgaccatgacgggcccagacgcgacgagctccccgatgacggtgccccccacgacctggccctgcccgccggcgaggtagacggcgaggccggtcgcccccggcgggcagggcgacgggaggaaggcgccggagagggagaggatctcgaagcggccgtggagcgtgacgacggagccgggcggcgcggcgggctggcgcagggtgacgttgccgacgacgccgctgccggagagcacggagaccccgcgctggcggcggcgcgcgaaggtggacaccgcctccatgatgtcggcgccgctggcgatctccagcacgtgggagcgcagcgtgttggggctctcccgcgtgatgatgatgggcggcttgggcttgttcttggaccccgcgggcctccctcgcggccgccggcccgacgacgagcccccgccgccgctgcctccgcctcctccggacgggcctgagcctgagatggcggcgttggggttaggggagttgtcgcccgcgccggcggtgggggagtcctgcgctgcgccggaggagtcgtcgtggttgttgctcccgctgctgtttggggtcgtcggggcctgctcggcgccgcccatggcagcgccgccggcagctgggccgccgaactgcgccaggtggttgcggagatccaggccgcccatgctccctgcccaccacgccatcgatcctctctctctctcaccgttagaggggggagagcactgctctgagtggagttgatgttttt

SEQ ID NO: 60716 - protein, 154 aa, Triticum aestivum
  peptide (1)..(154): Ceres Seq. ID no. 13584647
MMSAPLAISSTWERSVLGLSRVMMMGGLGLFLDPAGLPRGRRPDDEPPPPLPPPPPDGPEPEMAALGLGELSPAPAVGESCAAPEESSWLLLPLLFGVVGACSAPPMAAPPAAGPPNCARWLRRSRPPMLPAHHAIDPLSLSPLEGGEHCSEWS

SEQ ID NO: 60717 - protein, 153 aa, Triticum aestivum
  peptide (1)..(153): Ceres Seq. ID no. 13584648
MSAPLAISSTWERSVLGLSRVMMMGGLGLFLDPAGLPRGRRPDDEPPPPLPPPPPDGPEPEMAALGLGELSPAPAVGESCAAPEESSWLLLPLLFGVVGACSAPPMAAPPAAGPPNCARWLRRSRPPMLPAHHAIDPLSLSPLEGGEHCSEWS

SEQ ID NO: 60718 - protein, 132 aa, Triticum aestivum
  peptide (1)..(132): Ceres Seq. ID no. 13584649
MMMGGLGLFLDPAGLPRGRRPDDEPPPPLPPPPPDGPEPEMAALGLGELSPAPAVGESCAAPEESSWLLLPLLFGVVGACSAPPMAAPPAAGPPNCARWLRRSRPPMLPAHHAIDPLSLSPLEGGEHCSEWS

SEQ ID NO: 60719 - DNA, 1043 bp, Triticum aestivum
  misc_feature (1)..(1043): Ceres Seq. ID no. 13585491
agacccaacgccggccgcgcactttactccgctctgactgactccccgctcgcccaggtggatacatagataggctgatagatatagctttggaaggatcggatcggatcgacccaagcggctgcccaagtacgccagcgtcccatcctcgtcggccgagcaagcaagtgcagctagcggcagcggggagcagacatggtgtcgttgcagtcggcgctgctgccggaggccggcaagcgggccccgtgcctcttcttcgccgacgccagcgtcgtcgcgttcaccgccaccagcaagaaacggaaccgggaccgccaaggtggaggaagaagaagaacaccaccggaatcgagcttaattttgacgccgcgccgctccccctcgagtggcagcgctgcctcgacatcaagtcggggcagatccactactacaacaccaggacgcacaagargacgtccaaggacccgaggcggcacggcggcgcggcgcccgcggtggaggaggacgtcgcgaattgcgggccgcaagggctggacctggacctgaacctggcgttcgagccgcggcgtagttcgcccgtcaaggagctgcagaagaaggccgaggccaagccagcggcggcgggaggcgatcgtcacggggaccaggcgccgggcagcgcatccggcggcatggagatggtggcggccgtgtgcatgcggtgccacatgctggtgatgatgtgccgcgcgtgcccggcctgccccaactgcaagttcctgcacccgacgagccggcccacgcctccgccgccggagccggcgccgctcaagctcggtctccagctgctctgctgcagggactaagctcgctcctatagagatcagatcatgcatgcatggaccaagctagcattcgaatatccgatcgatcgtctcatggtgcmccttgatataagtgcaacgaggactgttacagtgcaccacaagtaatgttgtactctacgttgaccatgtagctgcggacgagwgtttgtacatgtgcaagtaataaacaatgatggt

SEQ ID NO: 60720 - protein, 116 aa, Triticum aestivum
  peptide (1)..(116): Ceres Seq. ID no. 15220765
  misc_feature (86)..(86): Xaa is any aa, unknown or other
MVSLQSALLPEAGKRAPCLFFADASVVAFTATSKKRNRDRQGGGRRRTPPESSLILTPRRSPSSGSAASTSSRGRSTTTTPGRTRXRPRTRGGTAARRPRWRRTSRIAGRKGWTWT

SEQ ID NO: 60721 - DNA, 1337 bp, Triticum aestivum
  misc_feature (1)..(1337): Ceres Seq. ID no. 13597751
caacaatgagaataacatcaatcagccaaatgtacatagagactttgtgacagaaagagcgatatatgtccttcgtgctgcagaatgctaggacattggttctcaccactgctatgatctactaaaattcaaggtccatgaaagaaaagttgtacataaaaccgaacgcacttacagaggaatacacatgacataattgttatgcaagggaacagttgtcaaatcacgcctccacggcaggcatagatcattgagttgtaactttaaccttgttaacaagctctgctgctgcacgggcggcggcagaggcacgggtggctgcagcaatggcagctcgggccttttctagcacgtccgacgagcctggaccagcataggatgatctctccgcagcagggggctgatgctcttgactgtccacattacccttggtggcagcatatgctcttgaactcacagcaggtgactttggggactcgggagttttgtttttgcttgtgtcgttgacaggtagaatcgatggcttatctttggaaatggaagaggctggagagctctcagttgtaggtgtttggacttggcggactgatgatcctgaatcgtccagcagatcttcatacttcttgttaaattctgcttcggtattagatgaatcccaatcaaggttgtactcgtgagcaatagctttcaaaaccttcaactttgattccgctgatggagccttaactgaaagcttctcaattattgtgcgattaacaccgcaatcagggcgcaattccatagcagcagcaacaaactccttcccatacttggtggtaaacaaattacggagatgcattagctcaggcaagtctgagcatcttcctgatgcaaagattatactagctattgcttctctcaattctatggggcattccttttgggcctcaacaatagggactcgtgccagaacaaattcacagaaaagctcaacaatctcataggcagccaatatattttgctcccgaataatatgctccacccgaatcctcgcaatagactcctggcctgtctgaagatattgaaccatctctttgcgcatatttatcagttgcatctccctcctattgcgcagcagcttgatcctcgaaatgatcaaattcaagcatgttttgcatttggtgccgaagggggaggagcgattgaagagcgagttgagggacgacatcgtcagtgccggccgctgatccacctgacccggcgaagacgaagacgaaggggaaagaagctgttccgtgtatatttgcaggtgtgcccctttacttgattgtttttatagtttacaccatacgccagat

SEQ ID NO: 60722 - protein, 97 aa, Triticum aestivum
  peptide (1)..(97): Ceres Seq. ID no. 13597752
MLHPNPRNRLLACLKILNHLFAHIYQLHLPPIAQQLDPRNDQIQACFAFGAEGGGAIEERVEGRHRQCRPLIHLTRRRRRRRGKKLFRVYLQVCPFT

SEQ ID NO: 60723 - DNA, 487 bp, Triticum aestivum
  misc_feature (1)..(487): Ceres Seq. ID no. 13589065
aagaaagatctggaatgacccgcggctgcggtccgtcccccccaccccccaccccccggagcgaaaagaaaaataacaatccgagcgtagcgaaaccctaggcagcgcagcagaggaaccgatccccggcgatggcggcggcgatggaggagctgacccgcagcgggttggcggggatggatttctccatcttccgcggggagtccgagggcgagcggggtgccggggggaaccatgagtgtatcaacatcaggcctccatccccatccccatgcgccaacgaggagcagccgccgccggagaagatggagcaggaggaggaggagggggagggggagaaggaggagtgggtctacagggaggaggatcggatcaccaggtaccgcgggctgtgggagagccgcttcgccggcaaatacggctccttcgacgaccagacaactcttggtcccatgcgctttacattcggacccatcccgagctacgc

SEQ ID NO: 60724 - protein, 118 aa, Triticum aestivum
  peptide (1)..(118): Ceres Seq. ID no. 13589066
MAAAMEELTRSGLAGMDFSIFRGESEGERGAGGNHECINIRPPSPSPCANEEQPPPEKMEQEEEEGEGEKEEWVYREEDRITRYRGLWESRFAGKYGSFDDQTTLGPMRFTFGPIPSY

SEQ ID NO: 60725 - protein, 114 aa, Triticum aestivum
  peptide (1)..(114): Ceres Seq. ID no. 13589067
MEELTRSGLAGMDFSIFRGESEGERGAGGNHECINIRPPSPSPCANEEQPPPEKMEQEEEEGEGEKEEWVYREEDRITRYRGLWESRFAGKYGSFDDQTTLGPMRFTFGPIPSY

SEQ ID NO: 60726 - protein, 103 aa, Triticum aestivum
  peptide (1)..(103): Ceres Seq. ID no. 13589068
MDFSIFRGESEGERGAGGNHECINIRPPSPSPCANEEQPPPEKMEQEEEEGEGEKEEWVYREEDRITRYRGLWESRFAGKYGSFDDQTTLGPMRFTFGPIPSY

SEQ ID NO: 60727 - DNA, 1447 bp, Triticum aestivum
  misc_feature (1)..(1447): Ceres Seq. ID no. 13495628
ggccaaacataattaccatttaacacttgatacatcaggtaactgggatgatccatccatcccaaacacggcaacacacactctctggcgcatctccagacggcacacacacagcacgcacacatctctatcgtttcgtacacagagctcaaggaccgcgcgtgtcaggcattaccaccagcgcggtgctccactccactagtttgctaagccccaaagcaccgtccttcgtagttcgtacacataaccacgtacgtacgcacgcgcacgagaacgccaacacaccactcatataacgtacgcctgccggcggcgagcgagctcacgagctcagagctggtggcagctgctctccagcggcgccccacggtggcacatgttgtgctcgtagggcttgcagccgtgccgcatgacgccgtgcagcttggggagcggcccgcagaggttgttgtagctgaggtccagcgtctgcagcgtggacagcgcctccagcgacctgggcacggtgccgctgatgcggttgtggctcaggtccaggtacgtgagctccttggggaacttgagcttgctcaggtcgaactcgaggttgttgtaggacaggtccaccttgccgatgggccgcccctcggagaagaggaaggacgcgtcgccgctcagctggttgtgcgacagatccacggtgttgatctcgtcctgcgcgtcgtcgcgcgggatcgggcccgtcagctggttgtaggacagcaccagcgaccggaactgcccctgcacgaggctggccgggatgtggccggtgagctggttccggcggaggtccagcgaccggaggttgggcatgtcggcgaaggagttggggatggagcccgtgagcttgttgttggagaggtccacggagtcgaggctgtggaggcgcgccagggactccgggatggagccggagacgttggtgtgggagacggtgaggaactcgagcttggagagggaggtgaggcaggccgggatggagccctggaggcccgggaggcggaagagcgagagcgacatgagcgccgtcagccccgccagcgcggacgggatctggccgcgcacgtcgtcggcgccgtcgatgaagacgttgttcacgcggccggcctcgttgcacgtgaggtggtcccacgcgcagcagtccgccgacgccggcgaccacgtcttcagcgtcgccgggctgcccagcgcctgcttcacccggagcagcgcctgccggtccgcctgcgggcaccgctggggcagcggcgagcaatgcgccgtcgccaccagcaggagcgccagcagcgggaggaaggaggcggtcgacgccatcgtggccctgtggctgtgggtggctgctaccttctactagctcagctttgctagctagctatggaggaggaggccaaggtggcggaagtgttgagtgcgggagtgatgagct

SEQ ID NO: 60728 - protein, 197 aa, Triticum aestivum
  peptide (1)..(197): Ceres Seq. ID no. 13495629
MWPVSWFRRRSSDRRLGMSAKELGMEPVSLLLERSTESRLWRRARDSGMEPETLVWETVRNSSLEREVRQAGMEPWRPGRRKSESDMSAVSPASADGIWPRTSSAPSMKTLFTRPASLHVRWSHAQQSADAGDHVFSVAGLPSACFTRSSACRSACGHRWGSGEQCAVATSRSASSGRKEAVDAIVALWLWVAATFY

SEQ ID NO: 60729 - protein, 180 aa, Triticum aestivum
  peptide (1)..(180): Ceres Seq. ID no. 13495630
MSAKELGMEPVSLLLERSTESRLWRRARDSGMEPETLVWETVRNSSLEREVRQAGMEPWRPGRRKSESDMSAVSPASADGIWPRTSSAPSMKTLFTRPASLHVRWSHAQQSADAGDHVFSVAGLPSACFTRSSACRSACGHRWGSGEQCAVATSRSASSGRKEAVDAIVALWLWVAATFY

SEQ ID NO: 60730 - protein, 173 aa, Triticum aestivum
  peptide (1)..(173): Ceres Seq. ID no. 13495631
MEPVSLLLERSTESRLWRRARDSGMEPETLVWETVRNSSLEREVRQAGMEPWRPGRRKSESDMSAVSPASADGIWPRTSSAPSMKTLFTRPASLHVRWSHAQQSADAGDHVFSVAGLPSACFTRSSACRSACGHRWGSGEQCAVATSRSASSGRKEAVDAIVALWLWVAATFY

SEQ ID NO: 60731 - DNA, 1198 bp, Triticum aestivum
  misc_feature (1)..(1198): Ceres Seq. ID no. 13663116
ttgggtaccgggccccccctcgaggtcgacggtatcgataagcttttttttttttttttttatgcttaaaacagtgataatgcatcccacttcccacacgaggcggggttcctcctctggattgttaaaatcaagggatattgcgaggaaaatttagtgcatacaacatctctgcataccacaagcaatcagagagcaaaacgacatagtagattggaaaattgcctcaaacaacattagctgaggcggttcgaatctcagtaaaacactacacggccacttttccaagctgcagtcttcatcatgtgtgcggccttacaccgtgtatcgtccacctctgcttggtttctgacttcttgagtcatcgtggaagctgtagaccatcttatcattgtagtcaatcacctccttccatttcttgccaatgtctacctgaacagcttcgttactggcagtcttagtccataatgaaagcttatcctgtctctggcggacactagcaacaacaccacaaatttcctggctttcatcaaactgctctccaatcagagccatacacgtttcaagccacatggtatcaagattggccttcctgctagatatcacagtccatttgcccccatttgcgcactctggatcttcccactttggttctaccccagccttgaataaatgaaaatcagcacttcctaccagcttactcggacggaaaatctgatcatacaagcaccagaactcttcgacggtgtcgaaggtgtagccctttttgagcgaggtgccccaggcggcgccgggcttgggcttggtctggatgtcgtaccagaaggtccactgccgctgcagcttgtgcggccccttcgcctcggccgcacccgcgtcgccctcggccgcgacctccggggtctctgtcgccgccaccgggagcgcagcttcgacctctgccatgtcgcgccgccgcctttgcttttcgagggttttgggatggggaggatgagtcgcgagagccgcagcgacagagagggagagagagagagagaggagcagccgccgaaggaaaggggggggcagagggagctttgctacacgcacgggcataacttttttttcgattaggatgttctaggtaatggtctcgtgcgaattcctgcagcccgggggatccactagttctagagcggccgccaccgcggtgagctcc

SEQ ID NO: 60732 - protein, 146 aa, Triticum aestivum
  peptide (1)..(146): Ceres Seq. ID no. 13663117
MKISTSYQLTRTENLIIQAPELFDGVEGVALFERGAPGGAGLGLGLDVVPEGPLPLQLVRPLRLGRTRVALGRDLRGLCRRHRERSFDLCHVAPPPLLFEGFGMGRMSRESRSDREGEREREEQPPKERGGQRELCYTHGHNFFFD

SEQ ID NO: 60733 - DNA, 687 bp, Triticum aestivum
  misc_feature (1)..(687): Ceres Seq. ID no. 13597974
ctcgaccgatccccctcctcgacctgcctcgccgccgcctaggtaagctccacacgcttcgccatcgacctgctcgccatgtaccgaccaagcttcagctcgagctcgggatagccgtcgatgtcgcttccccggtcacctccagccgccttcttcaagtcggtctgcctccccgtcgtccccttcgtccgctgcttccactacatcgccgacgcagacgccaagttccgcgcctggctcttcctctgcttcctctacttcgcggacagcagcctcgccaggttcagagctcgtctgcgtcgctgcaggctcgactccgtcgccgtatacttgtgcttggagccaggagacgagtacgtgcatgaggaacctgttgagtacgcttacgaggatccatccttcgacaactctgagaaccttgcaggtgccgaggatactggcgcagatggcgcaactgagctgaagtgggaattcgatgaggcccttggtcgttactatgtatcgtttccagatgatcaatagtggggcccaggggacgatcggggatctaacatttggggttgtcttcttttcatttgaacttggccgtagccggtctatgagtgtatttgaatgatgtatgatcttaatttatgtattgtgtgaagtggcgattgtaagccaaccctctttatcccattcttgttc

SEQ ID NO: 60734 - protein, 133 aa, Triticum aestivum
  peptide (1)..(133): Ceres Seq. ID no. 13597975
MSLPRSPPAAFFKSVCLPVVPFVRCFHYIADADAKFRAWLFLCFLYFADSSLARFRARLRRCRLDSVAVYLCLEPGDEYVHEEPVEYAYEDPSFDNSENLAGAEDTGADGATELKWEFDEALGRYYVSFPDDQ

SEQ ID NO: 60735 - protein, 120 aa, Triticum aestivum
  peptide (1)..(120): Ceres Seq. ID no. 13597976
RPIPLLDLPRRRLGKLHTLRHRPARHVPTKLQLELGIAVDVASPVTSSRLLQVGLPPRRPLRPLLPLHRRRRRQVPRLALPLLPLLRGQQPRQVQSSSASLQARLRRRILVLGARRRVRA

SEQ ID NO: 60736 - DNA, 948 bp, Triticum aestivum
  misc_feature (1)..(948): Ceres Seq. ID no. 13656423
actctccgctcgccgccgccgtgctgctgcacgttctcaccctgccgccgccgccctgccctggcgcacagcacgcgtgcttgatcgcaccgatgttggccgctccgctcgccactgcgttgtagcccttgcttactgcacgcaccaccaagcagccatcacggctgggatctgatggctggcaggcgaggcaccggaggcggacagcctaggcctcaggagtgcggaggcgaggtcgggtggtggctcggcgaactacagcaaggggcgtcaaggtgcaggcttggccggaggaggtgggcccagatattcggggggacaaggaggatgagagggaacctcctgcagtggacgacgaagaaggggagtagtacccctcctcagcggaccaagatgacctaccatgccggaggcgaagtgttcagcggcagcggatttgaaggtggcggcagtagcagatcggcttaggaagaggaggaggagtacggtgggctcgacctgctggtggtggacgtcgggattgacgagatgcacagttcctatggtggctgccgggctaataggatttgtaggaggaggaggacgggtgggagagacctgctgctagaggacgagggtcgatgagatgcatgattcctatgcttctcttgagacagccatgatgggaacacgattcatatgctttagttatctatttcaactgatccatggttatagttgtacactgtatgggctaacttcttcaaattcggcttttttttcctgaagtgacgagagatcttagttatataggagtaaatgcgccttttggcgagtacaatttaaagctttattctttgctgatcaaaaaaaaaaaaaaaaaaaaaaaaaaaaaaaaaaaaaaaaaaaaaaaycaaaaaaaaaaaaaaaaaagtttatcgataccgccaacctcaagggggggcccgg

SEQ ID NO: 60737 - protein, 97 aa, Triticum aestivum
  peptide (1)..(97): Ceres Seq. ID no. 15219825
MAGRRGTGGGQPRPQECGGEVGWWLGELQQGASRCRLGRRRWAQIFGGTRRMRGNLLQWTTKKGSSTPPQRTKMTYHAGGEVFSGSGFEGGGSSRSA

SEQ ID NO: 60738 - protein, 67 aa, Triticum aestivum
  peptide (1)..(67): Ceres Seq. ID no. 15219826
MPEAKCSAAADLKVAAVADRLRKRRRSTVGSTCWWWTSGLTRCTVPMVAAGLIGFVGGGGRVGETCC

SEQ ID NO: 60739 - protein, 57 aa, Triticum aestivum
  peptide (1)..(57): Ceres Seq. ID no. 15219827
LSARRRRAAARSHPAAAALPWRTARVLDRTDVGRSARHCVVALAYCTHHQAAITAGI

SEQ ID NO: 60740 - DNA, 565 bp, Triticum aestivum
  misc_feature (1)..(565): Ceres Seq. ID no. 13656643
atcgaaaatctctctccctctactccgccagcgctgcttctccttggccggccaccgcctaccgatcctcccctacgtcccctgcgccgacgatgcggccccgtccagcccctccagccacaccgctgagtagtagaagagtgcctcggtgaacctgtcgaggaaccccggtttgttgtggtccgcctcttgctcgacgaccgtgaagatcttgggctgcaaggaggcgacgcagtctagaacggcgtcgatgggcgcctgatcggctatgtcggcgaggaggcggtggagctggagcacgaagttgaccgccacggcctcgcccggcgtgatctggagcatccacgggtggacctcgttgaggctgttggcggcgaccccgcggaaggagaatcggacgcggacggagcgcgcgaggtcggcgaggcggagaccgagatcgcggagctcgtcacggcctggtgcgtcggtgaagtgaacggcgacgcggccgatgccggaggcggtcgagacggcccgcgagccgaggcgttgtcatcggccaggtgcgcggcccgcgagcgcg

SEQ ID NO: 60741 - protein, 69 aa, Triticum aestivum
  peptide (1)..(69): Ceres Seq. ID no. 13656644
MSARRRWSWSTKLTATASPGVIWSIHGWTSLRLLAATPRKENRTRTERARSARRRPRSRSSSRPGASVK

SEQ ID NO: 60742 - protein, 49 aa, Triticum aestivum
  peptide (1)..(49): Ceres Seq. ID no. 13656645
RKSLSLYSASAASPWPATAYRSSPTSPAPTMRPRPAPPATPLSSRRVPR

SEQ ID NO: 60743 - protein, 43 aa, Triticum aestivum
  peptide (1)..(43): Ceres Seq. ID no. 13656646
SKISLPLLRQRCFSLAGHRLPILPYVPCADDAAPSSPSSHTAE

SEQ ID NO: 60744 - DNA, 1118 bp, Triticum aestivum
  misc_feature (1)..(1118): Ceres Seq. ID no. 13597957
gttgtaacaaatgatcagataagaaatttagtctcacatatggacattccccaatcaaaataggtcatttaatttcacctgtttggttacaaggtaattttctagaaaatctatttaccaaaaatatcaggcttaggactaagtcggccagcctcttgtgaccaaaagagagggatcgatcctcgcatctgtactattgcactcattcttcccttccaggaaccagcttcctcttcaaatactatttgctctgtttcaacatcgtttgcaacttttccatggtcattcacgcctcttttcaaataccgtgtcccagcaaaatgccgagatcttctcgaaatgagaataacatttaactccctgccaaatactgacagcttgacctgcttaaagtgtccatgaacgagagctacactccacagagcattgcggcaccttgagcgaatcggctctgtcagaaaagtgttccatacaaacaaattttcataaggtgtttccttcatccctgcagaggtgacattctgctgcaagctctgcatgattgggtatgtgtagctatagaagaaatcctttgtgagatcaacactggccaaaagcttcttgtaccttagctcgttcttagaggttgcaacatctgtctgtacagatgagtgcgggatggtgatcatctggctctcatctatacaatatatagcatggccacagatgcaaccgatttgacggcgcttggtgactaaaatcaggtaatatgactccaagaacttgatgcaacctgcgatgccgtaggccttggtgacgaaggtgaggccgccggtggagcggttgccctcggcgatgcgctggagtaggctcttgacctcctgctgggagtaccagacggggtcctcgctgaggtggagctccgacggctccgagcggtcaatcttgagcacccgaaaccaccgcttctcccgcgagctcccgatcacgtagaacctggcgcgcgtttcgtagaggcggaacttctccagcgtcgctgacgccgccgtcgggtcgtccgcctccgccgccatcgatcccgatcgaagcgcgcaagggaagagggggtggaagggagtccgaaggggacgatcggaaag

SEQ ID NO: 60745 - protein, 45 aa, Triticum aestivum
  peptide (1)..(45): Ceres Seq. ID no. 13597958
MRWSRLLTSCWEYQTGSSLRWSSDGSERSILSTRNHRFSRELPIT

SEQ ID NO: 60746 - DNA, 852 bp, Triticum aestivum
  misc_feature (1)..(852): Ceres Seq. ID no. 13662646
ccaatcagcaaagctccaggaaatttcaaaaacatgattcacaatcatatggttctgttgatgtttcagaatcaattcctcctatggttcactgctccagctagaattaagattcattctacaaggtgttccagtataggtgaccgaggggagagggatctctagggaactgcctttacaacctcatcaagtcatcattagctcaaagtgaacatgtcatcatgccatcctccttgaacgtatttggcttgcagccgcctgagggattcaacttgatctggtgatgcagtttcgacaaggaatgtctgaccccatatcttccgcagttcagatttatgcatgggtgagaggcacatgatgatcaagtcaaagcgagatactttcgccaaattctccaaaatgctaactgctaacactgcatcatcccggaaaattgaggctgtgcacttcacgatatcaatcagaaaagctgatgaaagtgcatccttaaaaatctctggaagtctctctggtcgaattgactttaacaactgtatttgctgggtaaggtcatcagagatagctctccaagaaacctcaaaatcataagctgtctttggtgtcttcacactttttacagtgctggacatatatcgtgaagcagcacgtgatgcaagctcttgcactgatatttctggcccaggtttctgtttagcatctcgagattgctgcatgttattgtctttgaggcttacaccagatcctcctttggacacaccacctgataattctctgatcccagccgcagctctcccaggcgaatcaacttccatgaaactgtccttctggggatcacttggtgcatgagaagtg

SEQ ID NO: 60747 - protein, 82 aa, Triticum aestivum
  peptide (1)..(82): Ceres Seq. ID no. 13662647
MGERHMMIKSKRDTFAKFSKMLTANTASSRKIEAVHFTISIRKADESASLKISGSLSGRIDFNNCICWVRSSEIALQETSKS

SEQ ID NO: 60748 - protein, 77 aa, Triticum aestivum
  peptide (1)..(77): Ceres Seq. ID no. 13662648
MMIKSKRDTFAKFSKMLTANTASSRKIEAVHFTISIRKADESASLKISGSLSGRIDFNNCICWVRSSEIALQETSKS

SEQ ID NO: 60749 - protein, 76 aa, Triticum aestivum
  peptide (1)..(76): Ceres Seq. ID no. 13662649
MIKSKRDTFAKFSKMLTANTASSRKIEAVHFTISIRKADESASLKISGSLSGRIDFNNCICWVRSSEIALQETSKS

SEQ ID NO: 60750 - DNA, 1528 bp, Triticum aestivum
  misc_feature (1)..(1528): Ceres Seq. ID no. 13658028
ccgggccccccctcgaggtcgacggtatcgataagcttttttttttttttttttgaacaatcacatctttttgttcattcattatcgcactcatacgcatcaaattacattagttctagtactcacacgtgcacgtgccacgcatttggaagtctcaaatgcatacaccgatacacactggatacacagagtttggcacttaaaatatgtatacttcttttttgcgggcacttaaaatacgtatacgccaagtgcttttatcttgccatgatttattaataccaggagtatatatattactcataacgaacaacgaatgaacaaatgaaatactgtgtacactacagggttccttccagaaaaacatatatgagatcaaaagcagcagccgctatggtcgggttaatattatcaaccagctgccccgtcactgtctgaccactgggaacaggcacccgtagaccttcgacaggaaggatttcttgggcttccttcgcgggtggccccacgtgggcaccacccggtccggcgagagctgccgcttcgcgaccggcggcacgtccggcgcggcggccttggcgacctcccggtgccgcttcaccttctcgaactgcaccgtgaagccctgcgccgccgcgttcgcgttctgctcgtcccacacgccgaacttgggcacggccgacggggccttggcggcacgggcctgcggtggcacgccctggcccgggcgccgctcgttagccggcggggacgcggtgaccctcggcgctggcgccgcttgctggtggtgcctcggcaccggggcggcgtacgcgccggcgacctgctgctgctgctggggctggtggtagctgccgccgctgttgccgtagcgcggctggtacggcctgggcggcgagaacttgctggcgcggctgctgacctcggacgcggcgctgctgccattgctcccgttccgccggtggtagcccccgtggccgtgctgcgcggggtagtgctgcgccggcgaggggtgtccgtggccgtgcgagctcggcggcctcgagggcacgttaccgccgaggtggtcatagtgctgcgccggggccgcgtggccgtggccgtgcgagctgggcgggcgcgagggcacgttccggctgaggttctcgtagtactcgtaggggtcgaactcttggtcgtcgtgccccctgggcgctggcgccgccgtgcccggcacgggcgcggccttgttctcgcgcaccttctcgaagaagacggtgtagccgatgttctcggcgtcccacgacccgaacttgggaaccaccggccctttcccggccattaagaaatgatgatgacgcctggcgatgaactgatgagagggaacctcttggtcgatccttgtttctcctctccactcttctctctctctctcgctccccactcgatcacaattgacgataggaaacgaggaggagagagggtgtgggaagggaggcgatggatgtgctcgcagggcagggtggttcttatgattggagtttcagaa

SEQ ID NO: 60751 - protein, 92 aa, Triticum aestivum
  peptide (1)..(92): Ceres Seq. ID no. 13658029
PGPPSRSTVSISFFFFFFEQSHLFVHSLSHSYASNYISSSTHTCTCHAFGSLKCIHRYTLDTQSLALKICILLFCGHLKYVYAKCFYLAMIY

SEQ ID NO: 60752 - protein, 67 aa, Triticum aestivum
  peptide (1)..(67): Ceres Seq. ID no. 13658030
MMMTPGDELMRGNLLVDPCFSSPLFSLSLAPHSITIDDRKRGGERVWEGRRWMCSQGRVVLMIGVSE

SEQ ID NO: 60753 - protein, 66 aa, Triticum aestivum
  peptide (1)..(66): Ceres Seq. ID no. 13658031
MMTPGDELMRGNLLVDPCFSSPLFSLSLAPHSITIDDRKRGGERVWEGRRWMCSQGRVVLMIGVSE

SEQ ID NO: 60754 - DNA, 1763 bp, Triticum aestivum
  misc_feature (1)..(1763): Ceres Seq. ID no. 13657822
gaaggaaaaaacatacaggggcatcagcttacgacaaaatttctacatacatagtacatattttacattctgcaggctacagcacacgaatcccttgcgagaaaacaatctgctcatcatttacaatgctacagcaatgatcagtgcaggatcaggcaaagacagttcatatgctcggtgccagctgaggttcagctacctgtggcttctgggggtccaaacctgggaactgcccgatgtcatgaccttctactcggtttaggctgtcatccagaccaatcgcaaactcctcaggccgttccccaccgctcgcaaagtagtcagcgacatgatctccaagagacattccgctcaatactgctgcttctatacttgaacccgtgagccagtcaccacaaatgcctgctcgaccctggggatcaaatatgcatggtactcctggagtgttcatcggtaaagctgcaccccacaactgtactcttgtgtaaaatggtcgctgaagagatcctgtcgagagccccagagcaagttcaactcccccaagcatgtctcgtttcactttttctgcagtggcatttgggatattttcctgtggaactttgtttttctttccataagaagcagtgctgaaaaatgtccagcactcgggtctgtttgtctccaaagggaaaagcttccgagtattgttggccatccaagagagagaatcaatatctctcacaaatgctccttcaaatgtgccataagagttatcttgtgggattggaagaggatcatcaaatgccgcaagtagtgcccagacagaactcaactccagtctcttcatttgccttgtcagttggggtagacctgacgtagaaagcagacggtttgcacatttcccattgtgtgctattacaacggcatcatattgaccctggggcttctcattctcaaacaagcgccacaggccgttgaacggctcaagcttgcttatccaggaaggccttacaactttaatcaggtcattctcgggcagcattgcgtcggcaagcgggcgcattcctctcacgccgatataccttggcgtcgaggaaggtatagctgtgaaatggccacctgcctcgagctcaccgatcgagcccctccattcgcgggccaaccctttctcgacccactcatcgaccagctcctggaacctctggtcgctcgcggtgaagaactgtgccgcgtggtcgaacaccagccgccgcccgtcgtcgaccatcctggtcgccatcctgccacctaagccgtgcatacccgtgtcgaatacgacggcgcggacgccgcgggcggcgagggcggacgcgcaggcgaggccagaggctccgcctccgatgatggcgacggtggggtcggcgggcacgggggtggaggagaccacctgctcctgctggaagctcttcttgatggccgactgccgcgagaaccggggcttgccgcgcgggcgccgcgggggcgccttcggaggacgcgctcctccggcgccgctggcggcgaccaccgccccggaaaagcgggacgcggcgcgcccggcggcggggcgagcgcatggggcggggtggaagagcggcatcgcggccttgcaaggtgctcgacaaaatgcgggagcgggggaagcagaccgttatctgtttacaagtattttatctttactttggagagagagaaaactgacgttctcacggttgctccatggtattgtatttttcaaggaaattggttgttctttttcgattagg

SEQ ID NO: 60755 - protein, 135 aa, Triticum aestivum
  peptide (1)..(135): Ceres Seq. ID no. 13657823
MMATVGSAGTGVEETTCSCWKLFLMADCRENRGLPRGRRGGAFGGRAPPAPLAATTAPEKRDAARPAAGRAHGAGWKSGIAALQGARQNAGAGEADRYLFTSILSLLWRERKLTFSRLLHGIVFFKEIGCSFSIR

SEQ ID NO: 60756 - protein, 134 aa, Triticum aestivum
  peptide (1)..(134): Ceres Seq. ID no. 13657824
MATVGSAGTGVEETTCSCWKLFLMADCRENRGLPRGRRGGAFGGRAPPAPLAATTAPEKRDAARPAAGRAHGAGWKSGIAALQGARQNAGAGEADRYLFTSILSLLWRERKLTFSRLLHGIVFFKEIGCSFSIR

SEQ ID NO: 60757 - protein, 111 aa, Triticum aestivum
  peptide (1)..(111): Ceres Seq. ID no. 13657825
MADCRENRGLPRGRRGGAFGGRAPPAPLAATTAPEKRDAARPAAGRAHGAGWKSGIAALQGARQNAGAGEADRYLFTSILSLLWRERKLTFSRLLHGIVFFKEIGCSFSIR

SEQ ID NO: 60758 - DNA, 2007 bp, Triticum aestivum
  misc_feature (1)..(2007): Ceres Seq. ID no. 13663290
ctgtttttcggcagtccttgtggtaggaaagttatccattcttcgaaaactcatctactactactcaccttgtagaattttttattctgctgcatatttggttttatcataaaatgaatggattattctgaaatacagtgtaacccctcccccctctcaacgattattattttagcatttatttattattattcttttgcctcttgctattgcttgctaaaggcacatgcatacacaaatctttcctcgtgccattgtttcttctgcaagcacctagcagtgtaatttcatgaatcaaagtaagattctgctatttggcccaaagaattatctgatgataccttttcccctttccttgctatagctactggatgtttattctttttgagacaagaacacttacttttggcctacttatactatcatgtcgattcctaatttaggagtgaatatgggccgtggactgcttttcttgcgtttgcggtgtgtttgttcttaccctttccaggtagagtaacatgaaagatcaataagtcctgcttaaaagtttgatgcactgtttgagcagtgattttgttttttatggtgagagttcctcggatgttatttttcgctcaaattttgcaagaagctcaagcatttgataattattttgtctcaaaatttcagattttttggattttgttttatcatgttttttcagtgtttttcgaaattcggtgtactacactcgagagttgtcacacctttctatatatctcatggttttgtggcttatgccttggaagctttttgccaatgcacaagtgcaaagtcctttcattttcctcctgtatcctcagttgcgtactataacatttgactatgtgtcgtgttggtctcaatgggctggcacagtactacagactatggctaaaggctatgtttacaaacataaaataatgattcaaagaagaggagcagacggtgctacgatatttacctcaaggtgatgaatcaatgaaccgagggacttattattcggtgaggccagcggggtattccatttcctgcatttcctcttcagtatgctgactccaatctccagagtcctcgatgattctttcttagtccatttaaatgggtattatttttaccagttggtacacgtttttctttcaatatgcactctcacaataatttttttttctgttcttcaaattgatttgttgatggtacaagggaatcattgaaaaaatgtcttctcatcaaggattggattgtgttctcattatagaacataatttattatgtgaggcatttgccattgcaacatcttgtctaggtaggtcatgcttggcagaatcgcctcctcccggtcttcaacactcctgcaggaattgagcgccagggtggtcgggacacatagaacaccaacaagggaaaaaaatgcaccactcctaggtcatgcttggcagaatcgcctcctcccggtcttcagcactcctgcaggaattgagcaccagtgtggtcgggacacatagaacaccaacaagcgacaaaaatgcactactccgaatattgatccttttatacagaatatgcagccagagtttgggcaatgatcaaaacgtggcttggtttacatgatgttcatcctacggactggggaggcatggtttccgtcaaggagtggtggcgcagcaacacttaagggaggtcgcaatctcgaaggccgcttgtttcccttattcctatctcttgggaaatctggaatgagcgaaatgctcgggtgttccgcaacaatgcgactccggtcgttgtgcttgtgacacatcaaagcggaggcatcatcggggtgccttgccggacgaaatatttgtgtaatataatgccgcgagagtgattcttaaaatcttcgtcttattcaatgaaaatgacaagcctttggacttgtttcaatataatatggacccgaatggagtgaaatgtttaatwaaaaaaaaaaaaaaaaaaaaaaaaaaacct

SEQ ID NO: 60759 - protein, 90 aa, Triticum aestivum
  peptide (1)..(90): Ceres Seq. ID no. 15220210
MVRVPRMLFFAQILQEAQAFDNYFVSKFQIFWILFYHVFSVFFEIRCTTLESCHTFLYISWFCGLCLGSFLPMHKCKVLSFSSCILSCVL

SEQ ID NO: 60760 - protein, 84 aa, Triticum aestivum
  peptide (1)..(84): Ceres Seq. ID no. 15220211
MLFFAQILQEAQAFDNYFVSKFQIFWILFYHVFSVFFEIRCTTLESCHTFLYISWFCGLCLGSFLPMHKCKVLSFSSCILSCVL

SEQ ID NO: 60761 - protein, 76 aa, Triticum aestivum
  peptide (1)..(76): Ceres Seq. ID no. 15220212
MVLWLMPWKLFANAQVQSPFIFLLYPQLRTITFDYVSCWSQWAGTVLQTMAKGYVYKHKIMIQRRGADGATIFTSR

SEQ ID NO: 60762 - DNA, 1477 bp, Triticum aestivum
  misc_feature (1)..(1477): Ceres Seq. ID no. 13658479
agagatgctcttattcctccatttggcaggactccctggcgcgtgaggaaggaaagccgagcaacccagcggcggagccgacgcggcggttttctcttcggcggcggcgacaccgacgcggcgggcctcctctccagcggcggccctcctctcctctccggtttttggatggactgatgggatcgattcgtgatgaacaacggcaggaggggactgaggaagggaggaagcgagatgtttgagctcggggagcaaatggcgaaaactataaccgctgctctgcgagagtctaagctcatagcctcgtttttccttgctggttcgaattttttttcttcaggtgccgcttgtcttgttcctcccactgagataatttgcgttggatacaagtttggccgtgaacctttcgggccagcgtatggcattcaagttccgaaaggttctgacggtttacccgagactgttaattggcttgttgtgcctgggttgtttcacagagcaaagaccagcgccattgtggtgggtgctacattgttgctgggcttggcagcatatcttctttgaactatctgctgaacagggcaagtatttgtctttcggcccaacacatattggacgcgaatactgtgaccaatcatggttgcgaaggtggttggccagagaatgtatttgacttcatcatcagaaacggtggggtcatatctgagaatgattacccatactgtgctatcagaggtccctgcaaggctgttgaggctgcgggagttactattgctaactgggcggctgtagaaccgacggaagaagctgtgaagtatgcagttgcttaccagcccgttgtggcatcaatctacactgacagcaaatttatgacttaccaaaaggatttccttattgttcctaaaaaccatggtccagtagaccactctgttcttctaatcggatatggtaagtgcccatgacagggccaatgttggatcggtatgaattcattcgaggagccatggggcatgacatgtctccactacaacaacattttctatataccaaggaatacgtgtcatgtggggggagcctttggagtgctgtccgatgttgttcttcccctgggagcttctatggttcttaagattaaaactcgaagtgagagctgccctttgtttcaagtaggtgggcatacctgacagctgatgcttctggcggctcgtcccagttcacttttcttttggttccaaaactacttgtcccatggagtttgagttctgtttggagtcttggctctgagcacctgataaacctgtgatctgatgctgcacttataccatcgtgtcttgactcttgagtcatgtattacatccgtcccaaattacgagatttagctagatacatttgtatctacacaaatgaagacaaataatttgggacggacggagtataaacagaatgatgttgggcagcggaaatttgttttggctcc

SEQ ID NO: 60763 - protein, 123 aa, Triticum aestivum
  peptide (1)..(123): Ceres Seq. ID no. 13658480
MNNGRRGLRKGGSEMFELGEQMAKTITAALRESKLIASFFLAGSNFFSSGAACLVPPTEIICVGYKFGREPFGPAYGIQVPKGSDGLPETVNWLVVPGLFHRAKTSAIVVGATLLLGLAAYLL

SEQ ID NO: 60764 - protein, 109 aa, Triticum aestivum
  peptide (1)..(109): Ceres Seq. ID no. 13658481
MFELGEQMAKTITAALRESKLIASFFLAGSNFFSSGAACLVPPTEIICVGYKFGREPFGPAYGIQVPKGSDGLPETVNWLVVPGLFHRAKTSAIVVGATLLLGLAAYLL

SEQ ID NO: 60765 - protein, 102 aa, Triticum aestivum
  peptide (1)..(102): Ceres Seq. ID no. 13658482
MAKTITAALRESKLIASFFLAGSNFFSSGAACLVPPTEIICVGYKFGREPFGPAYGIQVPKGSDGLPETVNWLVVPGLFHRAKTSAIVVGATLLLGLAAYLL

SEQ ID NO: 60766 - DNA, 2094 bp, Triticum aestivum
  misc_feature (1)..(2094): Ceres Seq. ID no. 13663320
gagtccattccccttcttccttctccccactccccactcccactccatcttcttccgccatcttcttgccggagggcactccgtctccctctcgtgtttgtccatgaatccggttccgactacaatctgattgtgattcttagacctcacccctcctctcaataagtaccaccaccagtcctagataggagtacgcctgtgtgagatcgcacaagacccaccatgccgcacgaaggctattacgaagcctctttgcgtccgccggccttggatgatgcgccggcggcgaaggactggggggaagtcctcctcgaccgcgtcgcttacatggtcgacaagaaaaaccatacttccgtcaaccttcaattcaagagggatctggacggcaaggaggtggatctgtgggtcactctgtgcttcgcccggccgcctcgtctctcctatttctgctgccacgcctcctgccccaacgacaaagaagaagacacccgcttgttcttccgcgagcctttcgtgttcgccacggagggtaacctcgccgtcatcaccctctgccacgggcgcagccgcccctccgccttcgggtccaagaagaacaactacgaatacttggtgtaccaggcaccatcctcaccggcggggaagccggagctcatctgggtcccgcacatccccgccagcatgttgccaagcacgggagtcgactgcatcccttccagctcgattggtgtcgtgcgttacaacagcaacattttcacccatgctcacccccacaaaatccccctcgcgccccctgcccccatcctcagccctgccgttgcacttgcccgccccaaaagtttcccttccacgcccccaacctccgtcctcagcccctccgtcgccgccctccccaaggaggatgaggacttcgatgcccacagaatcgtagcgcttgcctacgactatttccacgactctggcaatagcccacatggcccatactacctgtgcatctacgactccaaaacccaggtttggacccgcaagccagctgctattccacagccgctgctgccattcgactatatctgcgacatcgacatggtcatcaccatcggtggctccagccgtggcatcatgggctgggtcgacctctggaatggcatactattctctgacgtgcttgcagaccacacaccctacagcccgcttcgctatgtctcccttccgaagccaaggcagccgcaaaattgcctccctattcccctggacattggatgccgctttcgggacattgtctttgtcaaagactctggcatcatcaggttcgttgacctgcagatccacaccgaccccaacatcccttactcagaaacccctagtggctggacggtggtcacatggatcctggaggggctcaatgagggtttggaaacccggggtggtttgagcttccggcaggagcacgaactccgttctagtgatatctccaactacaacttgccccagtctctatttgttaccaaccccattctcagcgcccatgaagatggcttcttgtacctcaggaccaatgtcagtagcagaaccagcagcaactcgagagtgatcactgttgacatcaagcatgggaagctgctggatgtgcaggacttcgatatgcagagacccaacacctacatgcgcaccgccatctccagccatctcatgcccccagtttcaaaggagaatttgaaacgacgagcgacagtgcctcagtgatcctctcgcaagaagccacagcatcagcttgccatcactactaacccagcggaagaaggagaggatgatgaggggaatgcgatggacacacagtaggtggtttgttgaggtatgagtgtgcccaccagcgttatggtttcttggctgtcaacatgtatatgcgcgcctgttttcttgcttggttaactagtcaggatcagaattttatttattatttaggttatataagacttggtaagcctgtatgatgggaggttgaggctaggagacgattattaatatttagagcttcctctattttgctagtatcatgttctggtgcaacctgatgtccatggtttgtaatccccg

SEQ ID NO: 60767 - protein, 506 aa, Triticum aestivum
  peptide (1)..(506): Ceres Seq. ID no. 15220216
MPHEGYYEASLRPPALDDAPAAKDWGEVLLDRVAYMVDKKNHTSVNLQFKRDLDGKEVDLWVTLCFARPPRLSYFCCHASCPNDKEEDTRLFFREPFVFATEGNLAVITLCHGRSRPSAFGSKKNNYEYLVYQAPSSPAGKPELIWVPHIPASMLPSTGVDCIPSSSIGVVRYNSNIFTHAHPHKIPLAPPAPILSPAVALARPKSFPSTPPTSVLSPSVAALPKEDEDFDAHRIVALAYDYFHDSGNSPHGPYYLCIYDSKTQVWTRKPAAIPQPLLPFDYICDIDMVITIGGSSRGIMGWVDLWNGILFSDVLADHTPYSPLRYVSLPKPRQPQNCLPIPLDIGCRFRDIVFVKDSGIIRFVDLQIHTDPNIPYSETPSGWTVVTWILEGLNEGLETRGGLSFRQEHELRSSDISNYNLPQSLFVTNPILSAHEDGFLYLRTNVSSRTSSNSRVITVDIKHGKLLDVQDFDMQRPNTYMRTAISSHLMPPVSKENLKRRATVPQ

SEQ ID NO: 60768 - protein, 471 aa, Triticum aestivum
  peptide (1)..(471): Ceres Seq. ID no. 15220217
MVDKKNHTSVNLQFKRDLDGKEVDLWVTLCFARPPRLSYFCCHASCPNDKEEDTRLFFREPFVFATEGNLAVITLCHGRSRPSAFGSKKNNYEYLVYQAPSSPAGKPELIWVPHIPASMLPSTGVDCIPSSSIGVVRYNSNIFTHAHPHKIPLAPPAPILSPAVALARPKSFPSTPPTSVLSPSVAALPKEDEDFDAHRIVALAYDYFHDSGNSPHGPYYLCIYDSKTQVWTRKPAAIPQPLLPFDYICDIDMVITIGGSSRGIMGWVDLWNGILFSDVLADHTPYSPLRYVSLPKPRQPQNCLPIPLDIGCRFRDIVFVKDSGIIRFVDLQIHTDPNIPYSETPSGWTVVTWILEGLNEGLETRGGLSFRQEHELRSSDISNYNLPQSLFVTNPILSAHEDGFLYLRTNVSSRTSSNSRVITVDIKHGKLLDVQDFDMQRPNTYMRTAISSHLMPPVSKENLKRRATVPQ

SEQ ID NO: 60769 - protein, 353 aa, Triticum aestivum
  peptide (1)..(353): Ceres Seq. ID no. 15220218
MLPSTGVDCIPSSSIGVVRYNSNIFTHAHPHKIPLAPPAPILSPAVALARPKSFPSTPPTSVLSPSVAALPKEDEDFDAHRIVALAYDYFHDSGNSPHGPYYLCIYDSKTQVWTRKPAAIPQPLLPFDYICDIDMVITIGGSSRGIMGWVDLWNGILFSDVLADHTPYSPLRYVSLPKPRQPQNCLPIPLDIGCRFRDIVFVKDSGIIRFVDLQIHTDPNIPYSETPSGWTVVTWILEGLNEGLETRGGLSFRQEHELRSSDISNYNLPQSLFVTNPILSAHEDGFLYLRTNVSSRTSSNSRVITVDIKHGKLLDVQDFDMQRPNTYMRTAISSHLMPPVSKENLKRRATVPQ

SEQ ID NO: 60770 - DNA, 652 bp, Triticum aestivum
  misc_feature (1)..(652): Ceres Seq. ID no. 12626516
atattacatattaatactaggttttagtaattgattactgcaagttgtgaactacagtaccatgtcgactagtccagcagtagtctagactagtcacgattagtctatgagtctcaaccttcgaacgactcgtcgactcgtaaacgttgtgtccagcataattgtgtttggcacccagtggctcatgtttatgcctgttttagttgtatttagtgcagaaatgaactatggccaattggccgtagtatttccagtctttttctaattcttctggtttggttttgacttttgaatcaggtatatcacttgatcaacccattgtgacctcttgcggcactggtgtgacagcatgtgttctagctttgggtcttcatcgcctcggcaaaactgatgttgctgtatatgatggatcatggactgaatggggtgctcaccctgacactccagttgctaccgctgtttagtctcccgtgcagtttatggagcgccatcttttgtactcccacctctcagtgtattaaggtcagaaggcaaaggagactgaagagtttgggtgggtgtaaggttgtggaagcgacgctgttcggcgttttcattgtaaattatcgaaacagagaaaattggaatatatacactatgtgaatcaatggtt

SEQ ID NO: 60771 - protein, 83 aa, Triticum aestivum
  peptide (1)..(83): Ceres Seq. ID no. 12626517
MLLYMMDHGLNGVLTLTLQLLPLFSLPCSLWSAIFCTPTSQCIKVRRQRRLKSLGGCKVVEATLFGVFIVNYRNRENWNIYTM

SEQ ID NO: 60772 - protein, 79 aa, Triticum aestivum
  peptide (1)..(79): Ceres Seq. ID no. 12626518
MMDHGLNGVLTLTLQLLPLFSLPCSLWSAIFCTPTSQCIKVRRQRRLKSLGGCKVVEATLFGVFIVNYRNRENWNIYTM

SEQ ID NO: 60773 - protein, 78 aa, Triticum aestivum
  peptide (1)..(78): Ceres Seq. ID no. 12626519
MDHGLNGVLTLTLQLLPLFSLPCSLWSAIFCTPTSQCIKVRRQRRLKSLGGCKVVEATLFGVFIVNYRNRENWNIYTM

SEQ ID NO: 60774 - DNA, 792 bp, Triticum aestivum
  misc_feature (1)..(792): Ceres Seq. ID no. 13658372
aaaccatgtaaaacaagcctatagctctagcattactcgtaccctgctcataaaattttgggccttgccttacatgtttagagggtgggaggagataatatattttttttgagaaaaaaaaaacacaatacaaattgggacacaaaaactagaacacatgtgtgcagagcaaaacggaacaacacatgtttcaccgtagaatcttaaactgaatcggcagcccaaatttccatcagccaaaccataggctacacaaacctaggcggacgtaccaacacaggacgccggccggccggccggccgggcggtagctaagccacgaaggcgtactgctcgtaccgcacgctgcagtccacgagcacggccctcgcgccgacggcgtggctgcaggtggcgttcatctggctgacggcggagccgaggcagctcgcgcagtccgcgcccgacagaccggcgcggcacacggcgtggccgtaggcgaacgcgttcgggtacggggagatgctgtaggcgtcgcgggagcgggactgcggcgtggcggccagcaggacggccagcacgtaggcgaggctctccgcgaaggggtccccggcgccgtacaccgcgccgttgcagatcacggagagcggtgccgtgttgggcgcgccgctggcggtgtgcgggcaggaggagaggaggtgcagcagcgcgagggggaggaagaggagccggtccgctctgcgtgagggcgccatggcgcctccgatcttgggctacgggtgtagtagggtggtgtgtggttgttggtggcgc

SEQ ID NO: 60775 - protein, 36 aa, Triticum aestivum
  peptide (1)..(36): Ceres Seq. ID no. 13658373
NHVKQAYSSSITRTLLIKFWALPYMFRGWEEIIYFF

SEQ ID NO: 60776 - DNA, 1412 bp, Triticum aestivum
  misc_feature (1)..(1412): Ceres Seq. ID no. 13659097
ctgagaatcaaaattaggtttgttcagattgtttctatttgtacttcctccgttcctaaatataagtctttttagagattctaatgcggtctacatatggagcaaaatgagtgaatctacactctacaatatgtctatatacatccgtatgcagtccttattgaaatctctaaaaagactgtttaagaacagagggagtattttggagtagggaagaaggttctgactagctaggacccataaccaagttccaaacagaccaatcttgttaggaggtactgcccaaggaaaagaaaatgtgacttctggatcaggaataataaaaaataagaacctgataaaattgtataccgaaatgacttctggcattaccagtgggatccaaaccacattttcgttggctgacttagttttccttgtcactctatgaacaaccgcacactatgacaaacaaataatcaagaacaaacttcatcatttggataacaaatttacagcaattctgttataaatggatgaaaattgtcacaaatggatcaaaaaccagagttgatacatgtcagcgaggttgtggcgacgtggcagccacgacaccaaataccatttgcaaaaccaccagagggcagagaaaagtggactgtttcattagtttgaggttgtattccaatgattttagagttcaagactgaaaataagccttttccagagtcccaaggtcaaaaaacggaaactggaccttttttatgtttcattataatgcttagatcttttgttttttcctatcacttctgatggcttgtttaccttcaattcttcaaatcaagtgaactaatagttgctgcaggactaattctgaattgattcatgttcattaggcactcaaccctgttagaaagtatgaaggggttcttcatgcccttacgcacatttttgagcaagaagggttgcgaggtctttacaggggtttaagtccaaggctgctcatgtatgtatcccaaggggcgctgttttttacatcctatgagtttctcaaaacaattatgtttcctgaacaagagcttcaggcaaacaacgtttgatcgtagaagcttagaagggaagggctcgttgcagccccggtggaatttctagatcgataccatgagctaagtaatgagttgttgtattgtggttacaaaccatccttcagaggtcttgtaacaaaccagtgtacatcatttttggatgcataggcattagacaaccacacctggtattaacctttttctggtagatatagaaacacaacatgtaggcaagaggaattttgtatcatgagcaaacttgagatgtggatttccttgcgggaggacatgtgaatatgagtgtatcctggtttawmctggtacaataaagttggaacgggagggggg

SEQ ID NO: 60777 - protein, 57 aa, Triticum aestivum
  peptide (1)..(57): Ceres Seq. ID no. 15220667
MKIVTNGSKTRVDTCQRGCGDVAATTPNTICKTTRGQRKVDCFISLRLYSNDFRVQD

SEQ ID NO: 60778 - protein, 47 aa, Triticum aestivum
  peptide (1)..(47): Ceres Seq. ID no. 15220668
MYPKGRCFLHPMSFSKQLCFLNKSFRQTTFDRRSLEGKGSLQPRWNF

SEQ ID NO: 60779 - protein, 41 aa, Triticum aestivum
  peptide (1)..(41): Ceres Seq. ID no. 15220669
MILEFKTENKPFPESQGQKTETGPFLCFIIMLRSFVFSYHF

SEQ ID NO: 60780 - DNA, 611 bp, Triticum aestivum
  misc_feature (1)..(611): Ceres Seq. ID no. 13658622
cttatctctttgcttcacattcctttctttgctcacaatattgaacccacattgaggcttgattttgaatttgttcttgcattatcaataataaagcctcagctttaatattgaagcatgatgtgggtgacttgttaatattgtgattgatcacttctgagccttgtcattgcatcttctgttccacaggctagaatcttagcccttaatgcatcatacttcttgaagaatggcggccactttgtcatttcgatcaaggccaactgtatcgactcgacccaggctgccgaggcggtgtttgcgagcgaagtggagaagctgaaggccgaccagttcaagccctcggagcaggtgaccctggagccctttgagcgcgaccacgcctgcgttgtcggtggttacaggatgcccaagaagcaaaagtgaagttgagaggaagcaaaagaagtggatgtgttgtttctgccatctgcttgctcggatgtactagtagcagtagtagtaatgtgtgacccaagtgtaaggggttttgtgagacaattcctgctgttttacagcaattatgtacttgatttgagcagaaaatgtcactccatctgaaatgagtgaac

SEQ ID NO: 60781 - protein, 35 aa, Triticum aestivum
  peptide (1)..(35): Ceres Seq. ID no. 13658623
LISLLHIPFFAHNIEPTLRLDFEFVLALSIIKPQL

SEQ ID NO: 60782 - protein, 31 aa, Triticum aestivum
  peptide (1)..(31): Ceres Seq. ID no. 13658624
MCDPSVRGFVRQFLLFYSNYVLDLSRKCHSI

SEQ ID NO: 60783 - protein, 30 aa, Triticum aestivum
  peptide (1)..(30): Ceres Seq. ID no. 13658625
MAATLSFRSRPTVSTRPRLPRRCLRAKWRS

SEQ ID NO: 60784 - DNA, 495 bp, Triticum aestivum
  misc_feature (1)..(495): Ceres Seq. ID no. 13598668
tacctagaacatcctaatcgaaaacccatttttggtaagcagaactggcgatgcgggatgaaccggaagccgggttacggtgcccaactgcgcgctaacctagaacccacaaagggtgttggtcgattaagacagcaggacggtggtcatggaagtcgaaatccgctaaggagtgtgtaacaactcacctgccgaatcaactagccccgaaaatggatggcgctgaagcgcgcgacccacacccggccatctgggcgagcgccatgccccgatgagtaggagggcgcggcggccgctgcaaaacccggggcgcgagcccgggcggagcggccgtcggtgcagatcttggtggtagttgcaagccggcgtattttgctagtattgttgtagttggaaggtccttttgtggatggtaccattgtagccttgtagtgtactttgttgatctatatgtatggaactaatgatgatatatgaagtctgatgttgtcattt

SEQ ID NO: 60785 - protein, 59 aa, Triticum aestivum
  peptide (1)..(59): Ceres Seq. ID no. 13598669
YLEHPNRKPIFGKQNWRCGMNRKPGYGAQLRANLEPTKGVGRLRQQDGGHGSRNPLRSV

SEQ ID NO: 60786 - protein, 40 aa, Triticum aestivum
  peptide (1)..(40): Ceres Seq. ID no. 13598670
MNRKPGYGAQLRANLEPTKGVGRLRQQDGGHGSRNPLRSV

SEQ ID NO: 60787 - DNA, 667 bp, Triticum aestivum
  misc_feature (1)..(667): Ceres Seq. ID no. 13663520
cttttttttttttttttttttttccttctcgagtcgtctacaattttaatatcacaggtcacatacatgttcgacacacaacaacaacaacaaaataaatcatgtgtatgcataggcctggctagcaacccaaacaactgacattgaaggcaggcattggtgtctcctgaagttcagtctagccagaaaggttctggcatccgacatcttcctgacgaacttcgtaaaccggttccagttgtgtgactcgaacaggctcttgttcatcctgacatagttgaaggagaaagacgcgcccgaggtgccgcccgagtagcgcctcgagcttctgacgacctggctcagcgacgcatcgtccagcctcgccgcggagttctcgccgttgagaggtaggttccataccttagcggcagccatcagttgccggagagtgccttcggggctgctctgaggaccgcttctctcctcgtccctcaggtcgaaacagccacagcacagggcagctctgtgtcgagagaacatttgggcgatggggagatagccgtctcttagcaatgtgttgtagtagccggctgtcagctcggatgggtgtgaacatgtgtagtagtgccagtgtatgccggaaaccttccccgagatggtcacgccggtgccagaattttcgatt

SEQ ID NO: 60788 - protein, 46 aa, Triticum aestivum
  peptide (1)..(46): Ceres Seq. ID no. 13663521
LFFFFFFFLLESSTILISQVTYMFDTQQQQQNKSCVCIGLASNPNN

SEQ ID NO: 60789 - protein, 37 aa, Triticum aestivum
  peptide (1)..(37): Ceres Seq. ID no. 13663522
MCCSSRLSARMGVNMCSSASVCRKPSPRWSRRCQNFR

SEQ ID NO: 60790 - protein, 31 aa, Triticum aestivum
  peptide (1)..(31): Ceres Seq. ID no. 13663523
FFFFFFFPSRVVYNFNITGHIHVRHTTTTTK

SEQ ID NO: 60791 - DNA, 753 bp, Triticum aestivum
  misc_feature (1)..(753): Ceres Seq. ID no. 13659835
gggatgcgcaaggaagctgacgagcgggaggccctcacgggccgcaccgctggccgaccctgatcttctgtgaagggttcgagttggagcacgcctgtcgggacccgaaagatggtgaactatgcctgagcggggcgaagccagaggaaactctggtggaggctcgaagcgatactgacgtgcaaatcgttcgtctgacttgggtataggggcgaaagactaatcgaaccatctagtagctggttccctccgaagtttccctcaggatagctggagcccattacgagttctatcaggtaaagccaatgattagaggcattggggacgcaacgtcctcgacctattctcaaactttaaataggtaggatggcgcggctgcttcggtgagccgtgccatggaatcgggtgctccaagtgggccatttttggtaagcagaactggcgatgcgggatgaaccggaagccgggttacggtgcccaactgcgcgctaacctagaacccacaaagggtgttggtcgattaagacagcaggacggtggtcatggaagtcgaaatccgctaaggagtgtgtaacaactcacctgccgaatcaactagccccgaaaatggatggcgctgaagcgcgcgacccacacccggccatctgggcgagcgccatgccccgatgagtaggagggcgcggcggccgctgcaaaacccggggcgcgagcccgggcggagcggccgtcggtgcagatcttggtggtagtagc

SEQ ID NO: 60792 - protein, 40 aa, Triticum aestivum; identical to SEQ ID NO: 60786
  peptide (1)..(40): Ceres Seq. ID no. 13659836

SEQ ID NO: 60793 - DNA, 734 bp, Triticum aestivum
  misc_feature (1)..(734): Ceres Seq. ID no. 13663769
gcgactaatgttcagcgccaaaagaaaatttccggtttttgatccaggcatgatgatagctttgctgctatgctccggtgtctcatggcatgacaccggatgaacctagtaagaggctaaaatgttttttttcctgttctattatgataaaacgagatcattgtcgccaagatgcgggggcctcatgcaaacctggacttcatgctcctccggcccgacccggtgctttggtaccatgatctccagtccagtaccggtctcgtcataatacgcttcgatcttggcgttctctgggatccttgtggccagaggtatctccctcacgaactcgcctggagggcagtgctcaggggaagggtcggtcagcttgaaggtcctgtcgtgcctcttaatgaagggcatccgggcggtgctcacacatgttatcttcacgacgccatgcgtcagcgtgttcctccaggtgaccttcacgctgtgtggatcggataagagcatgctcaccattatcaggtagccttcatcatcctcgtatatagtcttggcagcagtaacaggcccacttgcgtgctttgccacaccagtgaagtcatgcatccatgacggctcaccagtgtggacttctacctcttgctctctctcagaacaggaattattggattcggcggcgctccgaggccgaggtgttgctgttcttggttggtggagagagcgagaggggagaaagattccggaat

SEQ ID NO: 60794 - protein, 105 aa, Triticum aestivum
  peptide (1)..(105): Ceres Seq. ID no. 13663770
MRGPHANLDFMLLRPDPVLWYHDLQSSTGLVIIRFDLGVLWDPCGQRYLPHELAWRAVLRGRVGQLEGPVVPLNEGHPGGAHTCYLHDAMRQRVPPGDLHAVWIG

SEQ ID NO: 60795 - protein, 95 aa, Triticum aestivum
  peptide (1)..(95): Ceres Seq. ID no. 13663771
MLLRPDPVLWYHDLQSSTGLVIIRFDLGVLWDPCGQRYLPHELAWRAVLRGRVGQLEGPVVPLNEGHPGGAHTCYLHDAMRQRVPPGDLHAVWIG

SEQ ID NO: 60796 - DNA, 1223 bp, Triticum aestivum
  misc_feature (1)..(1223): Ceres Seq. ID no. 14313624
ttccgatgatgccattgtgtctatgttcaggaatgccttatcagcacaccgaaaccgcccttccgttgaacattggtccggtaaacgtgaggaggtagttcgagtttgactgccgcctcccagcctagtggcatccttgtcctttttaccatttctttaggctcagagctcaatcagagtggatgtcgaagctgagtggtaaagtgccaacaatgcagaagagcctttgctgctaagaaggaagctgcacttgaggctgcagagaagagagcagcagaggcaaaagaaggttgaagctgcatagaaggaagcaggacaagatgaggcatagaaggtagcagctgaagggaagaaatgttagtagattgtacagagtcaaacttttcgtggaactggcatgagtcttcctgaagatatgttatgcggcaacctgatatatgattagtctgcatcagtttgcttctctagctttcctgaagatatgttcagagtcgacagttgtccacttgcacaagcacacccaccaacctccaaaggctgttactgagctcaattttcattgccaatttgccatgatgatttgaagccgcaagatgttggcatagaccccagcatgccgtgcttcaggcagagcgagtcgagagggcctcctgcggtgatgtatctgcatttttagactgctccaagttttcgtttggtatcttctgtttgccaaagtcggttgtcattccacttgttgcttcatttgctgatctgattcttgtcccaaccgcttcaggggctcgtttggcaaaagtaaagacagatgcttcagccgagaccatagatctgtaccctgaaaactgaggcaacctgcactgttccacggcgctgaccgcttgtgtcgtgctcgacgtgatggcacacccatagaaccgcgccgacggaacggactgcacgtactacagcgagtccccattctcaaatgcgaacgctgccgatgactgttttcgtcaatctgctctcagtttgtaagcgtgattttttcgataaaggacgcttttattatctcaaaatgtagcatcaagcgatacaaagcatttagagtatcgtttgtaagcgtgatggatggcaataaacgaaatgccgagaggtatttttctgacaagatgtaaacccgaaacccaatataacatcaacctgagactaaagaacagcacgtagatgcttacttgcgcttgatg

SEQ ID NO: 60797 - protein, 48 aa, Triticum aestivum
  peptide (1)..(48): Ceres Seq. ID no. 14313625
MISLHQFASLAFLKICSESTVVHLHKHTHQPPKAVTELNFHCQFAMMI

SEQ ID NO: 60798 - protein, 35 aa, Triticum aestivum
  peptide (1)..(35): Ceres Seq. ID no. 14313626
SDDAIVSMFRNALSAHRNRPSVEHWSGKREEVVRV

SEQ ID NO: 60799 - protein, 31 aa, Triticum aestivum
  peptide (1)..(31): Ceres Seq. ID no. 14313627
PMMPLCLCSGMPYQHTETALPLNIGPVNVRR

SEQ ID NO: 60800 - DNA, 1161 bp, Triticum aestivum
  misc_feature (1)..(1161): Ceres Seq. ID no. 13503485
aaaatttgagcccatagcccacccgcagcagggaattcttcccgtccatggccatgagggtcgactcggcaatcctcgccgtcgtcgtcgccttcctcctccccctccgcctgctctccctcttcgcccgcctgaaatcctccggtagcgcaggcgatctccgccgatcctgcaccgccctcgccatcgcggccgcgctccttgccaccttcttcgccctaccccgctacgacggcggtcgcacggggcagtgcaccgcccccgttggtttcgcttgggaggagggtaccggccgagaggttcggttggaaatcgagcagctgaagctgcagctcaaccgattggaatcattatgggaaaacaattcaaaagcaccagatgacaaaggtgatgcttcagaggaagatgccgagtttgtgaaagcgatgggactggacattcaggctctgatcaaggaacaagaaaacatcaaggaatcattatggagttctggcggtactatcaaatcagtcgaaaatgaggtacgaattctggcggcagaatccagaaagatgaactctgatatttacaatgtgtggtcattggccaacgatacagagaaaacggttgaagctctacattcagatgtccaaaaggctcaaattataatggatgaatcaaggaagatgaactctaatgctcaccagatatggtcattggcaaaggatacagcaaaaaaggtcgaatctctgtatacagatgttgcaaaggttcaaagtgtaattgatatatcaaaaaagatggaatctaatatacacaaagcgtggtcttatgcaaagcagacagagaagagggttgaagatatattcagatgtcaaaaagggcttcaagaagaaggcctggatgagctgattgcgccgtcgacttgatgggctagcattggcctgggcatggagtaatggagtagagaagccacccggccttgcgtctgcgaacctgtaatgctccttgatattgtatgacacgtttacggttgtgtcgtgcgtgttgtggacatgatcttgctgtgtttctgatctgactcgcttcctgtttctgtgtcgtcatggtaatgtatatattgatgatgtacggcgttaatgcaataacatgcgactttcaggactccgtgattgtagtgtt

SEQ ID NO: 60801 - protein, 286 aa, Triticum aestivum
  peptide (1)..(286): Ceres Seq. ID no. 15223230
MAMRVDSAILAVVVAFLLPLRLLSLFARLKSSGSAGDLRRSCTALAIAAALLATFFALPRYDGGRTGQCTAPVGFAWEEGTGREVRLEIEQLKLQLNRLESLWENNSKAPDDKGDASEEDAEFVKAMGLDIQALIKEQENIKESLWSSGGTIKSVENEVRILAAESRKMNSDIYNVWSLANDTEKTVEALHSDVQKAQIIMDESRKMNSNAHQIWSLAKDTAKKVESLYTDVAKVQSVIDISKKMESNIHKAWSYAKQTEKRVEDIFRCQKGLQEEGLDELIAPST

SEQ ID NO: 60802 - protein, 284 aa, Triticum aestivum
  peptide (1)..(284): Ceres Seq. ID no. 15223231
MRVDSAILAVVVAFLLPLRLLSLFARLKSSGSAGDLRRSCTALAIAAALLATFFALPRYDGGRTGQCTAPVGFAWEEGTGREVRLEIEQLKLQLNRLESLWENNSKAPDDKGDASEEDAEFVKAMGLDIQALIKEQENIKESLWSSGGTIKSVENEVRILAAESRKMNSDIYNVWSLANDTEKTVEALHSDVQKAQIIMDESRKMNSNAHQIWSLAKDTAKKVESLYTDVAKVQSVIDISKKMESNIHKAWSYAKQTEKRVEDIFRCQKGLQEEGLDELIAPST

SEQ ID NO: 60803 - protein, 160 aa, Triticum aestivum
  peptide (1)..(160): Ceres Seq. ID no. 15223232
MGLDIQALIKEQENIKESLWSSGGTIKSVENEVRILAAESRKMNSDIYNVWSLANDTEKTVEALHSDVQKAQIIMDESRKMNSNAHQIWSLAKDTAKKVESLYTDVAKVQSVIDISKKMESNIHKAWSYAKQTEKRVEDIFRCQKGLQEEGLDELIAPST

SEQ ID NO: 60804 - DNA, 656 bp, Triticum aestivum
  misc_feature (1)..(656): Ceres Seq. ID no. 13663928
ttgggtaccgggccccccctcgaggtcgacggtatcgataagcttttttttttttttttttgctgataagaacttttaggacttcatgttctctttataaatgatttggattttagggtagaaggtagtccttgaagagggtcaccatacgatataacataaattaacagttcagaaaatttaagagcaagctatccttgccttcgttacaggaagtaatgcagctgcatgaagataagaaacgtctgtgagtgctgccggcagtggatttgatgctacatcagccacaaatgttctcctatggacttccctcaaggcatatacagagagttgccacaaaagctcaacaaatctcggcccgcagcaggtggcgagagatgaaaccctggagttgctccgtggcagcgctccctgctgctccagctcgctgatgatacattgtacgatcttgcggaactccctggactgcgcggaatcaaagatcggccatactttgtcgaagtccttggcggactgcgcggggccgcggagtgaggataggaggaagtagaggagctgttcgccgaggcgagggttggagtgccggaagaggccgacgcgaggagaggccgcgccggcgggggagccgaggacgactggatcgaggccgaggagga

SEQ ID NO: 60805 - protein, 52 aa, Triticum aestivum
  peptide (1)..(52): Ceres Seq. ID no. 13663929
MLHQPQMFSYGLPSRHIQRVATKAQQISARSRWREMKPWSCSVAALPAAPAR

SEQ ID NO: 60806 - protein, 46 aa, Triticum aestivum
  peptide (1)..(46): Ceres Seq. ID no. 13663930
MFSYGLPSRHIQRVATKAQQISARSRWREMKPWSCSVAALPAAPAR

SEQ ID NO: 60807 - protein, 39 aa, Triticum aestivum
  peptide (1)..(39): Ceres Seq. ID no. 13663931
MIHCTILRNSLDCAESKIGHTLSKSLADCAGPRSEDRRK

SEQ ID NO: 60808 - DNA, 879 bp, Triticum aestivum
  misc_feature (1)..(879): Ceres Seq. ID no. 13659710
ccattcatctttctttctcacaaattggcaccgtacatacatataaatcggtaccgtgtataataatgtttctgcagtctgcacagttcatgttgaactggaaataatacatcaatcgcaactagtactaaataatcgtagcgttcaccgaagcgggtatcgtggctgctaggccggcagcaccgatggagcaaccctgcaggtgttgtaggactggcaatggcaacactttctctgtcccgtcatgcccggatacacccgggtcgtgtcccagcagtggttgcacacgatccatcccttttccatgtgtaagaacttcgcctcaatctcggcatctaaggccctcaggaatttctccatgtcaaagatggacacggagcacatggggcaagtgaacttgtcgtgcttgagcatctcgtggaagcactgcaagtgcatggtgtggccgcatcgcagcaccgacgcctccctcagggagtcgaacaggtactcgtagcagatcgggcagttgttcttcatcgagtcctcgatgcagacatgcttatcccggagggtcaccgagtagcacgatccgcacttgtggcagtgaaagaagttgtccttgcctccaactctgcagatgccgcagtctttgcagtggtattgctccttgtcgacatcgtcgtcgaagaatttgcacgcccggcagaagtactcccccatgcacacgccgcagttgctgcacacctgcgcgaccggctgctcggtgtcacagacgagacatataaccgattcaactgcgtggcggtcgagctcgtgcccgtctttctaagcccgatccaagaagaacaagcgtggagtcgttgtggcaatggcggcagtggaagacgtcgttgcagc

SEQ ID NO: 60809 - protein, 114 aa, Triticum aestivum
  peptide (1)..(114): Ceres Seq. ID no. 13659711
MLIPEGHRVARSALVAVKEVVLASNSADAAVFAVVLLLVDIVVEEFARPAEVLPHAHAAVAAHLRDRLLGVTDETYNRFNCVAVELVPVFLSPIQEEQAWSRCGNGGSGRRRCS

SEQ ID NO: 60810 - protein, 83 aa, Triticum aestivum
  peptide (1)..(83): Ceres Seq. ID no. 13659712
MPGYTRVVSQQWLHTIHPFSMCKNFASISASKALRNFSMSKMDTEHMGQVNLSCLSISWKHCKCMVWPHRSTDASLRESNRYS

SEQ ID NO: 60811 - protein, 69 aa, Triticum aestivum
  peptide (1)..(69): Ceres Seq. ID no. 13659713
MEQPCRCCRTGNGNTFSVPSCPDTPGSCPSSGCTRSIPFPCVRTSPQSRHLRPSGISPCQRWTRSTWGK

SEQ ID NO: 60812 - DNA, 1384 bp, Triticum aestivum
  misc_feature (1)..(1384): Ceres Seq. ID no. 13663740
gaactatgctagcatacatagatactgttattagaattaagccaacacatcaccgatgaaaatctaactttatccatacaggcagcaacaagaaatacatactttgtttagtatggcacaagatagcacttaaaatgcgacagctgttgcttaaaggagatgggctctagtagcaataacctggccaggtaagttacagctgataagagaaaagggaccagttcacagtaacttccattctgcaagagccaattttaagctcagtactggagcttgtacccgatctcctgggttcaaacactacttcatgactcttaacatcttctctgcgatgactctccacaacctgatccccattaatacagtgtgccatgacagaaatcctcagcaatccctcaagtccaacagaaacgaccttgcatctaagcttgatgttgccatcagcatcaagaggcaatctatcatctccacattccagcaacttgactttcaagccagctatgtcatcgatgctcgcacaaaatacaccacgaaaaccatctggccatgatccaccaacgacttttacactgattgtggcctccacagatcggatgatctctttgaatgccatctccagagtgctaagctcactagtgaaacttctatccacaaaacctgtcctgtatgtcataactaggcggcttaaatatttatcctcagattcagcagtgcccttcactttcagctcaatctcaaagtacgaaggatctgatgacaccacaacagcacgggttggacctgtcagcgttagatatggatcctcttggctgatggtctggcagttatccctgtcgcaggagaagatcatgttgcgtttgtgatccaccacatcacgtacggaaaagaacccatacacatccagcggccactgtagactctggtcaatttctgcaactttgactgaaaagaactgcagcgtgttcttggttgagccatcgccggagaaggtgaaacgcatgggggggatactagtctcatcctcaaatttaccaaaatagccgccttcgccccaaacactcgtccagaatccacgaaactgatcccagggatcctgtggttccccccttttctttaagatcttcctccccgtcgcttcaacaaattccttcgcggcctttatcatcgccgatttctttgccttctccgcctcctcctcctcctccttctttgccatccgctcctccatcaccgcctcacgtttctccctctcctccatccgcttgtcacgcatcgccttatccatcgcctccatctcgccacccgacgaatgcatcgccctcttcgtagcccagatggcaggcgccttcgcctacgccgccgccgccgtcaccgctctctttct

SEQ ID NO: 60813 - protein, 163 aa, Triticum aestivum
  peptide (1)..(163): Ceres Seq. ID no. 13663741
MTEILSNPSSPTETTLHLSLMLPSASRGNLSSPHSSNLTFKPAMSSMLAQNTPRKPSGHDPPTTFTLIVASTDRMISLNAISRVLSSLVKLLSTKPVLYVITRRLKYLSSDSAVPFTFSSISKYEGSDDTTTARVGPVSVRYGSSWLMVWQLSLSQEKIMLRL

SEQ ID NO: 60814 - protein, 143 aa, Triticum aestivum
  peptide (1)..(143): Ceres Seq. ID no. 13663742
MLPSASRGNLSSPHSSNLTFKPAMSSMLAQNTPRKPSGHDPPTTFTLIVASTDRMISLNAISRVLSSLVKLLSTKPVLYVITRRLKYLSSDSAVPFTFSSISKYEGSDDTTTARVGPVSVRYGSSWLMVWQLSLSQEKIMLRL

SEQ ID NO: 60815 - protein, 120 aa, Triticum aestivum
  peptide (1)..(120): Ceres Seq. ID no. 13663743
MSSMLAQNTPRKPSGHDPPTTFTLIVASTDRMISLNAISRVLSSLVKLLSTKPVLYVITRRLKYLSSDSAVPFTFSSISKYEGSDDTTTARVGPVSVRYGSSWLMVWQLSLSQEKIMLRL

SEQ ID NO: 60816 - DNA, 1686 bp, Triticum aestivum
  misc_feature (1)..(1686): Ceres Seq. ID no. 14313248
agtaatcaaataatttggtattcagtgtttacttgaatattttatatcgatttctagcaatgttcagtaacagagcaatggagtgagagacattctcagtgtattgtagtttccatgttgtgttatctcgagggagacccggcgtccaattagtcacggacaatatgtcgagtgtggtaccatccaggtacaagagtcggccgcccaggacggcaatgtcggcaagatactccacgtaattctgacctccccatcctcttgtttgatccttcttgttgtgcttttttagctgctgatggttggcgtaccatgttgtgcgtagaggacagaggacaaggggaaagagtacgacaatattgtgagatcaagagttatgatttgtgagggaacaaataattttcttgatctttgtgttgacgagatggtggctttcctagggtagcattgtgtccgatgggggcagggttgcaccatggggaactgtgaatgccatttgggtaggacgaatacaatcaatgatggattgacacagatctttgtcgagttaaaacatgaaaaatattgatatttttctaatacaattcctgcatgatgatgtatctttcacctttgacaatttttttgcataaaaaggcagtggcattgatgatgggcaggaatggtggttgcgctgtagtgaaacatgggtgttgtggacggtccctatagacaatacaggatgacgccaagtcgccaaccatcattacaagtttgccgaattagaaatacgaagagaagtggcaatacagataaaccgctagaaagtatgagctcctgaatgtcctggaatttagtagctcatgaaaatggatgtgccttttagtgaaggaaccagaggggaggatatatgttaaagaatttgaggaagagacttgaagtctgttttatccatgtgtaccggctagaagataatttgaggaagagattaaaaggcacataaatcaatattctgattctggtgtaagaacgttggttcttgtataccttgtcttacatgagaaagagtatgcggttgatgactacttcagcactgccaaaccatctggacgtgcagaggcaggctaatctatggcattctgccattttatacaatcatgtttgcttcatgcatgatcaatcgacatcatttttcccatatgaagtccctttgaatcaaagaggctctataaatctgtgttttctcaaacttaactactccttaacttgtaatctgaaattagagattgtggtgcatgatgctgaagtttgaccttggccatcgggaagaagttgtgcggtgtgacattatgagaattggcaagcagactcctctccagctgagcttgtcacgagattgtgcttgctggcatcaagctatggacttgctacaaaaagatataatggtgtgtttggtgcttatacaaggccctagaagatgattatatgtactactttaatttgtgctttgtatttttctgtatattgccaaatggatttagagcatagccattgcattatatggtagctgtgtgtgttccctacatttttttgtatgttgataaacatggaaacacgctgttagagtgggtcagtttgtatatctgagtgtctacacatgaatcttgactatatatagcaatatgggcacgagaaccctttaaatttaag

SEQ ID NO: 60817 - protein, 84 aa, Triticum aestivum
  peptide (1)..(84): Ceres Seq. ID no. 14313249
MRKSMRLMTTSALPNHLDVQRQANLWHSAILYNHVCFMHDQSTSFFPYEVPLNQRGSINLCFLKLNYSLTCNLKLEIVVHDAEV

SEQ ID NO: 60818 - protein, 80 aa, Triticum aestivum
  peptide (1)..(80): Ceres Seq. ID no. 14313250
MRLMTTSALPNHLDVQRQANLWHSAILYNHVCFMHDQSTSFFPYEVPLNQRGSINLCFLKLNYSLTCNLKLEIVVHDAEV

SEQ ID NO: 60819 - protein, 77 aa, Triticum aestivum
  peptide (1)..(77): Ceres Seq. ID no. 14313251
MTTSALPNHLDVQRQANLWHSAILYNHVCFMHDQSTSFFPYEVPLNQRGSINLCFLKLNYSLTCNLKLEIVVHDAEV

SEQ ID NO: 60820 - DNA, 1043 bp, Triticum aestivum
  misc_feature (1)..(1043): Ceres Seq. ID no. 13660094
gtgcaccgccccgtgacacaactgcactggtggtggagtagataggggcgggaggaggaggagctgacaggaggagagcgagagacagaccgatcgatcgcccaccggccccgcccgccgcgcgcatccgtccgtccgccgctgcccggcccggccatggcgatggcgccgaggaggcggacgctgctcaaggtcatcgtccctcggcgacagcggggtcggcaagacgtcgctgatgaaccagtatgtgaacaagaagttcagccagcagtacaaggcgaccatcggcgccgacttcctcacccaaggaggtcctcatcgaggacaggctcgtcaccttgcagatttgggatacggcagggcaggagaggttccagagcctcggcgtggccttctacaggggagccgactgctgcgtgctagtctacgacgtcaatgccaaaagaacattcaacacgcttggcacctggcatgacgagttcatcaaccaggccggcccatcagaccccaagcaattccccttcattttggtcgggaacaaggtcgatctggacgctggaagcagacgagtggttcctgagaagaaagcaaaagactggtgcgtctccaagggcgacattccgtacttcgaaacctcggccaaggacgactacaatgtcgaccccgctttcctgtgcatcgccaagctcgccttggagcatgagcacgatcaagacatctacttcaattcagttgcagaacaaggccctaaaaccgaaggacagacgagcggatgcgcgtgctaggctagcatcttggcattactgtccagtataaggctacaattctgctgcatttatcgcactgtatccattcttgaatgtaatgtatgtaccatacgatagttagtgactgatcaacagttgcaagctgtgctcccgtagctgggcaataaaatgtaaacagttccaaccaaggaattattgtcgacctaattcttcgtcggttgtaacatgttgcacttcaactgcttggaatgattgtaacagagcatactcactctg

SEQ ID NO: 60821 - protein, 126 aa, Triticum aestivum
  peptide (1)..(126): Ceres Seq. ID no. 13660095
MPKEHSTRLAPGMTSSSTRPAHQTPSNSPSFWSGTRSIWTLEADEWFLRRKQKTGASPRATFRTSKPRPRTTTMSTPLSCASPSSPWSMSTIKTSTSIQLQNKALKPKDRRADARARLASWHYCPV

SEQ ID NO: 60822 - protein, 114 aa, Triticum aestivum
  peptide (1)..(114): Ceres Seq. ID no. 13660096
MTSSSTRPAHQTPSNSPSFWSGTRSIWTLEADEWFLRRKQKTGASPRATFRTSKPRPRTTTMSTPLSCASPSSPWSMSTIKTSTSIQLQNKALKPKDRRADARARLASWHYCPV

SEQ ID NO: 60823 - protein, 88 aa, Triticum aestivum
  peptide (1)..(88): Ceres Seq. ID no. 13660097
MAMAPRRRTLLKVIVPRRQRGRQDVADEPVCEQEVQPAVQGDHRRRLPHPRRSSSRTGSSPCRFGIRQGRRGSRASAWPSTGEPTAAC

SEQ ID NO: 60824 - DNA, 645 bp, Triticum aestivum
  misc_feature (1)..(645): Ceres Seq. ID no. 14301670
aaagaagaggatacaaggaggttggtttcctgagagaagtcgacgaagttgttagaacaggtgacgctttcagaacacttttattcacttgatcaagataaatactagctttgcggtggtcggctgtgaactgcgccttctccagatgataattctcaatctactcttttgcaggagtgacacctgccgagaagcttctgaatctatacgagacgaagtggcagcgcagcgtggaccctgtgttcgaggagttgttatattgatatatactgatatcatatataacttcggtggacgctggacaaggtggacagggtcttcagattgtatccccatacaaaatcccgtccccaattctacaagccacctgaccagggaaacctactctccggtctcgtggctgcgaataattttgagctcggaacactctgtttgtggcttgccgcctttcttttttcggctgtgtggaccttttacagcttctgatttttctcgcatctccagggagccggaacaaacacctgtttgtaccgatccccttttcatcttttcctgatgaactgcttgtattcggaataaatccatctcgtgtgatgatggaaggaacctgttctccagaaataataattcagagtgtttgggacg

SEQ ID NO: 60825 - protein, 136 aa, Triticum aestivum
  peptide (1)..(136): Ceres Seq. ID no. 14301671
MIILNLLFCRSDTCREASESIRDEVAAQRGPCVRGVVILIYTDIIYNFGGRWTRWTGSSDCIPIQNPVPNSTSHLTRETYSPVSWLRIILSSEHSVCGLPPFFFRLCGPFTASDFSRISREPEQTPVCTDPLFIFS

SEQ ID NO: 60826 - DNA, 1663 bp, Triticum aestivum
  misc_feature (1)..(1663): Ceres Seq. ID no. 14303317
tgaaacccagtccactcacgatgccagatctcggcgagtcacccattccaccccctccgctctcgcccccacagccggcgacctcgtctcgcaccgccgcctcctctcatcccctccccagctcccctccactcatccgacggcggctagatgtgcacacaaccggcgaccaacatcacacaaaggtcgccaccgccggcggtggaaggacagtcttctcccgctgctagccgcagcgtccgcctcgccctgatcctcgccctcctcgaccgccgctcgctctcctcggaagcacctcgccgcctccctgcccatgccgtgttcactggctgccctgctcgcgccgacctcgccaatctcgcggacgcgcttggcagtgctcgacttgtcctcgccgccgccagcggcgacgggtccttcccgtgcctctaccgcctcgtggccgagtcctcctctccccaaatcgacacccgcccctttgtcgagcctgccgtgcatgccatatgagcaggatggtgtacaccggcttcacagacatgtggtcgtcgaggcttcggatgaggtcaacgcggatgagaacagtccatagagccgtaccaggtagaacaagctgttccacgcatggggtctgattacaatattttcggagatgcataatatgccaaacacttctaaaggtgcctcgtccatgggtgcatgatagtggaaaaacatctgtaaattgtgcaggatcctatagagcaaatgggcatcatcgacgtgcagtacacgctctcttaggcagataagtaacctcagacaagttattttgtgaagatcggtggttcatggtctgaaagttttgtttttctctcgaaattttgtacttagataataccttaaatgctttttactgcttgatcacataatacatgtccgtgcaagaaaggagttgttaactgaaacaataatgttaatttttgttgttaacttaaacaataatgttaatttatgttaactacaaactgtcttggacattggttttttcaaattaactctgtgttgaactggttcttcttattgtgtgctgcagcccagcaatctgttcatgccaaatgattgagtcctggtgaggttcattgctagacatgcacggtctccgcaggcaaggaacacataaaagtaaatcagcgtgttatcagaaactcatgagcatgaaagagaaatttggatcatgtgcgaacatgggtagagagcagatcgaggagaacttgaagattaaaggcaatgaaaggtttcgtaaaatggcagcgggtagagttcttgtcctgcacaaaggaagccgcgccggcacccgtggatcgctggaagcctcaccgacacccatggcttgctggtagccgtggcggcaccaggggcaaagtttgaagaaacaggcctcgcacacctgatcggacggcaaactttgaagaaacagttcaaatccacatgatccgaacacaaacctggaagcgtggagaatcaggccttgactaccccgctcgaaagataggatttgaaaattatttgttgtatataggaagagcaaaaatattagattaaactgttgtttatggaagcttcttgtgacggaattttctgatatgattccatatgatttgatttgattggtgtcgtaaattgc

SEQ ID NO: 60827 - protein, 118 aa, Triticum aestivum
  peptide (1)..(118): Ceres Seq. ID no. 14303318
MCTQPATNITQRSPPPAVEGQSSPAASRSVRLALILALLDRRSLSSEAPRRLPAHAVFTGCPARADLANLADALGSARLVLAAASGDGSFPCLYRLVAESSSPQIDTRPFVEPAVHAI

SEQ ID NO: 60828 - protein, 91 aa, Triticum aestivum
  peptide (1)..(91): Ceres Seq. ID no. 14303319
MPCSLAALLAPTSPISRTRLAVLDLSSPPPAATGPSRASTASWPSPPLPKSTPAPLSSLPCMPYEQDGVHRLHRHVVVEASDEVNADENSP

SEQ ID NO: 60829 - protein, 83 aa, Triticum aestivum
  peptide (1)..(83): Ceres Seq. ID no. 14303320
MHGLRRQGTHKSKSACYQKLMSMKEKFGSCANMGREQIEENLKIKGNERFRKMAAGRVLVLHKGSRAGTRGSLEASPTPMACW

SEQ ID NO: 60830 - DNA, 1370 bp, Triticum aestivum
  misc_feature (1)..(1370): Ceres Seq. ID no. 13660872
cgacggtatcgataagcttttttttttttttttttcgacaaacacaccaggataccttaatgaacacaatccttaatcaaagttaatgaagcaactaatcgatcgaagagctagcatcaaccaaataaccatctattgttaccagcaaactgagacgctccaatccatcgaatagatggatggattcaatcatatcttccacatgttggagtagtccatgagaggctcgccccggaacagctcctccagatcgaagtacgaccgcgacgacgccatcaggaacgaggtgtccgcgccggcgagcgccgccgtgtccaagcccagcgaagggctcagcagcgcggacgaagacgctacctccgccttcggcttgctgtacctgcggatcgcgacctgctgatcgcccatagcctggtagggtgagtacccgacgccgccaagattgccgttggccgtcgccggcatgaaggagtttgggctctgcatctgctgcggcggctccatcttgatagtcaaatgctccgtgtccgcctcaagcggcagggcggcgctggaggtggagctcgaagcgccggcgaaatcgtcggcgccagacggtgagtccatgagcatcggcaggtcagcgttatcgagcaggtcggcgttgttaagcaagtcatcattgttgagcaagtcatcgaggaaggcgagcggatcctccatccgtggagcattcctcgcccccaagtctttgttgatcacccggcaaacagcccaatcatccttggcggtgcggggaaggcgatggggcagctggccctcgaggcggtactcgtgcatcacccacggcgtcttcccgccgctgggggcgcggccggtgtagaagacgagcgtcttcttcatgccgacgaggacggcgtcccggcccttgccgcggaagatctctttgtccttccccgtcgccttccagtagccgttcttcgtcgcccggttggtgcgcgtccccgtcgggtacttccggcccctgtgcacgaagaagaaccactccttctcgcccatcttcgccaggccagggagctcccacggctcgttcttgttgaggtcgacgtcggtgatcacttggcaggagaaggattcgcggaggaccttgcgggtgaggtagtgggtgaccacctcctcgtcggtggggtggaaccggaaccccggcggaagtgccagctgccgctcctccgcctccagatccatcaccgccgtcacgtccgacatggctgcaccctctccgggatctactagcttgccttgctacgctgtggaagaccctgatggaacgagagctgagcaggaggaagagctagatcgagatgttagaagtgattttgtctgaatggttt

SEQ ID NO: 60831 - protein, 162 aa, Triticum aestivum
  peptide (1)..(162): Ceres Seq. ID no. 13660873
MGQLALEAVLVHHPRRLPAAGGAAGVEDERLLHADEDGVPALAAEDLFVLPRRLPVAVLRRPVGARPRRVLPAPVHEEEPLLLAHLRQARELPRLVLVEVDVGDHLAGEGFAEDLAGEVVGDHLLVGGVEPEPRRKCQLPLLRLQIHHRRHVRHGCTLSGIY

SEQ ID NO: 60832 - protein, 132 aa, Triticum aestivum
  peptide (1)..(132): Ceres Seq. ID no. 13660874
MKEFGLCICCGGSILIVKCSVSASSGRAALEVELEAPAKSSAPDGESMSIGRSALSSRSALLSKSSLLSKSSRKASGSSIRGAFLAPKSLLITRQTAQSSLAVRGRRWGSWPSRRYSCITHGVFPPLGARPV

SEQ ID NO: 60833 - protein, 85 aa, Triticum aestivum
  peptide (1)..(85): Ceres Seq. ID no. 13660875
MSIGRSALSSRSALLSKSSLLSKSSRKASGSSIRGAFLAPKSLLITRQTAQSSLAVRGRRWGSWPSRRYSCITHGVFPPLGARPV

SEQ ID NO: 60834 - DNA, 524 bp, Triticum aestivum
  misc_feature (1)..(524): Ceres Seq. ID no. 13663839
ctttattgtgtttaaacagcgtactcttccttgttgatctcctctggtttcctcatccagataggcttctgcttgttgaccaagttccactcatgagagacttccttgatcttctttttcttcttttccttctcttccttctcctcatcaacatcctcaaccttgccctcctcagtatccttcttctcctcctcatcttcatcatcagaaatttccttctcagtggtcttctcagtccacagggagatggggtagctgataaactcagagtgcttcttaactagatccttgatgcggcgctcctcaaggtattccatctggtcgtccgtgaggctctcgaacctgatcttgtccaaggcatcggaggagttgatgatgagcgagaggagctggttgatctcggcctggaaggcgaaggtctcggtctccgtcgccatggctgcgcgcgttcctgagctgctcgaggcggggcggggagcggaggagaagcgtgcaggaggcggctagggttaggaggggttttt

SEQ ID NO: 60835 - protein, 93 aa, Triticum aestivum
  peptide (1)..(93): Ceres Seq. ID no. 13663840
LLCLNSVLFLVDLLWFPHPDRLLLVDQVPLMRDFLDLLFLLFLLFLLLINILNLALLSILLLLLIFIIRNFLLSGLLSPQGDGVADKLRVLLN

SEQ ID NO: 60836 - protein, 71 aa, Triticum aestivum
  peptide (1)..(71): Ceres Seq. ID no. 13663841
MRRSSRYSIWSSVRLSNLILSKASEELMMSERSWLISAWKAKVSVSVAMAARVPELLEAGRGAEEKRAGGG

SEQ ID NO: 60837 - protein, 63 aa, Triticum aestivum
  peptide (1)..(63): Ceres Seq. ID no. 13663842
MRDFLDLLFLLFLLFLLLINILNLALLSILLLLLIFIIRNFLLSGLLSPQGDGVADKLRVLLN

SEQ ID NO: 60838 - DNA, 2098 bp, Triticum aestivum
  misc_feature (1)..(2098): Ceres Seq. ID no. 14301878
aaaccctaatctcatataggaccaggcggcggcggcggcggcggcgcggcggcgagtatactcgtagacagcaagcctgaatccccaaaaaaactagagagcgagaggatttggaaatcccagatctttaaaggagatggagatggagatcgagagggactcccaggagcagaggaggatgtggatcgcagaccactcgttgaagcatgcgaagatgctagcagagttcggctatgatatgccgagcaggaagaccactatgtccctgaggaaggaggcctccacgtccctgaggttggaagatggaggcttggttgacgctctttgtcgccaccgtgagatcctgaggagggaaaccaacttcttgatgggggaggtcaattcacgggcgcttgcaactttaggcggaaggaaggcttacagggagtcgatccaacgggagaacaatgtcgccgtcgctcttctccgattcgttcgcctcaagaacggtcgacttggtgggggtgagcttgccccactttgtcaccagccatgaggagtccctggatcttctcttgcgcgagtcggatcatctgggccgccggatccagtctctggcgtccataatgaggaaatttgatatccccgtctcctccgacaagcccaaaaagctgctgtttctcatgtcacgcgcagctgtgataatctccaagactatgaagaattattccaaggaggatgctacttcttcaaagcttcttcaccgtgcccactgggaatctatatggggcagtcagatggcaagccatggtgtcttcgatgatataagtatttttgttgtcagcttgctttcttcttcttaattactacccatgtcccgttcaattaataatgcaatcggaccactctctattttcactcttcgtatacttgcttaattaattttgtaatttgttaatatagattttttttgcggttgattaagatagattttctaacaatgcactcttgtttgactttgattttggtgctgcacgcagccacactgagtcctatgcaattcacgccatccacacctggtattactccctactctgctaccacctgcccagcattgcagatctactctatcaaaattgttgacctcaacgtcaacttgagctggccgctccgagtgtacggtgttgtcgccgccagagacactgtggaccgcaaccgcaaccttctcttctaccggtccagggctaactaccaattagtcgagaaagatgtatgtataaatactaagtcttctccttaatttgcttgcttgtccatttttcaattaagtgttagtaatgataagtcgaacgataacgatggtgcttccaggatccttttttgcgcttgactggcccgtctcgcgcaattttggccagcaacccggtgacatttgaagttgaactaaaaactgtgtatcctggagcggagccggatccccaaggcgcattgctctcttgcgtctatgattggcgcgccgtgcaggataccacccctatgttccttggctatgcttgttctgcacagttaagccttgagcaacttcctagagcaatccaggccactatcatgggtgtccacattgttgatggctcatggcctcctaaatatggatgccgggtttcttgctccttgtctgctccagatgatcccactcctagggaagtgttgttgcttgattgttcccgttctgatgctgaaaaaaaaaagccctgttggatcagatggctactttggtctggcaaggaatgttgtttcagctgaactacaatcaacactgaaagttgtcatacaagcccagtcgtggaggcatggtggtgcacagggtcatgtcgagttccctgtccaacaatactgccaaacaagcaagggttcatgtgttgtaggcatgtgtaaggtcgaggttgttgttgcttggtccctccttgtcgagaacaagctgaatctcatgctttgagacgtgagatctactatgtaagagtcagctctagcttgcgactcatcttgacccagatattcgtgtactgactattagcttatcttgtgaaacattgttatgctggtggtttgctagcatgtc

SEQ ID NO: 60839 - protein, 132 aa, Triticum aestivum
  peptide (1)..(132): Ceres Seq. ID no. 14301879
MEMEIERDSQEQRRMWIADHSLKHAKMLAEFGYDMPSRKTTMSLRKEASTSLRLEDGGLVDALCRHREILRRETNFLMGEVNSRALATLGGRKAYRESIQRENNVAVALLRFVRLKNGRLGGGELAPLCHQP

SEQ ID NO: 60840 - protein, 131 aa, Triticum aestivum
  peptide (1)..(131): Ceres Seq. ID no. 14301880
MSPSLFSDSFASRTVDLVGVSLPHFVTSHEESLDLLLRESDHLGRRIQSLASIMRKFDIPVSSDKPKKLLFLMSRAAVIISKTMKNYSKEDATSSKLLHRAHWESIWGSQMASHGVFDDISIFVVSLLSSS

SEQ ID NO: 60841 - protein, 130 aa, Triticum aestivum
  peptide (1)..(130): Ceres Seq. ID no. 14301881
MEIERDSQEQRRMWIADHSLKHAKMLAEFGYDMPSRKTTMSLRKEASTSLRLEDGGLVDALCRHREILRRETNFLMGEVNSRALATLGGRKAYRESIQRENNVAVALLRFVRLKNGRLGGGELAPLCHQP

SEQ ID NO: 60842 - DNA, 2123 bp, Triticum aestivum
  misc_feature (1)..(2123): Ceres Seq. ID no. 13660967
gccgatttctctagagcagacccgaccccgagctctcctgctagcgcgcgctggcgacggccactccggcctcgtcggccaccccaccgctggctcgcagcccagccgccatgctgccgccgcctccaccctcgttgcctgtgggtttcaaaccggttgtcgtcccgccgccatctctatcgttttcccggtcagatctggatcgggacctcctgcttccgccgccgccgacgacgacgatggacctgcccacccagcttcgtgccgtgcccatggcggtgttggtgatgcctccatgcgagctcgaagcgctcacgtcaccgaagcccgcggcagctggtggctgccccgctccgtcgacgacggctgctgctgtcgacatcctgatccccgtggcggccccgtccctcctcctgccggccgtgcccgggagctcgcgtccatcaccatagagctcgctcccctctgagccaacgcccgtggtccctcccgcaccgtcgttcgccgccgccgcactagccgcggctgcacttgcttgccgcagatcggacccggccatcggagggcagaagcctcgttcccaggagggcctggatacctttgcttcgccgcctgctggacgcccttgcctgcccgacggccaacctcctgcactcgctgctcttggttggggggattggcgtggatgcttccatcgtgatgaagtgactgatgttctcgagtgtgagcaagggggatggcagactgtctcgaaggggcgccgctcgccgcctcctgtagcttttcatcgcccttccatcaatgtgcggcgttcccttccggcgtggctgagagacaggtgtttccggtgtctttgtcgaggtcaacgcgcacactcctacagggatccaatccgatgcactgactgccttcgatctggacacatgactcgcttctgtcatgctaagaagcctgtccatcaagctttgccgctccaatgtcatgctccatcgcctgcttccaccggtgatgtctccatgatagatgtgcagttccggtctatctcggctaagcatgtcgggttggtggaggagaccaagatgcttcgcactgagcttcacgactgccttgcgcgtgctggtagtgttttggggagggcggaggccgctcatgccaaactagaggtggtgccggatgtgtcttcgctgcctgagcttcagattggggttgtgcctgatgtgtccctactgcccgagatccaggttgactctgtcgatggggaaggtggcatgtatggagatctctcccctcgtgctacagcctgtcagttgtcgctgcctgtcatgccgattccttccgggagcgaagtcattgttgaggtcgtgactccggtgctgcggattatgcctgagcttcagaagctttgtggggagcccactttgcctatttcgatggtgcttcctgaggagatagggtctcttggaggggacttggtgatgccaactgcgacctcatcgttttcattggagccgagtcagccgcttgcctttgtgaaccttggaggtttggcggctgctgctgctctctcacctgaggttgttggcccggtggcgtctgttggtgctgagtttgatgaggtaggtgctttgacacctgtttctaaggcgccgaagcccgtccagtctctcatctttgaccgtgacactatgttggcacgtattgacgaggtggtcttcgcgaaaaagcttggccgcttgctcactggcttggatgcagcttgtcctgggtctgccaagacgattgcttgcctcctagcggaggaggtttctacgggcaaaattaagaagatgaagaagcctatcaggagtataggcaagaagactgatgtcattaggaaggcgtgcgcggctgcttaatggagtggcgtttggtggtttcgttgcgatgtcattttgtgagggtttgtggttgttgcatgttatgtatgtttgttgggttgaccgtggtgtcatggagtttctttcttagcgagtagtccgcatgtggtctatatgtatcggtttttgcccagttttccgttaattaactgggcaattctctttttcttaattaatcgatgaggcaaatcttttgccttcgtttcg

SEQ ID NO: 60843 - protein, 323 aa, Triticum aestivum
  peptide (1)..(323): Ceres Seq. ID no. 13660968
MTRFCHAKKPVHQALPLQCHAPSPASTGDVSMIDVQFRSISAKHVGLVEETKMLRTELHDCLARAGSVLGRAEAAHAKLEVVPDVSSLPELQIGVVPDVSLLPEIQVDSVDGEGGMYGDLSPRATACQLSLPVMPIPSGSEVIVEVVTPVLRIMPELQKLCGEPTLPISMVLPEEIGSLGGDLVMPTATSSFSLEPSQPLAFVNLGGLAAAAALSPEVVGPVASVGAEFDEVGALTPVSKAPKPVQSLIFDRDTMLARIDEVVFAKKLGRLLTGLDAACPGSAKTIACLLAEEVSTGKIKKMKKPIRSIGKKTDVIRKACAAA

SEQ ID NO: 60844 - protein, 292 aa, Triticum aestivum
  peptide (1)..(292): Ceres Seq. ID no. 13660969
MIDVQFRSISAKHVGLVEETKMLRTELHDCLARAGSVLGRAEAAHAKLEVVPDVSSLPELQIGVVPDVSLLPEIQVDSVDGEGGMYGDLSPRATACQLSLPVMPIPSGSEVIVEVVTPVLRIMPELQKLCGEPTLPISMVLPEEIGSLGGDLVMPTATSSFSLEPSQPLAFVNLGGLAAAAALSPEVVGPVASVGAEFDEVGALTPVSKAPKPVQSLIFDRDTMLARIDEVVFAKKLGRLLTGLDAACPGSAKTIACLLAEEVSTGKIKKMKKPIRSIGKKTDVIRKACAAA

SEQ ID NO: 60845 - protein, 271 aa, Triticum aestivum
  peptide (1)..(271): Ceres Seq. ID no. 13660970
MLRTELHDCLARAGSVLGRAEAAHAKLEVVPDVSSLPELQIGVVPDVSLLPEIQVDSVDGEGGMYGDLSPRATACQLSLPVMPIPSGSEVIVEVVTPVLRIMPELQKLCGEPTLPISMVLPEEIGSLGGDLVMPTATSSFSLEPSQPLAFVNLGGLAAAAALSPEVVGPVASVGAEFDEVGALTPVSKAPKPVQSLIFDRDTMLARIDEVVFAKKLGRLLTGLDAACPGSAKTIACLLAEEVSTGKIKKMKKPIRSIGKKTDVIRKACAAA

SEQ ID NO: 60846 - DNA, 924 bp, Triticum aestivum
  misc_feature (1)..(924): Ceres Seq. ID no. 13660862
aggtcgacggtatcgataagcttttttttttttttttttgttgatacgaataacacatacgcgtgaatatagccgtttaaggatttagtgccagataatttagcaacaaagtggatattgcacattgctttcaaagagagcctgggcagtgacctcattcacttgacataccaaacataggctaaaggagacggtgcgaccagctctacacgcaaaatgcaccatgagggttgatagtaagcagaaggaccaaaacagatttttggtgccagccacctgaaaaaggcaacattatataggttgtttctactttggaggaagtagaccaagatgtgaccgcctctgaactagatgatgtttatttataaacttatccgcatgggatggataggcccctttgatgtacgcccggagacacttgcggtatgagaaatccgcccaatcaccatttgttctaaccacatacaggcatctggacatcttgaaatcaggatgtttgttaaccataatagcatcaagtccacaaccaatcttgtcttccgaacgggggtggtgagcaagaaccttttctaccacaaccttttcatcttccggacttaaaaacgcaccatctccatatctgctggaatggaggatgtttttgacaagttccacgacgggcccaacttcgcggaggatctccgcctcagccacctcccactgctcctcctcggcccccggagcggagggctcgttgccggcggggaggtcgcagaacaggcggctgggggtgtagagtgcagcagaagtggcgtgcggcgggaagccgccgtggaggatgcgcgtggccgctcgagcgagggcggcggccaaggccatggcttcttcagctacggcgagaaagggtttctccttggggtttcaacagatcagtagtatgggcct

SEQ ID NO: 60847 - protein, 95 aa, Triticum aestivum
  peptide (1)..(95): Ceres Seq. ID no. 13660863
MEDVFDKFHDGPNFAEDLRLSHLPLLLLGPRSGGLVAGGEVAEQAAGGVECSRSGVRREAAVEDARGRSSEGGGQGHGFFSYGEKGFLLGVSTDQ

SEQ ID NO: 60848 - protein, 51 aa, Triticum aestivum
  peptide (1)..(51): Ceres Seq. ID no. 13660864
MYARRHLRYEKSAQSPFVLTTYRHLDILKSGCLLTIIASSPQPILSSERGW

SEQ ID NO: 60849 - DNA, 842 bp, Triticum aestivum
  misc_feature (1)..(842): Ceres Seq. ID no. 13660487
acttacctggacggggtcaatgacctatcaagaaggctcatggcctaggttagcagcctccattgcacttcggaggagtgctggcttaccatctccctaagtgggagaatggatgtcataatttgtgctagtagggttacgcgtccgcgcggcccttgccaatttgaagtctaggtatttcgtttgatcacactagtaatggcggctcaagtgcgcgtcgacctcatcgtgtattccgctacaagctttgagaacagagaggatttgtcctccagcaacctggctggcgtttggtgctccacagccatgcctgtaaaattttgccactgtgtttgtcagtccagttcataagtgtcacacccagattgggcagattaacaagacgtagcttaaagttcatttaaaggagtggtgatatggtagctgaccattgtcaagaagcaagactatatcactgtgaaggaccgaggtgattcgatgcgcgattgtgatgacggtcgcccccgagaaatgctgctgcagtgtcttctggatcaggttatctgttgcggtgtccaccgaagcggtggcttcgtccaggaccagtatcttggtccgtctcaagatcaccctgccgagacagacgagctgacgctggccgacgctccagttctctccgttctccaccactgcgagtggacttttgaatttcagaaatttcagaagaagctagactagtggaatgtgaactgtatggttcaatatagatcagacctggcgagtcaagtttgagctcctttctccgaacttcatctcctagctgacagtgatccaaggcctgaaatgtttatttttcagttttt

SEQ ID NO: 60850 - protein, 79 aa, Triticum aestivum
  peptide (1)..(79): Ceres Seq. ID no. 15220028
MRDCDDGRPREMLLQCLLDQVICCGVHRSGGFVQDQYLGPSQDHPAETDELTLADAPVLSVLHHCEWTFEFQKFQKKLD

SEQ ID NO: 60851 - protein, 68 aa, Triticum aestivum
  peptide (1)..(68): Ceres Seq. ID no. 15220029
MLLQCLLDQVICCGVHRSGGFVQDQYLGPSQDHPAETDELTLADAPVLSVLHHCEWTFEFQKFQKKLD

SEQ ID NO: 60852 - protein, 50 aa, Triticum aestivum
  peptide (1)..(50): Ceres Seq. ID no. 15220030
MAAQVRVDLIVYSATSFENREDLSSSNLAGVWCSTAMPVKFCHCVCQSSS

SEQ ID NO: 60853 - DNA, 821 bp, Triticum aestivum
  misc_feature (1)..(821): Ceres Seq. ID no. 13660528
tcgttccccaagatgctctagccgctcagtgggcacgtagcagcaagtcggctgcgctcgcatgccgacaagccgtcccatccggacgccacgtacgtgatgtggcgcgacgcacccaccgtcccagagtggtataagatggccaccatgcgctaaagttagcagcacacgacaccatctacacaccatctctccatctgcttgttctcatcgcctcaagaagctttgcgttgtatacgttcgaccggccgtaggatgtggatgaggaagaagaaggcggcgacgacgaggccggcggccaggaggagggcgccgacgtctctaggggcgctgtggcggcgcgtggtcgggccggcccgcggcggcaagaccaaaaagaccaagaccaagaagagcaagatcgggtcgctctcgcgcgcgttccgggcgttctcctgcgtccgcggccatggcaaagggaggatggctgcccgcgcagcgcgcaggtactgatcggtctgggacgcgcacggccgccgtccgggagtcgagagctgcccatcacaaatttcatgttaactttggatatcctgtacccacgtgtgttttttcctgcggggactgtatccacgtgttgtgcttgtactgcgtgctgtttgtaaaaacatacctccattccataacgtaagacgttttttgacactacactagagtcaaaaaaatgtcttacgggcggagaaagtactggtcctcgaaagaggaagttaagtgcgtttcgtaatctcattacaawaaarwwrraacgggaggggggaaargmttatcgataccgtcgacctcga

SEQ ID NO: 60854 - protein, 78 aa, Triticum aestivum
  peptide (1)..(78): Ceres Seq. ID no. 15220034
MWMRKKKAATTRPAARRRAPTSLGALWRRVVGPARGGKTKKTKTKKSKIGSLSRAFRAFSCVRGHGKGRMAARAARRY

SEQ ID NO: 60855 - protein, 76 aa, Triticum aestivum
  peptide (1)..(76): Ceres Seq. ID no. 15220035
MRKKKAATTRPAARRRAPTSLGALWRRVVGPARGGKTKKTKTKKSKIGSLSRAFRAFSCVRGHGKGRMAARAARRY

SEQ ID NO: 60856 - protein, 72 aa, Triticum aestivum
  peptide (1)..(72): Ceres Seq. ID no. 15220036
MAKGGWLPAQRAGTDRSGTRTAAVRESRAAHHKFHVNFGYPVPTCVFSCGDCIHVLCLYCVLFVKTYLHSIT

SEQ ID NO: 60857 - DNA, 902 bp, Triticum aestivum
  misc_feature (1)..(902): Ceres Seq. ID no. 13583137
aaaggcaaaaattattccatttcattttccatggtagtgtttgcgtgcgctgcaactttttctacccaaacgaaacatcgaaactcttgcctagacgatacatcgaaacaaaatcttgctgcatgtcgtacatgtcgccattttactgcactggagtggcatcaagccggccagcctacctgtagatcactgggtgaacaccacattcgtgatgtcggggaacttctccttgatggctgccttcactccacttccgatggactctgggccgtcatacttaaccaggcagtcctcgccgtcaacggcaagaaccttcacactcccgccgtagttcgcgatcgccggccgcagtatgtccaggtgccggttcaccgcctcaggcgttgtctcctccggctgctggtccccgtcgaacacctggcggatgtccttgatggcgtcaccgaacttctccttgagcactcgctcgatgcccatgttcatcgtcgtcgtcgagcttggacaactgctgcacgccccttcaagcctaagggagacgacgccgtcctcgacggacacgacggcgacgtcgccgccgtcggagatgaggtaggggcgcacgtcgtcgaggacgcggtcgacgttacctggcgtcagttcgtaggtcaccgccgagtacaggccgcctcccggcggcggcggcgtggatgccgaggccgcagccaggtgtccccggaagttggcggtccagatcttggagtctcggaattggggtcgcctagggagcacgggcgggttgaatttgatgattcggcgacggatttgcggcggaaacgacgaggtagcggcggcggccgcggtcagcgacgcctccattgtttgccgtgtgtggtcgtgtatccctttgctttttcgattaggat

SEQ ID NO: 60858 - protein, 300 aa, Triticum aestivum
  peptide (1)..(300): Ceres Seq. ID no. 13583138
KGKNYSISFSMVVFACAATFSTQTKHRNSCLDDTSKQNLAACRTCRHFTALEWHQAGQPTCRSLGEHHIRDVGELLLDGCLHSTSDGLWAVILNQAVLAVNGKNLHTPAVVRDRRPQYVQVPVHRLRRCLLRLLVPVEHLADVLDGVTELLLEHSLDAHVHRRRRAWTTAARPFKPKGDDAVLDGHDGDVAAVGDEVGAHVVEDAVDVTWRQFVGHRRVQAASRRRRRGCRGRSQVSPEVGGPDLGVSELGSPREHGRVEFDDSATDLRRKRRGSGGGRGQRRLHCLPCVVVYPFAFSIR

SEQ ID NO: 60859 - protein, 290 aa, Triticum aestivum
  peptide (1)..(290): Ceres Seq. ID no. 13583139
MVVFACAATFSTQTKHRNSCLDDTSKQNLAACRTCRHFTALEWHQAGQPTCRSLGEHHIRDVGELLLDGCLHSTSDGLWAVILNQAVLAVNGKNLHTPAVVRDRRPQYVQVPVHRLRRCLLRLLVPVEHLADVLDGVTELLLEHSLDAHVHRRRRAWTTAARPFKPKGDDAVLDGHDGDVAAVGDEVGAHVVEDAVDVTWRQFVGHRRVQAASRRRRRGCRGRSQVSPEVGGPDLGVSELGSPREHGRVEFDDSATDLRRKRRGSGGGRGQRRLHCLPCVVVYPFAFSIR

SEQ ID NO: 60860 - DNA, 1345 bp, Triticum aestivum
  misc_feature (1)..(1345): Ceres Seq. ID no. 13595928
cccccctcccgttccaactttattgtgtttaaacatttttttttttttttttttttttttttttttttttttttttcccagaacataacagctcaactcctctgttcacatgcacaactcaacgcctaattagacataaacaaacaagaaggccacgacacggagagaagaaagaaaaggaaaattttaatcacaggccatgagtgagtgcgtgagagtgaccacacacgcactgatgactgatgcctgatgcctgattgctctgtctctgcccatggcgcgttgcctgccgatcacatgacgctgcacccggcgttggggtcctcgccgcagtacggctgctgctgctgctggtagtacggctgccggttgccgtggtaccacccctggtggtcgtgcaccggcacgccgtagtacccgccggccggcacgggcggcctgcagcactggcaacccccgccgcacccgccaccgcagcctccaccgtagtacgacggctgggccggctggccgtacggcgtcgggtcgtagctgtaggacatgggcccggccggcgccggccagatggacggcacggccaccccctgcgcggccacgggcggcgccatcatcggcgggcccagcggctcgccgcgcggcggctggggcccgcctccgccctgctgcttggcctgcttcatcttctccaggagcgggccgaggtcggccatgctcatgccgggcggcagcggcggcatggccttgccgggcttggcgtccgtggccggcggcgcgtcgtcgaacttgaccttcttctccggcttggcggccgcggcgtccttgggcttctccttgtccgccttcccgccgccatccttgggcttctccgccttcccgccgccgtccttgggcttctccgccttcccgccgtccttctcggccttgccgccgtccttgggtgccttctgcttctcgccaccgccgccgtccttgtccgccttctgttcattgccattgacatgcatctccttgatcacccggccggcctcgcagcagagcttcctgcacagcttgtcggggtcgaacggcccggacaccgtcacggcgttgttcttctcgtcgaaggagatgattttgatgttcatcttgtcttggatcttgcagaggaccttcctcatcttcctgtagcatcgcgcgcattcaaggtcaactttgaggacaaccgtggagatcttgtccgccatggcaatggcgccgcctgaggcgtggtcgtcaccttcagaggagcctgtgctgtgtgatgtgtgctctctgtggaggagagagagaggggggagggggaggacgaagaagaagaaatatggat

SEQ ID NO: 60861 - protein, 208 aa, Triticum aestivum
  peptide (1)..(208): Ceres Seq. ID no. 13595929
MGPAGAGQMDGTATPCAATGGAIIGGPSGSPRGGWGPPPPCCLACFIFSRSGPRSAMLMPGGSGGMALPGLASVAGGASSNLTFFSGLAAAASLGFSLSAFPPPSLGFSAFPPPSLGFSAFPPSFSALPPSLGAFCFSPPPPSLSAFCSLPLTCISLITRPASQQSFLHSLSGSNGPDTVTALFFSSKEMILMFILSWILQRTFLIFL

SEQ ID NO: 60862 - protein, 200 aa, Triticum aestivum
  peptide (1)..(200): Ceres Seq. ID no. 13595930
MDGTATPCAATGGAIIGGPSGSPRGGWGPPPPCCLACFIFSRSGPRSAMLMPGGSGGMALPGLASVAGGASSNLTFFSGLAAAASLGFSLSAFPPPSLGFSAFPPPSLGFSAFPPSFSALPPSLGAFCFSPPPPSLSAFCSLPLTCISLITRPASQQSFLHSLSGSNGPDTVTALFFSSKEMILMFILSWILQRTFLIFL

SEQ ID NO: 60863 - protein, 152 aa, Triticum aestivum
  peptide (1)..(152): Ceres Seq. ID no. 13595931
MLMPGGSGGMALPGLASVAGGASSNLTFFSGLAAAASLGFSLSAFPPPSLGFSAFPPPSLGFSAFPPSFSALPPSLGAFCFSPPPPSLSAFCSLPLTCISLITRPASQQSFLHSLSGSNGPDTVTALFFSSKEMILMFILSWILQRTFLIFL

SEQ ID NO: 60864 - DNA, 711 bp, Triticum aestivum
  misc_feature (1)..(711): Ceres Seq. ID no. 13596163
ctttattgtgtttaacatatcgtgagcatgcagtagtgactgccgttgttgatgaaggtcctgaagaatcgacacaccaagttcttctgtctccagcatagttcttcggctctctttaattctgtcagtggactgattcagtctttcagttgtcatcatcaaccttcctcgctgatcagtggacaccgcgagtgtgtcagccatgccagattcaaggagctcctccttggtagtttgcctggcattaggcgccgagatcctcttgagctcgctcttgaggttgttaaggtcagatttgtactcccgcagcttagctagcaaacccgctttcacgctaggcggcgtattcctagcctccaggtccatcctccgaatcagcgattcagcttcctgcacgccggactggatctcggagagcctctgcttcttcttctctccatcgagggcggaggcgacggtgcacttgcgggagagggaggcggattcctcgcagtactggcgctcgtagccctcgaacacctcgctcatgactgctcccctcgatcgcctccgcccgcgcgcaaagattcccccctccggattccgcgcccaaatcgtccggcggcgtcgaatcgagcagatgatcgagacggccgcaattcgatccgggctgcctcacgagggggggctccgggcgtttggtggaagcttcgattttggtcgggtagggat

SEQ ID NO: 60865 - protein, 101 aa, Triticum aestivum
  peptide (1)..(101): Ceres Seq. ID no. 13596164
MPDSRSSSLVVCLALGAEILLSSLLRLLRSDLYSRSLASKPAFTLGGVFLASRSILRISDSASCTPDWISESLCFFFSPSRAEATVHLREREADSSQYWRS

SEQ ID NO: 60866 - protein, 88 aa, Triticum aestivum
  peptide (1)..(88): Ceres Seq. ID no. 13596165
MKVLKNRHTKFFCLQHSSSALFNSVSGLIQSFSCHHQPSSLISGHRECVSHARFKELLLGSLPGIRRRDPLELALEVVKVRFVLPQLS

SEQ ID NO: 60867 - protein, 61 aa, Triticum aestivum
  peptide (1)..(61): Ceres Seq. ID no. 13596166
MTAPLDRLRPRAKIPPSGFRAQIVRRRRIEQMIETAAIRSGLPHEGGLRAFGGSFDFGRVG

SEQ ID NO: 60868 - DNA, 766 bp, Triticum aestivum
  misc_feature (1)..(766): Ceres Seq. ID no. 13596075
cccccctccagtttgcaagaaagctaccaccattctctggcatcgacaccaacttttttgatctgaaccatggatgacatcgtaactcttagttttgcaactatgatgttgcctgttgtctgtgaagtacagttgtaattatttacggcagcagtttgatatcgtgctcttataactttcatcaggttgctaaagatggacttcccttgccaactgacaggacgctgtgccctctgtgctgccaaaagcgcaacaacccgtctgttctttctgtttctggttttgtgttctgctacagttgcatattcaagtctgtctctcagcataaaagatgtcccgtgacattgatgcctgccactgttgagcaaatcaggcgcctcttccatgatttatagcttgaataggcgcagttcaactaaaggaagtactccctctgtaaactaatataagagtatttagatcactaaagtagtgatctaaacgctcttatattagtttacggagggagtagcttatatgggctcaaggctgctagggactctggggcgagaagaagcttttcccgcattcctgttgatgcagagatcacacgagatacagtttctgcttcacgtaatatccatacagctcttgtgccatttttgttgtttgttgaaacttcaacagagatttagaccgtgtaataattactgctaggtgattattgagttgatttattaaagggggggttgaaaaaaaaaaaaaaaaaagcttatcgataccgtcg

SEQ ID NO: 60869 - protein, 59 aa, Triticum aestivum
  peptide (1)..(59): Ceres Seq. ID no. 15221760
MGSRLLGTLGREEAFPAFLLMQRSHEIQFLLHVISIQLLCHFCCLLKLQQRFRPCNNYC

SEQ ID NO: 60870 - protein, 48 aa, Triticum aestivum
  peptide (1)..(48): Ceres Seq. ID no. 15221761
MDFPCQLTGRCALCAAKSATTRLFFLFLVLCSATVAYSSLSLSIKDVP

SEQ ID NO: 60871 - protein, 39 aa, Triticum aestivum
  peptide (1)..(39): Ceres Seq. ID no. 15221762
MQRSHEIQFLLHVISIQLLCHFCCLLKLQQRFRPCNNYC

SEQ ID NO: 60872 - DNA, 718 bp, Triticum aestivum
  misc_feature (1)..(718): Ceres Seq. ID no. 13596290
ctcaacctccccccgcaccaaaaacccgcgcccaaatcccacaaccgcgcccagatccgccccgccatcccgcatggcgcacccggccgcggaccgccgcctgcgctcctccccggcgtcctccgcgtcgcgctgcgaccacaaccgcttcttccgccccggcgcgctcgccaggctccgcgactccaagatcgtagcccgctcccttcgctccgccgcctccgcgcgcctcctcccgccctccccctcctcgcccgctcccttgtcacccgcgcacgctgcggagaccggcgtgccgcacttcttcggggccgcgcggggcggcatgcggtacccgctccggaagaagctcgccgccgcccggggcgtcgtgttcctgcccccgccgcccgtgtcgccgggcgccctggaggccttcctcggcgctttcgccgccgcgccgtccgagctcctcgccgcgcactgataggccggccggccggccggtagactcctgtgccactgccgctgtggggatgcgttcgcagcggcgcagtcggagctggaggatgccgcgtgccgaagaccaactgctgtgccgctcagctgctgtctaggcttcgttagatctgtgtagatgcttctttcttttaggaactgcaactttttcagatgttggaagtgcaaccttgggagtactactagcaaaaaaaaaaaaaaaaaagcttatcgataccgt

SEQ ID NO: 60873 - protein, 162 aa, Triticum aestivum
  peptide (1)..(162): Ceres Seq. ID no. 13596291
LNLPPHQKPAPKSHNRAQIRPAIPHGAPGRGPPPALLPGVLRVALRPQPLLPPRRARQAPRLQDRSPLPSLRRLRAPPPALPLLARSLVTRARCGDRRAALLRGRAGRHAVPAPEEARRRPGRRVPAPAARVAGRPGGLPRRFRRRAVRAPRRALIGRPAGR

SEQ ID NO: 60874 - protein, 154 aa, Triticum aestivum
  peptide (1)..(154): Ceres Seq. ID no. 13596292
STSPRTKNPRPNPTTAPRSAPPSRMAHPAADRRLRSSPASSASRCDHNRFFRPGALARLRDSKIVARSLRSAASARLLPPSPSSPAPLSPAHAAETGVPHFFGAARGGMRYPLRKKLAAARGVVFLPPPPVSPGALEAFLGAFAAAPSELLAAH

SEQ ID NO: 60875 - protein, 130 aa, Triticum aestivum
  peptide (1)..(130): Ceres Seq. ID no. 13596293
MAHPAADRRLRSSPASSASRCDHNRFFRPGALARLRDSKIVARSLRSAASARLLPPSPSSPAPLSPAHAAETGVPHFFGAARGGMRYPLRKKLAAARGVVFLPPPPVSPGALEAFLGAFAAAPSELLAAH

SEQ ID NO: 60876 - DNA, 1481 bp, Triticum aestivum
  misc_feature (1)..(1481): Ceres Seq. ID no. 13589000
atcgataagctttttttttttttttgcagctaaaagagatggacacactcaattggtttgtaaatgggagaaatacaaagggctatcacaagtttcaaaccatgtaaacctcctgagctgaggcaaaaagtagcatggaaaaaacagtaattcacatacgagatctcctaaatttacaatgaaaaactcatctttacattggatgagtggagacaagttttcacaccaccaaagatggaagtatttggtctggcgaagcctgttatcgtttcttcttcatgattgccgccgtgcgcatctcggcgtcttccttggcgaagctccaccagaggtatgacagggggatagccatggcgaggcagattgcgtgtccatcaacatatccccatcgcggagggacatcatgtgcttccaggtatagtgagaggacaccaccgatggcaacaaaggcgaccttcaggcgtgaaggatgccttgtgatagcagcccacactgtccatagaaggagctgagcaacgctaataacagtgcaaaccttcatgttcaggcctttgtcgagttcgtagaagttgaggtacaaaatgtgggttgtcacaaaagccagaattggagctgcaaccatcactcttgaagcttcatccctcagattcgaagttcgcagtatggccaagatgagggagtaaccaaaaaaagcagcagctgatgacaaatacagcttttctgtccaagcagtatcacaactgtgatatatggcacaccagaaccacgaattcatggccaagagcgcgttgatgtgccataatccggtgtattcgtagtatgtggcatgagtttctggcctaagaggcagcttgtaagaaagcaagaggaaaaacgatagccatccattaaactgcacgagaagagtcagggcagatagagctgcagaaagaggttcctgaaacacagaagcacgtttgagaggccatttgccatgatacttgacgggccctagcccaagctcttccctttcctgctctctttccatcatacaatggtatcggcattcgctgttgcagttccactccttccactggaggtacaatggctcgtgcgcgtaccatgccttgtcagcgggctggtcatcggtcggcacaacacagtgtttgatagaatcctctttcagggtgccagtcctttgacattcttcgaagcaagctctgtagagcggatcggcgtcgccctcggaggcggaggcggaggcggccaaggccgtggccgccaggccgagaagcatcagcagcggcggccctctcctgcggagccccatcccccctcctctccgtccgcgcggctccgaatcgggcggggcggggcggggaggactagcaagcagcggcagcagctagagggagagggagagggagagcggggcggggcggagatccattaatccacgcgagacggagttccgaggggggagggggagatgggggtgattt

SEQ ID NO: 60877 - protein, 132 aa, Triticum aestivum
  peptide (1)..(132): Ceres Seq. ID no. 13589001
MVSAFAVAVPLLPLEVQWLVRVPCLVSGLVIGRHNTVFDRILFQGASPLTFFEASSVERIGVALGGGGGGGQGRGRQAEKHQQRRPSPAEPHPPSSPSARLRIGRGGAGRTSKQRQQLEGEGEGERGGAEIH

SEQ ID NO: 60878 - protein, 77 aa, Triticum aestivum
  peptide (1)..(77): Ceres Seq. ID no. 13589002
MIAAVRISASSLAKLHQRYDRGIAMARQIACPSTYPHRGGTSCASRYSERTPPMATKATFRREGCLVIAAHTVHRRS

SEQ ID NO: 60879 - DNA, 1142 bp, Triticum aestivum
  misc_feature (1)..(1142): Ceres Seq. ID no. 13596346
atcctttcccccctccagttcccactttattgtgtttaaacactataacattcatcagtctacaaccacattgccataacagatgcgtaaggtgaacatcagcaggtctcggaggagaacactctaatgtcgaggaggagacaaacaagcccccagtccataaaacaaggtgcttcaacacagttcacggaatttcatatgacatcaatcaggttgacgcagaaggggcctcggccatctcttgctcgacaggagccgcctggactgggtagtagtggtagtgcagctctccaacatcatctccagacaacttcttccagccgtcagggccaacatagtagacactaacacagccaccactagctccgtcacggaatgttgcgtggtaaatagcccgccgagctaactcagcagcttcctcaactgacatgttgaatttgtaaccctcgtccaagataccataagcatatagagagccagaaccaacagagaatcggcttcccttgagccttgcaccctcgctatcaacatagtacaagcccggaccagtttcatcaaatccagcaatcatggtaccgattgaaagtcccatcccgcggtatgaataaaggatattagccaacgtctttgaagaaccagcaatggagatcctccgcttgttcgcgagctcatggagccggcacttgacccccaagtttctatgccaaaattggcaatcagcagcacctccagccatggttcccagcatgtagggattaatctcgatgattttcctcacagtttgcgaagatatgtagccgcccatgctggcccgggagtcggcggcgacgatgacgcccttgtcgaagatgaaggagagcgtggtggtccccttcttgttgttcaccatctccttggtcgccttctggaacccatcgaagtcgttgcaggtggggaactcgagggcgagctggtcggcggcgtcggcggagaagaggccggcgaagtcgtcgctgccggcggcggcggcgccgaagtggttctcgagggcggagaggttgggaatcatggcgtcgtcggcgggtgtgggggtgcggcgaggcggaggcggaggcgatgaagtgagcttttcctctctttcgacccacggacttttcctcttc

SEQ ID NO: 60880 - protein, 142 aa, Triticum aestivum; identical to SEQ ID NO: 51132
  peptide (1)..(142): Ceres Seq. ID no. 13596347

SEQ ID NO: 60881 - protein, 132 aa, Triticum aestivum; identical to SEQ ID NO: 51133
  peptide (1)..(132): Ceres Seq. ID no. 13596348

SEQ ID NO: 60882 - protein, 113 aa, Triticum aestivum
  peptide (1)..(113): Ceres Seq. ID no. 13596349
MLARESAATMTPLSKMKESVVVPFLLFTISLVAFWNPSKSLQVGNSRASWSAASAEKRPAKSSLPAAAAPKWFSRAERLGIMASSAGVGVRRGGGGGDEVSFSSLSTHGLFLF

SEQ ID NO: 60883 - DNA, 478 bp, Triticum aestivum
  misc_feature (1)..(478): Ceres Seq. ID no. 13589012
ctgaatctaggttttctttcctcttccccaccctggggaaagtagggttcgacgggaacaatcgaacttggcgagagctggtgagatggagacggagacgatggaggctggaagaaagagagagcgtctgatggagacggcgaaatcggggagaaagcgggcggggaaaaagaaggcgtcgaatgcggtgtcgttttttatgcaattgacggttgattcagcgaagatggtcgaagagggaaggctgaagcgagcggtggcgaggcggaacgaggagaactccggcgtggcgccgatcgtgccggaggcgctcacggagcaggagcgggcggcgctgctgcaggaagagatggcgagggagaagatattgtcgcgcgagcgctccctgcagatgcacgcggagagactaagggaaaaagaggagaggccccgggcgccgccgggtccgaaccaagaagacgagtctgaacaggattac

SEQ ID NO: 60884 - protein, 131 aa, Triticum aestivum
  peptide (1)..(131): Ceres Seq. ID no. 13589013
METETMEAGRKRERLMETAKSGRKRAGKKKASNAVSFFMQLTVDSAKMVEEGRLKRAVARRNEENSGVAPIVPEALTEQERAALLQEEMAREKILSRERSLQMHAERLREKEERPRAPPGPNQEDESEQDY

SEQ ID NO: 60885 - protein, 126 aa, Triticum aestivum
  peptide (1)..(126): Ceres Seq. ID no. 13589014
MEAGRKRERLMETAKSGRKRAGKKKASNAVSFFMQLTVDSAKMVEEGRLKRAVARRNEENSGVAPIVPEALTEQERAALLQEEMAREKILSRERSLQMHAERLREKEERPRAPPGPNQEDESEQDY

SEQ ID NO: 60886 - protein, 116 aa, Triticum aestivum
  peptide (1)..(116): Ceres Seq. ID no. 13589015
METAKSGRKRAGKKKASNAVSFFMQLTVDSAKMVEEGRLKRAVARRNEENSGVAPIVPEALTEQERAALLQEEMAREKILSRERSLQMHAERLREKEERPRAPPGPNQEDESEQDY

SEQ ID NO: 60887 - DNA, 1131 bp, Triticum aestivum
  misc_feature (1)..(1131): Ceres Seq. ID no. 12614713
agccaaaaccagtctcccactaattacggaaaaccacggttacgaatagctagagttgttcgagactgccaagataagtcaacaagaatgtcacagatagatttattcgcaatttacaggcgatgacatccgtaggttcagtttggccagcctcccaaatagcatgcttgcatagagggatgaggaagatgacatcttcaaatgcgagacaagcaagccttgtagtagggtatgacatctgcttctgcgcgggagagagcaaccaaaggagtaacagtaatatatccatctgcaagggatttgtagtccatgtcctccccttcctcttcatcataacttctctttactatcactcttttaaacagtaggtcattcgccgatgaagtgtctatatctctgtccttttcaccgtcaatatccatgcttgccgtctggtaactttctacagaaggcttttggtagactgtttgctcccatccaattctggccatatattttccttgctttgtaattttgtatcccttgtggtgtgcagcatcagatggcacatctatattcaggaatgatcctttagggtaggttccactcttgatctcgaccatgacagcatttatcagagggatacaaacctctgcagccactttgaggtcattaacactgctctgaccagcaacccaattgtatgacatagataatgcaggaatcccgtatataaatgcctccctagcaccagcaactgttccagaatatacaacatgtaatccacaattattgccaatgttgattccgctaagcaccaaatcaggaaccaaaccatcaaagagcttcccagagatgcctaaagaggcacagtcagcgggagttcctgaaactccaaatgctgtagcaccattgatattgacacgtttacagcgaagtgcagaacgccatgtaatgcagtggctaacgcccgacctgtctgtgtcgggcgcgcagacgaggacgcggtagcgcccctgggcgacgagctggtcgacgaggaagcggagccccggcgcgtcgatgccgtcgtcgttcgtcaccatcaccaccggcgccgccgccgcggccgccgtggaggccatggaggcaagagccgtgtacgggcgcggg

SEQ ID NO: 60888 - protein, 81 aa, Triticum aestivum
  peptide (1)..(81): Ceres Seq. ID no. 12614714
MTSVGSVWPASQIACLHRGMRKMTSSNARQASLVVGYDICFCAGESNQRSNSNISICKGFVVHVLPFLFIITSLYYHSFKQ

SEQ ID NO: 60889 - protein, 70 aa, Triticum aestivum
  peptide (1)..(70): Ceres Seq. ID no. 12614715
MLIPLSTKSGTKPSKSFPEMPKEAQSAGVPETPNAVAPLILTRLQRSAERHVMQWLTPDLSVSGAQTRTR

SEQ ID NO: 60890 - protein, 62 aa, Triticum aestivum
  peptide (1)..(62): Ceres Seq. ID no. 12614716
MRKMTSSNARQASLVVGYDICFCAGESNQRSNSNISICKGFVVHVLPFLFIITSLYYHSFKQ

SEQ ID NO: 60891 - DNA, 1715 bp, Triticum aestivum
  misc_feature (1)..(1715): Ceres Seq. ID no. 12614112
ggatacgaacggcattggatctttcccaggtagcaggtacaatatcgaatcgaattatttacgacagcgacgcggtacggatcgagtcctctcgtctcgtctgtcgatttggattgcagcaccatgcagtgcatgcaagccggcctgccggctggctagttgccggcgagggcgacctgcccggcgacgaacgccctgaggttcctctcggacgagccgcccacggcagccgccgcccgcgccttctccctccacagcgccgccttggcgcgcaccacatccgacgtggcgaagccgacgcatctctgcagctcgtcggcctccagcacgccgtccttctcgctcacggcggccctgaccccggtgccgagctgccgctccaccagccacgcgttggtgccctggtccgtccactgcggcactcccaccaccggcacgccgcacgccacgctctccagcgtcgagttccacccgcagtgcgtcacgaagcaacccaccgccgggtgcgacagcaccttcccctggtcgcaccactccaccaccatgcccccgccggtgcacaagtcgtcgccgtcgacctcgccgcggttatccttcctcagcacccacaggaacgggcggccgatctccgccatgccgcgcgacacctccgtgatctgccgcttgctcatcgtcgacaggctcccgaaggagatgtagacgaccgaccccgcttcctgcgcgtccagccactccaggtaccccttgccgtcctgcttgaacaggtcgttgctgtcgttggccgccgccgctgccgaggcgtccaggaaggagaggacggggcctatggggacgacgttgatgccgtgctggtgcagcgtcgccaccgcgtcgggctccatggcatcgaacgtgttggcgagcacggtgggcgagtcctcgcggtccagcacgtcgagcagctcacggaacgcggcgagcacaaaggagtaggggtggtcgtcggacgcgatggtgaggaacgacggcaggtcgcgcaggcgcatcggcgggagcccccggacgcggacgtccgcccacgggtcgctcgctgcggcggtgacggcctggtcgaggccgtcagtgccgcggaagaagtggaagtaggcggcgagcacggaggccggctggatccagtagagcgcggcggggacgccgtgcgcgtgcgcgacgtcggcgacccaggagaggagcaccgtgtacaccacctgagtgacgggggtgccggcgtcgcggaggcgcgcgagcacgccgtccagcgtgcgggcccccacgaccttgaggttggacatgtagtgcatgctgtcgtgcgcggacctgtcgaagccgccgtcgtagccgtcggagtagggcacgtagcggacgccggcgccgtcgacgtggtccactgccgccgcgtccgcgtcgtccgggaacatcttgcggcaggcggagacggcggtggagacggtgacgcgggcgcccagcgcggcgcggagcaggcgcagcgcgaggtggcgcgccgggttgatgtggccctgtgccgggtacgtgaccacgaggaagtgcggcgcctcctcccccgcgcgctccatggccggcattgccgcgtgcgtgcgtgcgatgcgagtgcaagaagccaagagccaagaagccaagagcgtactaggtaagcaagagtgtccttgctggggtgggttgcggcgcgtggtggatgt

SEQ ID NO: 60892 - protein, 555 aa, Triticum aestivum
  peptide (1)..(555): Ceres Seq. ID no. 12614113
IRTALDLSQVAGTISNRIIYDSDAVRIESSRLVCRFGLQHHAVHASRPAGWLVAGEGDLPGDERPEVPLGRAAHGSRRPRLLPPQRRLGAHHIRRGEADASLQLVGLQHAVLLAHGGPDPGAELPLHQPRVGALVRPLRHSHHRHAARHALQRRVPPAVRHEATHRRVRQHLPLVAPLHHHAPAGAQVVAVDLAAVILPQHPQERAADLRHAARHLRDLPLAHRRQAPEGDVDDRPRFLRVQPLQVPLAVLLEQVVAVVGRRRCRGVQEGEDGAYGDDVDAVLVQRRHRVGLHGIERVGEHGGRVLAVQHVEQLTERGEHKGVGVVVGRDGEERRQVAQAHRREPPDADVRPRVARCGGDGLVEAVSAAEEVEVGGEHGGRLDPVERGGDAVRVRDVGDPGEEHRVHHLSDGGAGVAEAREHAVQRAGPHDLEVGHVVHAVVRGPVEAAVVAVGVGHVADAGAVDVVHCRRVRVVREHLAAGGDGGGDGDAGAQRGAEQAQREVARRVDVALCRVRDHEEVRRLLPRALHGRHCRVRACDASARSQEPRSQERTR

SEQ ID NO: 60893 - DNA, 1212 bp, Triticum aestivum
  misc_feature (1)..(1212): Ceres Seq. ID no. 12614805
caaccacaagcccaactgcacggcgagcgggattggatcagtcagtagcggcgctagagagaggtaacagagggattggattggtggctggcactttgatttgcttagcgcgcgacgaagcaagctaagcgagcgcgatggtggtgctcatggagtacgcccccggcgtcggcgcgaccatgaagaggaagggagaggaggagccggggctgttcgcgttccccgatgacggcgacggcggcagcgttccggtttcctgccgtgccaccaagatgaggcgtctggagggtgccggcgccggccacgatgtgccggcggcagcggccgttgagacggagggcgacgtaatgatggcggaggagccgccggcgccgtccctcggggccgtggaaggggaaaagagggctgtggtggtgtacggcccggcagtcgacgccgcgtgcactggtggccggctcggccttctcggccaatggcggctccgcccgtgggcgcccctgagcgccggcgccgagtggatccgtgacatgctgcgcgaggcggatggccgcacggtgcgggcggtgctgtccagcgctcaggaagggggcggcgccgacctggccctggtcccttggggcgccgcacacgtgccggcagaggcgaatcaggcgtccacggccgcggagacggtggacggggaagaggacgccgagggaacggcagcgatggacgtcgaagaggagagggaccatcatcaggcccaggcggtcggggccggctgcggtgaggggtacttgtgccggtggccgcagcactgtatggcgccgcctccgttgccggcggttcgccaggcgaccccggctgtgtggtcgtggtgaaccgcgcgtggctggacgactacgaccgacggaattgatatgttcctctttgccgatgcgtgtcgcgtcgatttgtgtttgtggtgtccagttcgtcgaaatcagagcaagatcatctcttttctgacggaaagaccttcctgcccagctttattaaaattcaaataatgctaagaatgaaatctggatctggtggtgcctccaccattcaaaccgtgttgacactactcactagctagctcagggctgcaagaaaagcacgaggctcgtgagccgactcgcattttgactcgactcgaaaaaaataagctaaatataaacattttcttttttcaaaaaaaatttgtttatt

SEQ ID NO: 60894 - protein, 240 aa, Triticum aestivum
  peptide (1)..(240): Ceres Seq. ID no. 12614806
MVVLMEYAPGVGATMKRKGEEEPGLFAFPDDGDGGSVPVSCRATKMRRLEGAGAGHDVPAAAAVETEGDVMMAEEPPAPSLGAVEGEKRAVVVYGPAVDAACTGGRLGLLGQWRLRPWAPLSAGAEWIRDMLREADGRTVRAVLSSAQEGGGADLALVPWGAAHVPAEANQASTAAETVDGEEDAEGTAAMDVEEERDHHQAQAVGAGCGEGYLCRWPQHCMAPPPLPAVRQATPAVWSW

SEQ ID NO: 60895 - protein, 236 aa, Triticum aestivum
  peptide (1)..(236): Ceres Seq. ID no. 12614807
MEYAPGVGATMKRKGEEEPGLFAFPDDGDGGSVPVSCRATKMRRLEGAGAGHDVPAAAAVETEGDVMMAEEPPAPSLGAVEGEKRAVVVYGPAVDAACTGGRLGLLGQWRLRPWAPLSAGAEWIRDMLREADGRTVRAVLSSAQEGGGADLALVPWGAAHVPAEANQASTAAETVDGEEDAEGTAAMDVEEERDHHQAQAVGAGCGEGYLCRWPQHCMAPPPLPAVRQATPAVWSW

SEQ ID NO: 60896 - protein, 226 aa, Triticum aestivum
  peptide (1)..(226): Ceres Seq. ID no. 12614808
MKRKGEEEPGLFAFPDDGDGGSVPVSCRATKMRRLEGAGAGHDVPAAAAVETEGDVMMAEEPPAPSLGAVEGEKRAVVVYGPAVDAACTGGRLGLLGQWRLRPWAPLSAGAEWIRDMLREADGRTVRAVLSSAQEGGGADLALVPWGAAHVPAEANQASTAAETVDGEEDAEGTAAMDVEEERDHHQAQAVGAGCGEGYLCRWPQHCMAPPPLPAVRQATPAVWSW

SEQ ID NO: 60897 - DNA, 876 bp, Triticum aestivum
  misc_feature (1)..(876): Ceres Seq. ID no. 13596720
ggcattcctggtagttttgcatctagcattgtactatacacactgggagatatttacagtctatttcccaatttgtttgttctttcccgcctaaatctacaaaaatcaatttaatactattggcctaggccgtttggcctcaggaattaagaatggttccaaaattgaaggaacaaaaaaaatgaacaacactatctttctcttgtagaaatgctcgagtcagtcagcagcctcctggatgatgctcagagcccgcttcagcctcagccgcgaccgcggggcgagcttcccgttgctcttcttcgccggactcaccgacaccgcgaactccccgagcgtccgctcgttaagcttctcgttgaacatgacgtcctcgcggtcttccacctgatcctcgtgcaccggcacgacgcgcaggttcttggtcttgccgccgcgccgctcaggcctcttggcggcgatcgcggcactcgcccgcacggcgagcgcggccatgtcggcgctcgagagcggccgccccagctccgcggcagggagcaggaagtatatttgtcccggccggaggagctcgtcggaggccagcgccggtgggggctcgttgaagtagagcgcgtcggagttgcacacgaagaaggaggcggcctcgccggagagaacgtcggagacggcgactcgggggctggccgggagctccttcagcgagccgtcggcggcgatgaccctgaccggtcccggatggtgtggctgctgcgagagggtgcatcggtgggtggaaaagcaggaaaccttggcgcccatggaatctttgcaggtgtgctgtgcgtggaagtgtgagactgagatttttctgtcgagttcgttggagctttggatgtt

SEQ ID NO: 60898 - protein, 207 aa, Triticum aestivum
  peptide (1)..(207): Ceres Seq. ID no. 13596721
MLESVSSLLDDAQSPLQPQPRPRGELPVALLRRTHRHRELPERPLVKLLVEHDVLAVFHLILVHRHDAQVLGLAAAPLRPLGGDRGTRPHGERGHVGARERPPQLRGREQEVYLSRPEELVGGQRRWGLVEVERVGVAHEEGGGLAGENVGDGDSGAGRELLQRAVGGDDPDRSRMVWLLREGASVGGKAGNLGAHGIFAGVLCVEV

SEQ ID NO: 60899 - DNA, 1151 bp, Triticum aestivum
  misc_feature (1)..(1151): Ceres Seq. ID no. 13598427
aacaaacaacatatgctttttgtctagatctgaatactttgtttacatcctttacatgctgttcttcctccaaagcgttggttatagggagaagtccaaaggaaaaaactactgtgattaggaggaccgcggaccgaggcgtagcatcacccagagagtcagtctaggtccacctccaaatgagccagtaatcacaactgcatatcacctttgttcatctcccacagacacaatgcacagacagcagggaagcttcagcactaagcacatcttatcaccttgaaaccgagggagctctagagctcactataatttcgccaaactgctcggaattcctctctgaacgtattcagacgtgctttcaaattaggtgttctgaagctggcatgaagtaccgttgtaagcagagcaatgagaagagcccatagaactgtgaggaggctgcatgaggtcaaccagagcatgcagctaactgccgaaaataaaaggacaaacaaccagcgaggccgcccacaaatatgaattgatctctttgagcttggtcgaccacgaataacaggggttatcggtggtctcatctttgcagctaaatgtggtgagaactgcctgacagttcttgtgactttctcattaaaagtgacagcaaaactgtcattaagaaaagcaatgctgaatccagtcataaaagctgcaagaatagcaactggcttccaaaggaaacccaacccaagaatgaacatgatcaagatgaaatagtttgtcctgtagtagtagaggttgcacttgaggcggctggtccacttggagtaggagcgggggacggtgaagcgggagaagaactccgggacggggcgcggcggcgtggaccagtccacctcccgcagcgcggccaccaggtcctccgccgtcaccgcgctccagtccatcgccgatccaatccgccccgatgcctcggctagcgggcgaaccgaaacctggcggtcggtcgggcgggcgggcgggtgagacgggcggcgggtctcggcggggacgggggctgttgggtcgtgcgggagagagtttcctcggcttcgcttcgatttggggattttgggaaggaagctttgccgtgtccggagaggaggaggagaggagaggtcagaggacagcag

SEQ ID NO: 60900 - protein, 68 aa, Triticum aestivum
  peptide (1)..(68): Ceres Seq. ID no. 13598428
MPRLAGEPKPGGRSGGRAGETGGGSRRGRGLLGRAGESFLGFASIWGFWEGSFAVSGEEEERRGQRTA

SEQ ID NO: 60901 - protein, 54 aa, Triticum aestivum
  peptide (1)..(54): Ceres Seq. ID no. 13598429
QTTYAFCLDLNTLFTSFTCCSSSKALVIGRSPKEKTTVIRRTADRGVASPRESV

SEQ ID NO: 60902 - protein, 39 aa, Triticum aestivum
  peptide (1)..(39): Ceres Seq. ID no. 13598430
TNNICFLSRSEYFVYILYMLFFLQSVGYREKSKGKNYCD

SEQ ID NO: 60903 - DNA, 780 bp, Triticum aestivum
  misc_feature (1)..(780): Ceres Seq. ID no. 13596994
gatttctctcccacttccaccaccaccgccatggccgccgccccccatatccgccgtgcggccgccactcctctccggcgagccgccgcctccgtctgcaccaggcctcttgcccaactctgccaccgcgcctcgtcccacaccactcgccgccccctctgtgacggggcgcctgcacagatcccacccaagatccggcgtgagatcaccagggtcgagttggccggcatttccttccaccgtgagctcgccaaggagcttaggcagctcagcatgagggttacccgaggccaaggtgcggcgagggtgaacacggcggacgccgccatgcaggtcggggtggtttcgtggcgtgtctgcgcagccgtggttgccgtgacggtggcagcggggctcgggctagcgcaggtcgccaaggaccgctgggaggccgattgccaattggccgcctgtaaccttgtcaccgcaaagctggacaaattgggcaaagatctggaggattgcttggtccggtgcatccagcagaagaaggcaacggcggacgcaaatgcgtttcttgaggagcagaggcacaaggaggtctttgcaagggaggcggagctcgccctttgggagtctgagataatcaagagagagtccaagtaaatgtgttcggttgcaggaaatattgtagtatgatagtagtgtgctgaatgtactagtaagtaagtattgtgacatctacagccgattgatttcgattctgctagcttgggcttcaagtttgtgcggagaccatcc

SEQ ID NO: 60904 - protein, 214 aa, Triticum aestivum
  peptide (1)..(214): Ceres Seq. ID no. 13596995
DFSPTSTTTAMAAAPHIRRAAATPLRRAAASVCTRPLAQLCHRASSHTTRRPLCDGAPAQIPPKIRREITRVELAGISFHRELAKELRQLSMRVTRGQGAARVNTADAAMQVGVVSWRVCAAVVAVTVAAGLGLAQVAKDRWEADCQLAACNLVTAKLDKLGKDLEDCLVRCIQQKKATADANAFLEEQRHKEVFAREAELALWESEIIKRESK

SEQ ID NO: 60905 - protein, 204 aa, Triticum aestivum
  peptide (1)..(204): Ceres Seq. ID no. 13596996
MAAAPHIRRAAATPLRRAAASVCTRPLAQLCHRASSHTTRRPLCDGAPAQIPPKIRREITRVELAGISFHRELAKELRQLSMRVTRGQGAARVNTADAAMQVGVVSWRVCAAVVAVTVAAGLGLAQVAKDRWEADCQLAACNLVTAKLDKLGKDLEDCLVRCIQQKKATADANAFLEEQRHKEVFAREAELALWESEIIKRESK

SEQ ID NO: 60906 - protein, 123 aa, Triticum aestivum
  peptide (1)..(123): Ceres Seq. ID no. 13596997
MRVTRGQGAARVNTADAAMQVGVVSWRVCAAVVAVTVAAGLGLAQVAKDRWEADCQLAACNLVTAKLDKLGKDLEDCLVRCIQQKKATADANAFLEEQRHKEVFAREAELALWESEIIKRESK

SEQ ID NO: 60907 - DNA, 1274 bp, Triticum aestivum
  misc_feature (1)..(1274): Ceres Seq. ID no. 13585458
gtagtaacaatatactttcgattaatatcaccgccttgaatgatatataaattataaaaggcaagagtgggcgggagagcgtatcttgtacgcctgcctcctccatttcccacacagccttttcccatttgccaatacacgactcatcacagccctagagacccagacccacacccagccaaacttttctcacctagaaagacgcaccgacaccacacacacccccaccacccgatacagtttacaacgactcaaggcaaacgaccgtacactcccaatgactgaccgactcacttgaccgtagcagctagccgcgtagtagcattaccagtactccgattggcaacggaatcatggtgggttcagctgtactgcacgaaggagcggtagaaggtgttgggcctccagttggccgggatgaccttgttggcgacgagcgtcttgccggactcgttgcggatgcggatggagaagggcgcctggaggcggtggttggagtcgaggcgccacacggagccccacgactccctcatcctcgtccacttgccgccgcccggcccccgcgactccatgaggtccacctgcaccacgtcgccgtcgccgtcctcgtactccaccagcaccgcgaagtagacggggttcgagtactcctccacgtggaacccgatcttcagccccgggaactcacacggcacccgtgtgaactcgatgtcgatgatgccggagtggcggagcctgtcgttgaggccgggcttggcgagcctgccgaacgccgtgccgctgaggtcgaagtggaagggcgccaccgggtagtagttcatgtcggtgatgatcaccgtctccgtcctgccggagcaggacatgtccttcctgcatctgatcttgtagcatgagccgcaccccttgccgtccttgaacaatggctggttgccgcaggaggtcatggacgcgaacgggtactggttggtgtgcttgaagccgcaggcaccgccgttgtcgtcggggccggcgccgttgggctggccgtaccaagtcgccctggccggggtccaggggccccagtacttggtggcgtcggtggcgttcaggtcgacgtcgaagggggaggggtcggtggtgttgaggtccacggcgccgccgacggcgaggaagcagagaagcgccgcgagcacggcgagggaggggagggggagggagcccatgccgcgcgctgtggcgtgtggatctgacgagtggcggtggggagtgagtgatggtgtgctcggttcctgtgt

SEQ ID NO: 60908 - protein, 179 aa, Triticum aestivum
  peptide (1)..(179): Ceres Seq. ID no. 13585459
MVGSAVLHEGAVEGVGPPVGRDDLVGDERLAGLVADADGEGRLEAVVGVEAPHGAPRLPHPRPLAAARPPRLHEVHLHHVAVAVLVLHQHREVDGVRVLLHVEPDLQPRELTRHPCELDVDDAGVAEPVVEAGLGEPAERRAAEVEVEGRHRVVVHVGDDHRLRPAGAGHVLPASDLVA

SEQ ID NO: 60909 - protein, 110 aa, Triticum aestivum
  peptide (1)..(110): Ceres Seq. ID no. 13585460
MDANGYWLVCLKPQAPPLSSGPAPLGWPYQVALAGVQGPQYLVASVAFRSTSKGEGSVVLRSTAPPTARKQRSAASTAREGRGREPMPRAVACGSDEWRWGVSDGVLGSC

SEQ ID NO: 60910 - DNA, 1336 bp, Triticum aestivum
  misc_feature (1)..(1336): Ceres Seq. ID no. 13656613
atattttagcccgtatgtcccatccatcccatcatgcgccgccacccactcaaatctctcgggatccattccccaacccaagaagcctctgaccccctcctggttttcagcgcagccgcacctgatcccctctcctccctccatggagtcgtcatagccggcgaacccagccaccaggatcggcctcctccctgtccttcctcctccttcccgaggtttcttctcctctaacctctctctccctcccgttcctctcgcaggagctcgccgccgctgccgtggatttggaggagcgccgccatcgagcttagtccgcggccaccgttgcccggatccagcaatggccgacctgtttcacacgtttctctgcccgccggacctccctgcgtgctgctcccgtcccaggccgccaagccacgccatggatgccaccaccaggaccttcgcctgtgctgccgccatggattggatttggccggagcggctcatccgcctcacctcccgtcctctgctaccttcctcgctcggatccgagccgtcccggagtcccctcgccggagtccttctccatgacgctaggctgcactgcctccgccttggtgcacctttcccctgccgcttcctgctcatggccgcctccaacctctccaacggcgcctcgacctcgccaccacgtcgttgctccggccaactccggcaagccgccggcgatctggccacccaggacgcccctgcctccttcctcgttgtcgctgagttcccctgcttcgtgcctctgctcgcaccgctgccagatcgagcgagcgaggagagcgctcacgttgacccttccccgattggaccaatgcagaccgacccagcgcgcctcctcccgtgccagatcgcagcccaaccggtccacctcaccatcgactgggccttggccttggttggatccggtaacgtcgcgtttgtgaggacccgttctactatgtccgtttgtcttcttcatgaactcgttcttcttccttgcgggatttcagcttgcaggtgccgacgataccatgcaggtgacgcaaccaagctcaaggaggagctctttgaagatcttgtcctttgtgttgtttcgttctagtcgatcagtaatggagcccagttggggtcgatcggggatctgtgtagcatttggggtagtcttcttttattttggctccgtagtcgggccttgattgtaactggttgatgtaatgctttattcatgtattgtgtgaagtggcgattgtaagccaactatgtatctctttcccttatgtattacatgggttgtgtgaagcacaataaagtgggaacgggaggg

SEQ ID NO: 60911 - protein, 257 aa, Triticum aestivum
  peptide (1)..(257): Ceres Seq. ID no. 15219836
MADLFHTFLCPPDLPACCSRPRPPSHAMDATTRTFACAAAMDWIWPERLIRLTSRPLLPSSLGSEPSRSPLAGVLLHDARLHCLRLGAPFPCRFLLMAASNLSNGASTSPPRRCSGQLRQAAGDLATQDAPASFLVVAEFPCFVPLLAPLPDRASEESAHVDPSPIGPMQTDPARLLPCQIAAQPVHLTIDWALALVGSGNVAFVRTRSTMSVCLLHELVLLPCGISACRCRRYHAGDATKLKEELFEDLVLCVVSF

SEQ ID NO: 60912 - protein, 230 aa, Triticum aestivum
  peptide (1)..(230): Ceres Seq. ID no. 15219837
MDATTRTFACAAAMDWIWPERLIRLTSRPLLPSSLGSEPSRSPLAGVLLHDARLHCLRLGAPFPCRFLLMAASNLSNGASTSPPRRCSGQLRQAAGDLATQDAPASFLVVAEFPCFVPLLAPLPDRASEESAHVDPSPIGPMQTDPARLLPCQIAAQPVHLTIDWALALVGSGNVAFVRTRSTMSVCLLHELVLLPCGISACRCRRYHAGDATKLKEELFEDLVLCVVSF

SEQ ID NO: 60913 - protein, 217 aa, Triticum aestivum
  peptide (1)..(217): Ceres Seq. ID no. 15219838
MDWIWPERLIRLTSRPLLPSSLGSEPSRSPLAGVLLHDARLHCLRLGAPFPCRFLLMAASNLSNGASTSPPRRCSGQLRQAAGDLATQDAPASFLVVAEFPCFVPLLAPLPDRASEESAHVDPSPIGPMQTDPARLLPCQIAAQPVHLTIDWALALVGSGNVAFVRTRSTMSVCLLHELVLLPCGISACRCRRYHAGDATKLKEELFEDLVLCVVSF

SEQ ID NO: 60914 - DNA, 248 bp, Triticum aestivum
  misc_feature (1)..(248): Ceres Seq. ID no. 13656401
aatccctttccccgtttcactgccactgcctccgcccgtctgacgactcctgacggccggacctgccggcggccggccagaggcgccgccgccgccgccgctgcaagcgcctccggaatgcctccagggaagagacacgggagcgcgccgccgccggtgcgcggcgcggaccgcatcggcgcgctgcccgaccccatcctgcagcacgtcctctccttcctcccggcgcaggcggccgkgcggacgtg

SEQ ID NO: 60915 - protein, 82 aa, Triticum aestivum
  peptide (1)..(82): Ceres Seq. ID no. 13656402
  misc_feature (80)..(80): Xaa is any aa, unknown or other
NPFPRFTATASARLTTPDGRTCRRPARGAAAAAAASASGMPPGKRHGSAPPPVRGADRIGALPDPILQHVLSFLPAQAAXRT

SEQ ID NO: 60916 - protein, 43 aa, Triticum aestivum
  peptide (1)..(43): Ceres Seq. ID no. 13656403
  misc_feature (41)..(41): Xaa is any aa, unknown or other
MPPGKRHGSAPPPVRGADRIGALPDPILQHVLSFLPAQAAXRT

SEQ ID NO: 60917 - DNA, 1487 bp, Triticum aestivum
  misc_feature (1)..(1487): Ceres Seq. ID no. 15175739
cctgtaaaatcttcaaggcgccatttatgcgtgcccccttctatttaatctttagtggacccacaaccggtatataatctttttggcagcatcgtccattcaggtttctcccaagattctggtcattactatgcatatgttaaggatgctactggtcgctggtactgttgtaatgattctcaggtctccctctcaagatctcaggacgttttgactgagaagttaaatcttccaacaccaatgggaatggcatatcaagtgccgcatgtagtgagcccctgaagataccattagtgaagcagaacggctcatgctctactaaaggtattgtgccactacccctaaagaatggcaagattgcaccaggtctacagttcaagccgatccacttgaagaatacaggaacagagaaggttgcatcaaatggcaaaccgcaccccgttttgagaaagccagaagttaatgaagccacagcactagtggaatcgaacggatgcggacccgcaaaatctgcagaacccagtgaagggtatgctaatggtagtatttcctgcgataagttggacgctgattcacaaagaatgttgcaaggcacagatggaaatggacatccagttcattttgttggcctccaagagaccagtggtgccaaggccacgtgtgctgaaaacccccctgaacagccatctagtgttgttacctcaacattggacaagagcatttgtagttcagaaaagggtcctaaaagctcagttttacaccctgaagtatctgctgactcagtcaaagcagtggtggcttcagccaaggacagtgcatgcttgaagcatcatcttgaagaaggaaagtttaaggaaatgcttgctgaatcagcatcttctgagcttcggtcgtctggttgggcggatgatgtatgtaattttatgcgttctgcaaagaggcagtgtatacagaacacaggcatgtctcaagatagtgaggcaatcaggaagcagctaataagtgattctggaagagtatttaggtccaaaattccagagttactgcgggaagatctgattcaatccctgagatcatacttcgaggataaattttgactggatgcttaagcttgtgtgggccttgtttaaaaggtgccagtggtctactaggaagctcatgcacggctggcttatttttgaggcgtttttgttccctgagatgagatgaggttgagaagtagagcgacgtgtaaagcttgcctcctttttgctgttgttccccatgctatactgtaggcttgaaaccccacaatcagcaccccctttcttctgtttctagcatgtagcagcatactgtttcttgttttcccccctttgtacaattataagtggtagacccctttgtacgattataactggtagattagctcatgaatttcttgggttttgacctgatctcaaaataaacctgttgatggttttaattatatatgatcggttacttac

SEQ ID NO: 60918 - protein, 171 aa, Triticum aestivum
  peptide (1)..(171): Ceres Seq. ID no. 15175740
MLQGTDGNGHPVHFVGLQETSGAKATCAENPPEQPSSVVTSTLDKSICSSEKGPKSSVLHPEVSADSVKAVVASAKDSACLKHHLEEGKFKEMLAESASSELRSSGWADDVCNFMRSAKRQCIQNTGMSQDSEAIRKQLISDSGRVFRSKIPELLREDLIQSLRSYFEDKF

SEQ ID NO: 60919 - protein, 97 aa, Triticum aestivum
  peptide (1)..(97): Ceres Seq. ID no. 15175741
MLMVVFPAISWTLIHKECCKAQMEMDIQFILLASKRPVVPRPRVLKTPLNSHLVLLPQHWTRAFVVQKRVLKAQFYTLKYLLTQSKQWWLQPRTVHA

SEQ ID NO: 60920 - protein, 95 aa, Triticum aestivum
  peptide (1)..(95): Ceres Seq. ID no. 15175742
MVVFPAISWTLIHKECCKAQMEMDIQFILLASKRPVVPRPRVLKTPLNSHLVLLPQHWTRAFVVQKRVLKAQFYTLKYLLTQSKQWWLQPRTVHA

SEQ ID NO: 60921 - DNA, 1393 bp, Triticum aestivum
  misc_feature (1)..(1393): Ceres Seq. ID no. 13661015
aaaaataggctcgtggcaaatctggtctaccagtcgccccctcacccacccaacccgcccacggagaaaaatcccccaggaagaagaaattccacgctgctgccattccgacgatgcgccgcgccgccgtcgccgtcaccgccgcgctcctcctcctcctcgtcgccggcgcagctgcgggctcccccggcgcggagcccacctgcccgcggggcgccggcccgccgttcctcgacgcgctcggatcgcggtgcccccgcggcgcccggatcgtgccctccccgcccctcgaggtcagaggagatgctgttgataaagaattgaaccttcgctgtaccggtgcctcatgctccattctcttctatgccgcatggtgtcctttctcgagcaaatttcgaccaatatttgaagctctcagcaccatgttccctcagatacatcactttgctgtcgaagaatcttctgcgacgcctagtttgttttcaagatatggtgtccgtggcttcccagccattcttctggcaagtgagactacaatggttcgttacaggggcacaaaagatctgaagtctctggttcagttctatcaagagactacaggcctcgacccaattacatatattgatgttgatcagcaagagagcactggaagtttaggatcagccatgccaggaggccgctctctgcgcaaaatggcgaaagacgagccctttctgtttcttggagccctttttataatcatgaagatcgcggcacacttcgtccccactgtcatctcccaactgagagccttcttgattgtgcgtgttcagaacttgaacttaagaatctgtaggggatcaagccaacttatggaacgggcattgactgtgcttgatgttcagaggctctggagcaagcttagactgagcagtaagacaagggacctaagtaaaggggcgagtaatgctcgagcttgggcttcgtcgtttgcgtccgtctcactgggtgaaccatcctccttacggcatgcctagcctcttcctcatgatgctggtcgatagtctagctgctgatatatggcccaaaattgtttggtcttgcttccccatcctgctatgtacgtgcatccgcgcatgtggggacccaggaatgtaaattttcaggatctcatcttgttgtatataggaacgcgttttcgctttgctgacgcgatagctgatctctgacctttgtttcagttaactctttgatgtatggtgaagatctgagtatttcttcgatctctttcggttgctgttagaatttggctttgctatgtcgcccttgcctgcgccagcttaaatcctgggccgccgactcctgctctgaattgtaaaactgtcttgatttttattcacaccatgctgtttgg

SEQ ID NO: 60922 - protein, 300 aa, Triticum aestivum
  peptide (1)..(300): Ceres Seq. ID no. 13661016
MRRAAVAVTAALLLLLVAGAAAGSPGAEPTCPRGAGPPFLDALGSRCPRGARIVPSPPLEVRGDAVDKELNLRCTGASCSILFYAAWCPFSSKFRPIFEALSTMFPQIHHFAVEESSATPSLFSRYGVRGFPAILLASETTMVRYRGTKDLKSLVQFYQETTGLDPITYIDVDQQESTGSLGSAMPGGRSLRKMAKDEPFLFLGALFIIMKIAAHFVPTVISQLRAFLIVRVQNLNLRICRGSSQLMERALTVLDVQRLWSKLRLSSKTRDLSKGASNARAWASSFASVSLGEPSSLRHA

SEQ ID NO: 60923 - protein, 197 aa, Triticum aestivum
  peptide (1)..(197): Ceres Seq. ID no. 13661017
MFPQIHHFAVEESSATPSLFSRYGVRGFPAILLASETTMVRYRGTKDLKSLVQFYQETTGLDPITYIDVDQQESTGSLGSAMPGGRSLRKMAKDEPFLFLGALFIIMKIAAHFVPTVISQLRAFLIVRVQNLNLRICRGSSQLMERALTVLDVQRLWSKLRLSSKTRDLSKGASNARAWASSFASVSLGEPSSLRHA

SEQ ID NO: 60924 - protein, 159 aa, Triticum aestivum
  peptide (1)..(159): Ceres Seq. ID no. 13661018
MVRYRGTKDLKSLVQFYQETTGLDPITYIDVDQQESTGSLGSAMPGGRSLRKMAKDEPFLFLGALFIIMKIAAHFVPTVISQLRAFLIVRVQNLNLRICRGSSQLMERALTVLDVQRLWSKLRLSSKTRDLSKGASNARAWASSFASVSLGEPSSLRHA

SEQ ID NO: 60925 - DNA, 1535 bp, Triticum aestivum
  misc_feature (1)..(1535): Ceres Seq. ID no. 12781104
tagtttctttataaaatactgctactccctctgatccatattagttgtcactcaaatggatgtatctagcactaaaatacatctagatacatccgtttcagctacaactaatatggatcggagggagtagtatatttttggtttacctgttttgctagaaatgttgcctcagatcgaatgaacttaaatatgagcaatatatgtgcacctatttctatcatatggtcttattaactttatctagtaaactagggcgtggtccttaagaagtcctttacttgttctattctaatttttgtttttccctgctaagcaggaagttctcttctgaacttcggatttagcttgtggatgggcggacctttggtagactgcagtgctgaaggtgtgagcagcagctcatgtctcagccgcagcacctgtggaaaagcaggttttgagcacagctcttgtgctctccctgaagatgaaaagtttgaagctggaatagcatgtgtgaaagatgatttggttgtcaaggaaatcagtttggctcttgctgaggtgatgcgtgtctataatgacaatgatgatgaagagacagatctgagtgaagactctgacgaaaatggggattcactttctgtagaatcagattcggctgatgatttggttgatattgacactgaagtggtcacatcgtcagccttcactgctgggaatgcgtctgaatcatcaactggaaattcagagaatggaaattcctcaaccactgggactcaactgttggtttccgcaatgaaaggaagccgtgcaaagcggggaattgtgacaaagttgagtgtttcatgggcccctgacgtatatgatcctcctgttacttctgactcacacacagtgaagccgcaccagagaagttcaaggaagagccactacaaatacaagcccccaaagggcggcagcggcagcagcagccgcagcagcagtggcagcataaaggaaaagaagcattctcaccacagcagcagcagcagcagcaagagagataagaaaccttcctaccgcagtagcaatggcggcagcagcagaaccgacactagtgatcctcaacatcggaaggcatatggcagcagcattaccagcagaactgacactagtgttcctgaatatcacaagttatcgccgtggcagccactggctagtgccgccgtggaagaagctatgccccccgtacctgtactgaaggccatggaacagatcaaacgcagttccagctgctgcaaggagccgccgataagcatgaaggccatggaacagatcaagcgtagctccagctgctgcaaggagccgccgataagcatgctatcacgccaattcgtggctgccaagtacaaagggatgttttccttcttgagtcagaaccaacttgcttcttgagcatatcgcggagactcctgcgctattcactgccgtgcttttggttatcagcaaggctttcatgttggatggtgtttgatctatgaacttttgtttggacatcagtgggcatggtttcg

SEQ ID NO: 60926 - protein, 354 aa, Triticum aestivum
  peptide (1)..(354): Ceres Seq. ID no. 12781105
MGGPLVDCSAEGVSSSSCLSRSTCGKAGFEHSSCALPEDEKFEAGIACVKDDLVVKEISLALAEVMRVYNDNDDEETDLSEDSDENGDSLSVESDSADDLVDIDTEVVTSSAFTAGNASESSTGNSENGNSSTTGTQLLVSAMKGSRAKRGIVTKLSVSWAPDVYDPPVTSDSHTVKPHQRSSRKSHYKYKPPKGGSGSSSRSSSGSIKEKKHSHHSSSSSSKRDKKPSYRSSNGGSSRTDTSDPQHRKAYGSSITSRTDTSVPEYHKLSPWQPLASAAVEEAMPPVPVLKAMEQIKRSSSCCKEPPISMKAMEQIKRSSSCCKEPPISMLSRQFVAAKYKGMFSFLSQNQLAS

SEQ ID NO: 60927 - protein, 289 aa, Triticum aestivum
  peptide (1)..(289): Ceres Seq. ID no. 12781106
MRVYNDNDDEETDLSEDSDENGDSLSVESDSADDLVDIDTEVVTSSAFTAGNASESSTGNSENGNSSTTGTQLLVSAMKGSRAKRGIVTKLSVSWAPDVYDPPVTSDSHTVKPHQRSSRKSHYKYKPPKGGSGSSSRSSSGSIKEKKHSHHSSSSSSKRDKKPSYRSSNGGSSRTDTSDPQHRKAYGSSITSRTDTSVPEYHKLSPWQPLASAAVEEAMPPVPVLKAMEQIKRSSSCCKEPPISMKAMEQIKRSSSCCKEPPISMLSRQFVAAKYKGMFSFLSQNQLAS

SEQ ID NO: 60928 - protein, 212 aa, Triticum aestivum
  peptide (1)..(212): Ceres Seq. ID no. 12781107
MKGSRAKRGIVTKLSVSWAPDVYDPPVTSDSHTVKPHQRSSRKSHYKYKPPKGGSGSSSRSSSGSIKEKKHSHHSSSSSSKRDKKPSYRSSNGGSSRTDTSDPQHRKAYGSSITSRTDTSVPEYHKLSPWQPLASAAVEEAMPPVPVLKAMEQIKRSSSCCKEPPISMKAMEQIKRSSSCCKEPPISMLSRQFVAAKYKGMFSFLSQNQLAS

SEQ ID NO: 60929 - DNA, 382 bp, Triticum aestivum
  misc_feature (1)..(382): Ceres Seq. ID no. 13662823
tcttcgtttcgtgctttcctctccttcttcctagcgcgcgcagacttgtccgccacttcacggaaattcccccaggaatacttctacatatatatacgccgcccgcctccattccggtgttcctagtttccactcatccgccgccgcacccgaatccccgccccacgaagcttcgtcgcgcaaggtgatgcttttagcaacaacaggcatcaaacaatgtcgatgagttacgatgggtctcaaagtgaggatcggcaaagtgaggaggttcagtcagcatacaaaaagttcagtgcaggggatgaggacgtggtaaggggttttgtaaatttggatgaaaccgaagagcaaaatgaagaaaatgagtggagttgggtgcccc

SEQ ID NO: 60930 - protein, 61 aa, Triticum aestivum
  peptide (1)..(61): Ceres Seq. ID no. 13662824
FVSCFPLLLPSARRLVRHFTEIPPGILLHIYTPPASIPVFLVSTHPPPHPNPRPTKLRRAR

SEQ ID NO: 60931 - protein, 55 aa, Triticum aestivum
  peptide (1)..(55): Ceres Seq. ID no. 13662825
MSMSYDGSQSEDRQSEEVQSAYKKFSAGDEDVVRGFVNLDETEEQNEENEWSWVP

SEQ ID NO: 60932 - protein, 53 aa, Triticum aestivum
  peptide (1)..(53): Ceres Seq. ID no. 13662826
MSYDGSQSEDRQSEEVQSAYKKFSAGDEDVVRGFVNLDETEEQNEENEWSWVP

SEQ ID NO: 60933 - DNA, 983 bp, Triticum aestivum
  misc_feature (1)..(983): Ceres Seq. ID no. 12623128
aatgcctcacaaaatagaaattcaaattccagcaacatagacagcatcaacattagagggcgggtgcagcagcaggagttgagggttctcttctccgaaggcgccgaagttcttcagcttggcaagtaagtgataatcaatggcttataagcttccactggcaggagttaggacttccaatttcgagcgtagagagcttccatcaaacagctacctggatctgggagggccttatggaaaatttgtgcctttcgtaatcgcgggagaagggggctttggggagcataagcagctcaactggacaaacttgtttttactaaacaagcttggcagtgacatacacagcgatcatgtagaggtgatcaatcagatcaaagtagagagagatgttgaaaaggtaaaagagttgataaggctactgcctcgtgaaatttctgagcaattggaaggccacgagacccatgagcaggttgaaatcctgagatatctgagcaggaacatggatcagaggatgtcctatctcagcacagagatccggcgtctaaggagtgacctgggagaggtgatgaaggtatcggagagatacgcggagcattggataggatggagcgacaaaatccttgctaccgtccatgaacaaacgcaacaaaccctggagttagtgctcctagctgctacgtatttgcatttcatacttttctatattgtactgtaatgaataaaattatgcgctgctagcagcgtataatgttgtacgagtcttggtcggccgagttattgtagcaacaggtgcatgtctgtccgcagtttgttgatcttgtcaagtgtttgtaatgaataaaattatgtgcttcttgctacacgtcatgttgtccgagtcctcgtcgatcgagatattgtaggaaactggtacgtgtctgtctgaaattacctgtaacgtgtcatttatgtaaagtgtttgcattgaagagttatggatattt

SEQ ID NO: 60934 - protein, 191 aa, Triticum aestivum
  peptide (1)..(191): Ceres Seq. ID no. 12623129
MAYKLPLAGVRTSNFERRELPSNSYLDLGGPYGKFVPFVIAGEGGFGEHKQLNWTNLFLLNKLGSDIHSDHVEVINQIKVERDVEKVKELIRLLPREISEQLEGHETHEQVEILRYLSRNMDQRMSYLSTEIRRLRSDLGEVMKVSERYAEHWIGWSDKILATVHEQTQQTLELVLLAATYLHFILFYIVL

SEQ ID NO: 60935 - DNA, 815 bp, Triticum aestivum
  misc_feature (1)..(815): Ceres Seq. ID no. 13663373
aatcgaaaaaaaattcgaaccccccaaaccgctcgcgaaatccccaaatcaacgcctcctcacggcaatcaatcaagcaatcatccattcacgacgcgagcggggatcctcctccactccgatggcgtcggaggccaggtccgggggcgcgcggcgggtcccgctgcagccgcgggacggcaacgcggccgcctccccgtccttgggcggcggcggtgccgccaaatcgaaggcgaaggcgaaggcgcgggcggctgctgcgtcgccgccgtcggtgaggtcgtatgcgagccgggacgaggccgagaggagggcggcagcggcggtggtgagggagaaggaggtgtcgctggcggaggagctggagaaggcgcgggagcggcggggccgcctgcgggccgcgcggcaggtcacggagagggcgctggcggaggccgacgaggcgctgcggcgggagatgcgggagtgggagcgccgcgcggacgagcagcgccgggtcgtcgcggagctgatgcgcctcatcgggatgcccgaggtgtacgttccggtggaatcgctgagatccagggaggagaggaagaggaaacaggggacttcgtcttcagatcctccgggtccggtcacagtggcttcaacattactagaggaagaatctggaccatgcctctccgatcaggaactgctggcgacgccggcaagggaaacgaccgccgccgcagcagcgacggaaagcagcagcgcttgatccctttctttgcctgttccaaactgtttctgcacaaggcctcccaatgaaatcaaatggcttgtttggc

SEQ ID NO: 60936 - protein, 264 aa, Triticum aestivum
  peptide (1)..(264): Ceres Seq. ID no. 13663374
NRKKIRTPQTAREIPKSTPPHGNQSSNHPFTTRAGILLHSDGVGGQVRGRAAGPAAAAGRQRGRLPVLGRRRCRQIEGEGEGAGGCCVAAVGEVVCEPGRGREEGGSGGGEGEGGVAGGGAGEGAGAAGPPAGRAAGHGEGAGGGRRGAAAGDAGVGAPRGRAAPGRRGADAPHRDARGVRSGGIAEIQGGEEEETGDFVFRSSGSGHSGFNITRGRIWTMPLRSGTAGDAGKGNDRRRSSDGKQQRLIPFFACSKLFLHKASQ

SEQ ID NO: 60937 - protein, 247 aa, Triticum aestivum
  peptide (1)..(247): Ceres Seq. ID no. 13663375
IEKKFEPPKPLAKSPNQRLLTAINQAIIHSRRERGSSSTPMASEARSGGARRVPLQPRDGNAAASPSLGGGGAAKSKAKAKARAAAASPPSVRSYASRDEAERRAAAAVVREKEVSLAEELEKARERRGRLRAARQVTERALAEADEALRREMREWERRADEQRRVVAELMRLIGMPEVYVPVESLRSREERKRKQGTSSSDPPGPVTVASTLLEEESGPCLSDQELLATPARETTAAAAATESSSA

SEQ ID NO: 60938 - protein, 207 aa, Triticum aestivum
  peptide (1)..(207): Ceres Seq. ID no. 13663376
MASEARSGGARRVPLQPRDGNAAASPSLGGGGAAKSKAKAKARAAAASPPSVRSYASRDEAERRAAAAVVREKEVSLAEELEKARERRGRLRAARQVTERALAEADEALRREMREWERRADEQRRVVAELMRLIGMPEVYVPVESLRSREERKRKQGTSSSDPPGPVTVASTLLEEESGPCLSDQELLATPARETTAAAAATESSSA

SEQ ID NO: 60939 - DNA, 1259 bp, Triticum aestivum
  misc_feature (1)..(1259): Ceres Seq. ID no. 15169515
aaaaaaaagcagaagccatccccgttccccattccctcgccgccgccggccgccgccaaatctccccggcctttccgccgcggcgccatgctcctccggctccggtgctacatcctcacccagctcctatcgtctccctccgcctctcccgcctcccagctgcaccgcctcttctccgccgcagcgcccggcgcctccccgaaccctagcttcgccgtggaggagtacctcgtcgccacctgcggcctcacccgaccccaggccctcaaggcctccgccaagctctcccacctcaggtcccccgccaatcccgaagccgtgctcgccttcctcgccggcctcggtctctccgacgccgatgtcgccgccctcgtcgccagggacccgcagttcctctgcgccagcgtggagagaaccctgacgcccgtagccgcagggctctctggtctcggcttatcgcgttccgacatcgcgcgcctcgcatcgctcgccgcccacaaattccgccaaaaatctgtcctctccaagctgcagtactacctgcgcctcttcggcacctcccacaacttcctccgggtgatgaagttctccaatatcctctcacacagcatcgagagggtggtcaagcccaatgtcgcgtacctgcgagagtgtgggttgcaggattgtgatatcgccaagttttgcatccaaagaccgaggatgatcatcagcaacccggagcatgttcaggcaatggtggcgtgcgctgaaaacattggtgtgccccgtgcctctgggatgttcaggcacgcacttcaggctgttgcattcctcggtgaggaggagatcacagtcagggtggggtacttgaagagcacgttcaggtggacggatgctgaggtaggcatggctgtttctaagtttccaccgttgctgagggggtccgagaaatcgctgcagcgcagatttgagttcctcatctccgaggtgggtttggaatcggcgtacattgctcagcgacccgtaatgctaggtctcagcctagagggccggctcaggccccggcactacgctgtaaagtttatcaaggaaaatggattgctcaagtgtgacccaagctactatactgttttcaaggagtccgacatgacattcaagaagaagttcatacaccctcataaggaagctgcaccgcaccttgaaaaagactacgatgctgcttgtaaaggggaagtgcccactaatttcagattcacataagccaataacgggctctg

SEQ ID NO: 60940 - protein, 413 aa, Triticum aestivum
  peptide (1)..(413): Ceres Seq. ID no. 15169516
KKKQKPSPFPIPSPPPAAAKSPRPFRRGAMLLRLRCYILTQLLSSPSASPASQLHRLFSAAAPGASPNPSFAVEEYLVATCGLTRPQALKASAKLSHLRSPANPEAVLAFLAGLGLSDADVAALVARDPQFLCASVERTLTPVAAGLSGLGLSRSDIARLASLAAHKFRQKSVLSKLQYYLRLFGTSHNFLRVMKFSNILSHSIERVVKPNVAYLRECGLQDCDIAKFCIQRPRMIISNPEHVQAMVACAENIGVPRASGMFRHALQAVAFLGEEEITVRVGYLKSTFRWTDAEVGMAVSKFPPLLRGSEKSLQRRFEFLISEVGLESAYIAQRPVMLGLSLEGRLRPRHYAVKFIKENGLLKCDPSYYTVFKESDMTFKKKFIHPHKEAAPHLEKDYDAACKGEVPTNFRFT

SEQ ID NO: 60941 - protein, 384 aa, Triticum aestivum
  peptide (1)..(384): Ceres Seq. ID no. 15169517
MLLRLRCYILTQLLSSPSASPASQLHRLFSAAAPGASPNPSFAVEEYLVATCGLTRPQALKASAKLSHLRSPANPEAVLAFLAGLGLSDADVAALVARDPQFLCASVERTLTPVAAGLSGLGLSRSDIARLASLAAHKFRQKSVLSKLQYYLRLFGTSHNFLRVMKFSNILSHSIERVVKPNVAYLRECGLQDCDIAKFCIQRPRMIISNPEHVQAMVACAENIGVPRASGMFRHALQAVAFLGEEEITVRVGYLKSTFRWTDAEVGMAVSKFPPLLRGSEKSLQRRFEFLISEVGLESAYIAQRPVMLGLSLEGRLRPRHYAVKFIKENGLLKCDPSYYTVFKESDMTFKKKFIHPHKEAAPHLEKDYDAACKGEVPTNFRFT

SEQ ID NO: 60942 - protein, 220 aa, Triticum aestivum
  peptide (1)..(220): Ceres Seq. ID no. 15169518
MKFSNILSHSIERVVKPNVAYLRECGLQDCDIAKFCIQRPRMIISNPEHVQAMVACAENIGVPRASGMFRHALQAVAFLGEEEITVRVGYLKSTFRWTDAEVGMAVSKFPPLLRGSEKSLQRRFEFLISEVGLESAYIAQRPVMLGLSLEGRLRPRHYAVKFIKENGLLKCDPSYYTVFKESDMTFKKKFIHPHKEAAPHLEKDYDAACKGEVPTNFRFT

SEQ ID NO: 60943 - DNA, 740 bp, Triticum aestivum
  misc_feature (1)..(740): Ceres Seq. ID no. 13664150
agagatgcagtattgcagttgagtgattgacctttctccgaggagcagtgaggactggttcgttctacttggcaacttgcgtcttggatcatctgcccagttgtgtacagcctttgctttaaactctactctcagcgaagatcagtttgcgcgtctgcatggcgcgaatggcggtctccgtgctcttcctcatcgccggcgtcgtgctcatgctcgcgctgcacgtcctcgtcatcgtctgggcggtccggcggggcgccgtgctgcggctgcggggtgcggcgcgggagcgggaccaggagcagggggaagcgacgggtctgacggccgacgagctgggcgagctgccgttccaggacttcaaggccgccgccgcggtcgggacgggcgccgccgagtgcgcggtgtgcctggaggcgttccaggggggcgaccggtgccgcgtgctgccggggtgccaccatgggttccacgcgcagtgcgtggactcgtggctgcgccagagccgccggtgcccggtgtgccgcgccgaggtggcctgccgcggcaaggcggccggcgcggcggttgtcgatgaggccgccacatcggagatcgtcgctgaaagactgggaggtgcagatcgctagcggattttgtttgaccgagactcgtgtgccgtcgttgattagcttgtgattttttttagtacgattagcttgtgattgtacataaagtaatccatctagcatttggagtcg

SEQ ID NO: 60944 - protein, 156 aa, Triticum aestivum
  peptide (1)..(156): Ceres Seq. ID no. 13664151
MARMAVSVLFLIAGVVLMLALHVLVIVWAVRRGAVLRLRGAARERDQEQGEATGLTADELGELPFQDFKAAAAVGTGAAECAVCLEAFQGGDRCRVLPGCHHGFHAQCVDSWLRQSRRCPVCRAEVACRGKAAGAAVVDEAATSEIVAERLGGADR

SEQ ID NO: 60945 - protein, 153 aa, Triticum aestivum
  peptide (1)..(153): Ceres Seq. ID no. 13664152
MAVSVLFLIAGVVLMLALHVLVIVWAVRRGAVLRLRGAARERDQEQGEATGLTADELGELPFQDFKAAAAVGTGAAECAVCLEAFQGGDRCRVLPGCHHGFHAQCVDSWLRQSRRCPVCRAEVACRGKAAGAAVVDEAATSEIVAERLGGADR

SEQ ID NO: 60946 - protein, 139 aa, Triticum aestivum
  peptide (1)..(139): Ceres Seq. ID no. 13664153
MLALHVLVIVWAVRRGAVLRLRGAARERDQEQGEATGLTADELGELPFQDFKAAAAVGTGAAECAVCLEAFQGGDRCRVLPGCHHGFHAQCVDSWLRQSRRCPVCRAEVACRGKAAGAAVVDEAATSEIVAERLGGADR

SEQ ID NO: 60947 - DNA, 914 bp, Triticum aestivum
  misc_feature (1)..(914): Ceres Seq. ID no. 13661065
cctcaattattgctaagcgtctccccatccgcccctcatctcctccccatccgcccccatctcccttcctccacccctccacggcggctctccattggtaatggcgatggcggcgtcgtggtgggcgctgctggcggcggcggcggttgtggcggcggcggggtgcggcgaggcggcgcccacggcggcggcggaggcggcgcacgacgtgctgcagacccacggcctcccgcgcgggctgctccctgcggggatcgcggcgttctcgcacgacccggccaccggccggttcgaggcggtcctggagtccccctgcacgtcgcgcaccgaggtcggcctgcggtacaacatcaccgtggcggggcagatcagctatggccggatcgccgagctctccggggtggacgctcaggacctatttctctggttcgccgtgcgcagcatccgcgtggacgtgccctcctccggcgtcatctacttcgatgtgggcgtggtctacaagcacttcccgctgtcgttcttcgaggcgccgccgccgtgcgtgcccaccccgctcatcctcctgcaaccacatcagattaggggcgacggatcggtggtggaagacggcgccgcgttgcaacaatgatgggacggattccatgatttcatcgtggagacgcaaaccagaaatcgcagttttgagaggtgatcggccggccggcgggcggacggccggctagtgtgcagatagatagacgtggtcattcattgtgtttgctactcgtcacctcatcactctgttcctgtcgtcgttcttgtcctctgcggccaaagtcaatcggcggccggcgggagctgcctgcgtgtactcctccggcgtccggccgactgtcatatttttcacggtaatggatgatgtgtagtgtatatgc

SEQ ID NO: 60948 - protein, 193 aa, Triticum aestivum
  peptide (1)..(193): Ceres Seq. ID no. 13661066
PQLLLSVSPSAPHLLPIRPHLPSSTPPRRLSIGNGDGGVVVGAAGGGGGCGGGGVRRGGAHGGGGGGARRAADPRPPARAAPCGDRGVLARPGHRPVRGGPGVPLHVAHRGRPAVQHHRGGADQLWPDRRALRGGRSGPISLVRRAQHPRGRALLRRHLLRCGRGLQALPAVVLRGAAAVRAHPAHPPATTSD

SEQ ID NO: 60949 - protein, 175 aa, Triticum aestivum
  peptide (1)..(175): Ceres Seq. ID no. 13661067
MAMAASWWALLAAAAVVAAAGCGEAAPTAAAEAAHDVLQTHGLPRGLLPAGIAAFSHDPATGRFEAVLESPCTSRTEVGLRYNITVAGQISYGRIAELSGVDAQDLFLWFAVRSIRVDVPSSGVIYFDVGVVYKHFPLSFFEAPPPCVPTPLILLQPHQIRGDGSVVEDGAALQQ

SEQ ID NO: 60950 - protein, 173 aa, Triticum aestivum
  peptide (1)..(173): Ceres Seq. ID no. 13661068
MAASWWALLAAAAVVAAAGCGEAAPTAAAEAAHDVLQTHGLPRGLLPAGIAAFSHDPATGRFEAVLESPCTSRTEVGLRYNITVAGQISYGRIAELSGVDAQDLFLWFAVRSIRVDVPSSGVIYFDVGVVYKHFPLSFFEAPPPCVPTPLILLQPHQIRGDGSVVEDGAALQQ

SEQ ID NO: 60951 - DNA, 683 bp, Triticum aestivum
  misc_feature (1)..(683): Ceres Seq. ID no. 12623467
ctttgatggatgtttcttgaaaagaagagcagccaagtaaaatttggaaatgtttttgtccttcttcttcaaaattccaggttgtgaaagcaattgagaaggcaatacccataccgcgaggaccatctattgctgagaatcaccctgcaagggaggagctgaaggccatggagtcccagaaggtagacatcgaccgcatggcgacgctccaggtgcggcgggagctgtggggagggctggctgccctagccctccaaacggccggcttcatgaggctcacattctgggagctctcctgggacgtcatggagcccatctgcttcttcgtgacgtcgacatacttcatggcgggctacgccttcttcctccggaccaagagggagccctcgttcgagggcttcttccagagccgttttgcggtgaagcagaagcgccttatgcaggcccgggaatttgatgtccgccggtacagtgagctccggcaagcctgtggcctcccggcgctacatcctcagagcccctgtgcgtcctcgcaggagaaccaccattgccattgtcattgatgtgttgcttggaattttttatgcccatttgatgcggctgctgctgctgcttcatgtaccgttgtggaatgtggatgcgaagcatactcattgacgtgatcagattcagattttaaactc

SEQ ID NO: 60952 - protein, 131 aa, Triticum aestivum
  peptide (1)..(131): Ceres Seq. ID no. 12623468
MESQKVDIDRMATLQVRRELWGGLAALALQTAGFMRLTFWELSWDVMEPICFFVTSTYFMAGYAFFLRTKREPSFEGFFQSRFAVKQKRLMQAREFDVRRYSELRQACGLPALHPQSPCASSQENHHCHCH

SEQ ID NO: 60953 - protein, 121 aa, Triticum aestivum
  peptide (1)..(121): Ceres Seq. ID no. 12623469
MATLQVRRELWGGLAALALQTAGFMRLTFWELSWDVMEPICFFVTSTYFMAGYAFFLRTKREPSFEGFFQSRFAVKQKRLMQAREFDVRRYSELRQACGLPALHPQSPCASSQENHHCHCH

SEQ ID NO: 60954 - protein, 97 aa, Triticum aestivum
  peptide (1)..(97): Ceres Seq. ID no. 12623470
MRLTFWELSWDVMEPICFFVTSTYFMAGYAFFLRTKREPSFEGFFQSRFAVKQKRLMQAREFDVRRYSELRQACGLPALHPQSPCASSQENHHCHCH

SEQ ID NO: 60955 - DNA, 1976 bp, Triticum aestivum
  misc_feature (1)..(1976): Ceres Seq. ID no. 14301866
ctctctccacaccacaagccgccgccgaccgctcgctgggaggggaatagaaatcgtgtatcgtagggttgcgcaaaccgccgccaagaggggagccaagtccagcgccgctgcctcgtcctcgtcggcgtcgtcggcggccgataaggccgccaatggcatagcggcccttaacttatccgatcggacatgtaccggggtcctggcttcgcatccgctctcccgtgatatccacattgagtccctttcattaacatttcatggacatgaccttattgtggattcagaattggagcttaactacgggaggcggtatggtttgctcggcttaaatggttgtgggaaatctacccttctcaccgcaataggctgcagggaactccccattcctgaacacatggacatacatcatcttacgcgtgagattgaggcttctgacatgtctgcgctgcaagctgttatctgttgtgatgaagaaagagtgaagttggaaaaggaagctgaaattctggctgcacaggatgatggtggcggtgaagctttggatcttgtatatgagcggttagaagcaatggatgcatcaactgctgaaaagcgtgctgctgagatattgtttggtctaggttttgacaagcaaatgcaagcaaagccaacacgagatttttctgggggttggcgtatgaggattgcattggcaagggcgctgttcatgaacccgaccatccttttgcttgatgagccaaccaaccatcttgatctcgaggcttgtgtctggctggaagagaaattaaagaattttgagcgtatacttgttgttatctcgcattcccaagattttctaaatggagtgtgcactaacatcatccacatgcagaacaagaccctcaagttatatactggaaattatgaccagtatgttcaaactcgctctgagcttgaagagaatcaaatgaagcagtacaaatgggaacaggaacagatagctaatatgaaggagtacattgcccgatttggtcatggatctgcgaagcttgctcgtcaggctcagagcaaagagaagactcttgcaaagatggagcgtggtggtcttgctgagaaggttgtcaatgacaggattcttgttttccgctttacagatgttggcaaactcccaccaccagtgctgcagtttgctgatgtgacatttggttacactccggataatctcatctacaagaaccttgacttcggtgttgaccttgactcgagagttgcactggtcggtcccaatggggcaggtaagagcacacttctgaagctcatgacaggtgacctatctccgttggatggcatggtcagacgccacaaccacctacgcattgcacaattccatcaacatctcactgagaagctggacctggacatgccggccctgcagtacatgatgagggagtaccctgggaatgaagaggagaagatgagagctgcgattggcaagtttggcctgtcaggaaaggcacaggtgatgccaatgaaaaacctgtctgatgggcagaaggcccgtgtcatttttgcttggctagcatttaggcagccacagatgctgttgcttgatgagccgacaaatcatcttgacattgagaccattgactcacttgctgaggcactgaaggaatgggacggggggttggtcctggtgagccatgacttcaggctgatcaatcaggttgctcaagagatctgggtctgtgagaaccaggcggtgactaggtgggaaggcgatatcatggatttcaagcaacacttgaagaaaagggctggtctctagatttcctgtcttttccttctcggctctttggagatctagacaacccaaagtttttgcctgtatcagaaaagtttccatcatttagcgtgacaagtatgagtattattgtatcacttaaaacatatcttctccacactattttataaccagacgatccgtgtttaattcc

SEQ ID NO: 60956 - protein, 601 aa, Triticum aestivum
  peptide (1)..(601): Ceres Seq. ID no. 14301867
SLHTTSRRRPLAGRGIEIVYRRVAQTAAKRGAKSSAAASSSSASSAADKAANGIAALNLSDRTCTGVLASHPLSRDIHIESLSLTFHGHDLIVDSELELNYGRRYGLLGLNGCGKSTLLTAIGCRELPIPEHMDIHHLTREIEASDMSALQAVICCDEERVKLEKEAEILAAQDDGGGEALDLVYERLEAMDASTAEKRAAEILFGLGFDKQMQAKPTRDFSGGWRMRIALARALFMNPTILLLDEPTNHLDLEACVWLEEKLKNFERILVVISHSQDFLNGVCTNIIHMQNKTLKLYTGNYDQYVQTRSELEENQMKQYKWEQEQIANMKEYIARFGHGSAKLARQAQSKEKTLAKMERGGLAEKVVNDRILVFRFTDVGKLPPPVLQFADVTFGYTPDNLIYKNLDFGVDLDSRVALVGPNGAGKSTLLKLMTGDLSPLDGMVRRHNHLRIAQFHQHLTEKLDLDMPALQYMMREYPGNEEEKMRAAIGKFGLSGKAQVMPMKNLSDGQKARVIFAWLAFRQPQMLLLDEPTNHLDIETIDSLAEALKEWDGGLVLVSHDFRLINQVAQEIWVCENQAVTRWEGDIMDFKQHLKKRAGL

SEQ ID NO: 60957 - protein, 469 aa, Triticum aestivum
  peptide (1)..(469): Ceres Seq. ID no. 14301868
MDIHHLTREIEASDMSALQAVICCDEERVKLEKEAEILAAQDDGGGEALDLVYERLEAMDASTAEKRAAEILFGLGFDKQMQAKPTRDFSGGWRMRIALARALFMNPTILLLDEPTNHLDLEACVWLEEKLKNFERILVVISHSQDFLNGVCTNIIHMQNKTLKLYTGNYDQYVQTRSELEENQMKQYKWEQEQIANMKEYIARFGHGSAKLARQAQSKEKTLAKMERGGLAEKVVNDRILVFRFTDVGKLPPPVLQFADVTFGYTPDNLIYKNLDFGVDLDSRVALVGPNGAGKSTLLKLMTGDLSPLDGMVRRHNHLRIAQFHQHLTEKLDLDMPALQYMMREYPGNEEEKMRAAIGKFGLSGKAQVMPMKNLSDGQKARVIFAWLAFRQPQMLLLDEPTNHLDIETIDSLAEALKEWDGGLVLVSHDFRLINQVAQEIWVCENQAVTRWEGDIMDFKQHLKKRAGL

SEQ ID NO: 60958 - protein, 455 aa, Triticum aestivum
  peptide (1)..(455): Ceres Seq. ID no. 14301869
MSALQAVICCDEERVKLEKEAEILAAQDDGGGEALDLVYERLEAMDASTAEKRAAEILFGLGFDKQMQAKPTRDFSGGWRMRIALARALFMNPTILLLDEPTNHLDLEACVWLEEKLKNFERILVVISHSQDFLNGVCTNIIHMQNKTLKLYTGNYDQYVQTRSELEENQMKQYKWEQEQIANMKEYIARFGHGSAKLARQAQSKEKTLAKMERGGLAEKVVNDRILVFRFTDVGKLPPPVLQFADVTFGYTPDNLIYKNLDFGVDLDSRVALVGPNGAGKSTLLKLMTGDLSPLDGMVRRHNHLRIAQFHQHLTEKLDLDMPALQYMMREYPGNEEEKMRAAIGKFGLSGKAQVMPMKNLSDGQKARVIFAWLAFRQPQMLLLDEPTNHLDIETIDSLAEALKEWDGGLVLVSHDFRLINQVAQEIWVCENQAVTRWEGDIMDFKQHLKKRAGL

SEQ ID NO: 60959 - DNA, 1747 bp, Triticum aestivum
  misc_feature (1)..(1747): Ceres Seq. ID no. 13661082
ttttttctacactaggactagactgatcgccctcctcctgaagtctaaaccctcactccccttcaccactgctccsgcagccktcgttcrgccttgcccctcycgccgaaccaaggagtaccgggcgcggcggcggcggctrccgcccgcagggccagcatggcgtttctcttcaacaaattccaggaggcaatcaaaacacttgctaagagtccaagctttgctcgagacccacggcatcttcagtttgaygctgacgtgaatcgtttatttctctataccagctataatcgtttgggaragcattctgaagaaaaggacgccgaggagattattgamytggctagcaaagcatctgttactgaccagcagaarcaagtkcagsraaatgttcattatcaacttaagcatatatgcaaatcaatggataacattcttcgtcctgatacaaaagatccatcacaatcttcttctgatgcttataataattctcgacgaagtggcttgagtttggccgttggcacaggagttgcagctgcaaacaagccagctgttcctgctacgcgacctttaactcaagctgaattgtcaaacaaattcagggatcagtttggctacacccttgacatcaagccgtcactaatacctcacaaagatgcagggcaaggtctgttcttatctggagaagctaatattggtgctgtcctagccatctaccctggagttatatactcacctgcgtattatcgatatatccctggatacccaagaatcgatgcgtgcaacagctatcttatcacaagatatgacggaacaataatcaacgcgaaaccatggcatttaggtggtgaaacaagagaaatatgggatggttcagatccagtggattacaatacaacgccacccaaaagcccagagagcaactctgaccgggcgtggaggatgcttaacaagcccctgcagaagagtggcactgaaaacttcggggatgtgcttgaacggcgaaatccactagcctttggtcatttcgcgaaccacccaccgggagggtcgactcctaatgtcatgatctgcccatatgattttccactgacagagaaggacatgagagtatacatcccgaacattgcatttggtggtgaagagcccgttacaatgaagaggtttggctccttctggttcaagtccagagcccctggtaaagagactggggagtcaccggttctgaggacgctagtaagtacgaggtccgtatgtgacgaagagctctacctgaactaccggtacagctcaaaggggcggccagactggtataccccagtggatgaagaagaggataagaggagatggagctaggtctgaaccgacctgcctgtaatgttttgttccaatgtttctttcatcagtaactggtgaactccagaagccgattcggccattctttctatgtttcagtcaaccgcataggtagtgtctctgctgaactcttctcgcaggtcttttgtggcaataaaaagaacaccagttacgtctcatgttatttgaggtagtatctgtattatccatcccgttgttgtaaggggatatttacgagcttatcactcaatctgtgtcagcagtgccatacttatttgctttcggaatagtaacaagctatgccatattgccagcgaactgcttctcatctaaataaatactacctcagtaacttaatataagacatttttttgacactattacagtgtcc

SEQ ID NO: 60960 - protein, 398 aa, Triticum aestivum
  peptide (1)..(398): Ceres Seq. ID no. 15220069
  misc_feature (31)..(31): Xaa is any aa, unknown or other
  misc_feature (48)..(48): Xaa is any aa, unknown or other
  misc_feature (60)..(60): Xaa is any aa, unknown or other
  misc_feature (61)..(61): Xaa is any aa, unknown or other
  misc_feature (72)..(72): Xaa is any aa, unknown or other
  misc_feature (74)..(74): Xaa is any aa, unknown or other
  misc_feature (76)..(76): Xaa is any aa, unknown or other
MAFLFNKFQEAIKTLAKSPSFARDPRHLQFXADVNRLFLYTSYNRLGXHSEEKDAEEIIXXASKASVTDQQXQXQXNVHYQLKHICKSMDNILRPDTKDPSQSSSDAYNNSRRSGLSLAVGTGVAAANKPAVPATRPLTQAELSNKFRDQFGYTLDIKPSLIPHKDAGQGLFLSGEANIGAVLAIYPGVIYSPAYYRYIPGYPRIDACNSYLITRYDGTIINAKPWHLGGETREIWDGSDPVDYNTTPPKSPESNSDRAWRMLNKPLQKSGTENFGDVLERRNPLAFGHFANHPPGGSTPNVMICPYDFPLTEKDMRVYIPNIAFGGEEPVTMKRFGSFWFKSRAPGKETGESPVLRTLVSTRSVCDEELYLNYRYSSKGRPDWYTPVDEEEDKRRWS

SEQ ID NO: 60961 - protein, 310 aa, Triticum aestivum
  peptide (1)..(310): Ceres Seq. ID no. 15220070
MDNILRPDTKDPSQSSSDAYNNSRRSGLSLAVGTGVAAANKPAVPATRPLTQAELSNKFRDQFGYTLDIKPSLIPHKDAGQGLFLSGEANIGAVLAIYPGVIYSPAYYRYIPGYPRIDACNSYLITRYDGTIINAKPWHLGGETREIWDGSDPVDYNTTPPKSPESNSDRAWRMLNKPLQKSGTENFGDVLERRNPLAFGHFANHPPGGSTPNVMICPYDFPLTEKDMRVYIPNIAFGGEEPVTMKRFGSFWFKSRAPGKETGESPVLRTLVSTRSVCDEELYLNYRYSSKGRPDWYTPVDEEEDKRRWS

SEQ ID NO: 60962 - DNA, 1246 bp, Triticum aestivum
  misc_feature (1)..(1246): Ceres Seq. ID no. 15178266
agtcccacgcactcgagagtcgagggggtctgtcccatccttatctccgctagctagctcgctataggcccctggtctttactcttcaggccaaacagaagcagctactaggcgaaggacacatccgcattatccatcgatcggccttgtcctgtccgcgggtggcgccggacgccggtgacaaccgacagggcagcaagcgtggatcatccgagcggaagcggaagcgctcctcctccggctccggggcaccgtcgcgacagcagaggcccgccgccatcacctcgtccgccgccgccgccgccgccgccgccggcgcaacaacgaggtgaccaccatgggcatggagagccggaggtcgtcggggaggaggctgctggcgttggcgttgcgacgacgagctaccagcaccagcagtacgagctcgccgtcatggtggcggcgctcacccacgtcatcagctccactcgaccgggaccggcggccgccgccggtgcaaccgcgcccgggcagcaagctgtgacccgccaacacagcgctcctctggccgtggcggcgacgtcgtcgtcatcaacggcgtcggagcagcagcagcagcgtccgcggtaccgtggcgtacggcagcggccgtggggcaagtgggcggcggagatccgcgaccccgtgaaggcggcgcgcgtatggctgggcaccttcgacacggccgaggacgccgcacgcgcctacgacgccgccgcgctccgcttcaagggcgccaaggccaagctcaacttccctggcgccggcggtgcgcctgcgccaccccgccatgccgtcggccagctcctggcgcccggaggcggggcatcgccgtcgatgcggcagcagcagcgacccgtggtggtggccttccgtccgcagattaactccctggcagccgttgctcgggaggagttcccggacctccaccggtatgcgcacatactgcagagcggtgacgtggacctgcgggctgttgcagccggcgggaacacaccggggcagtcgtcttcgtcgacgccggcgcacgactcgaggtcgccgccccggccggatgatcgcggatatggcgagagaagtgcaggccctggctgctaactgagtagtactcttactgaatacgtactgatcgacgtgtacatgagaaaaacaagttctgtttcttttcatctttttgtttgcgtatttccttatttatttttggtaaaatgaatagacacaacactac

SEQ ID NO: 60963 - protein, 227 aa, Triticum aestivum
  peptide (1)..(227): Ceres Seq. ID no. 15178267
MVAALTHVISSTRPGPAAAAGATAPGQQAVTRQHSAPLAVAATSSSSTASEQQQQRPRYRGVRQRPWGKWAAEIRDPVKAARVWLGTFDTAEDAARAYDAAALRFKGAKAKLNFPGAGGAPAPPRHAVGQLLAPGGGASPSMRQQQRPVVVAFRPQINSLAAVAREEFPDLHRYAHILQSGDVDLRAVAAGGNTPGQSSSSTPAHDSRSPPRPDDRGYGERSAGPGC

SEQ ID NO: 60964 - DNA, 1687 bp, Triticum aestivum
  misc_feature (1)..(1687): Ceres Seq. ID no. 13663060
agaacatcataatcgaaaatcgcctccgctcgctcccatcctcattccccagtcgccgcccaagtcaaaaagagggggaagcttctccaccagagtccccaagcccatgaacgactagtcgctgcgaagcaccaaccctagaacccaaccctactctctcccctcctcggctcctcccctcgcgagcggcgacgaagaggccatggatacctccggcggcggcaccgccgcgggcggggccgcgcagatccaggggatggcgacacacggcggccgctacgtgctctacaacgtctacggcaacctcttcgaggtcgcctccaagtacgcccctcccatccgccccatcggccgaggcgcctacggcattgtctgcgcggcggttagttcggatacaggagaggaggttgcgatcaagaagattggaaatgcgtttgacaaccacatcgatgccaagcggacgctgagagaaataaagcttcttcgccacatggaccatgagaatattcttgccataaaggatttaatacgccccccaagaagagatgattttaaggatgtgtacattgttactgagttgatggacaccgacctccatcagatcattcgctcaaatcaatcattgactgatgaccattgccagtacttcttgtatcagttgcttcgagggctaaaatatgtgcactcagcaaatgtcttgcaccgtgatctgaagccaagcaatttgttcctaaacgcaaattgcgatctcaagattgcagactttgggcttgcaaggaccacttcagaaaccgatctcatgacagagtatgtggtcactcgttggtaccgagcaccagagttgctgttgaactgttcacaatatactgctgctattgatgtctggtcagttgggtgtatacttggtgaaattattactcgtcaacccctatttcctggaagagattacatccaacagttaaaattgatcactgagctgataggatcaccagatgattcgagcctgggatttcttcggagtgacaatgcacgaagatacatgaagcaattaccacagtacccaaggcaggacttccgcctgcgcttccgcaacatgtctgatggtgcagttgatctgttagaaagaatgctggtgtttgacccaagcagacgcatcactgttgacgaggctctgcaccacccatacttggcttctcttcatgacatcaatgaagaacccacttgcccggcacctttcagctttgattttgagcaaccatcttttacagaagaacatatgaaagagctcatctggagggaaactttagcatttaaccctgatcctccctactaagagccaagaccaaattaccagctgagggcattgaagatctacctctagctctagtgaagccgatatttccatgtcttgtgcatctatttattttatgctcgcttattgggcgaatgggcatggattatttgttgctgtaactatttcttttggggcctttctgaagaaacgacatttgtatgagatggcttgcgcctgggcttgtattataccggttgattgaataaattcttcttgtgtatctaaggcttgtaattttgtgtacacttatttaaacatccaaaaaaaaaaaaaaaaaagcttatcgataccgtcgacctgtttaaacacaataaagttggaactggagggggg

SEQ ID NO: 60965 - protein, 376 aa, Triticum aestivum
  peptide (1)..(376): Ceres Seq. ID no. 13663061
MDTSGGGTAAGGAAQIQGMATHGGRYVLYNVYGNLFEVASKYAPPIRPIGRGAYGIVCAAVSSDTGEEVAIKKIGNAFDNHIDAKRTLREIKLLRHMDHENILAIKDLIRPPRRDDFKDVYIVTELMDTDLHQIIRSNQSLTDDHCQYFLYQLLRGLKYVHSANVLHRDLKPSNLFLNANCDLKIADFGLARTTSETDLMTEYVVTRWYRAPELLLNCSQYTAAIDVWSVGCILGEIITRQPLFPGRDYIQQLKLITELIGSPDDSSLGFLRSDNARRYMKQLPQYPRQDFRLRFRNMSDGAVDLLERMLVFDPSRRITVDEALHHPYLASLHDINEEPTCPAPFSFDFEQPSFTEEHMKELIWRETLAFNPDPPY

SEQ ID NO: 60966 - protein, 358 aa, Triticum aestivum
  peptide (1)..(358): Ceres Seq. ID no. 13663062
MATHGGRYVLYNVYGNLFEVASKYAPPIRPIGRGAYGIVCAAVSSDTGEEVAIKKIGNAFDNHIDAKRTLREIKLLRHMDHENILAIKDLIRPPRRDDFKDVYIVTELMDTDLHQIIRSNQSLTDDHCQYFLYQLLRGLKYVHSANVLHRDLKPSNLFLNANCDLKIADFGLARTTSETDLMTEYVVTRWYRAPELLLNCSQYTAAIDVWSVGCILGEIITRQPLFPGRDYIQQLKLITELIGSPDDSSLGFLRSDNARRYMKQLPQYPRQDFRLRFRNMSDGAVDLLERMLVFDPSRRITVDEALHHPYLASLHDINEEPTCPAPFSFDFEQPSFTEEHMKELIWRETLAFNPDPPY

SEQ ID NO: 60967 - protein, 280 aa, Triticum aestivum
  peptide (1)..(280): Ceres Seq. ID no. 13663063
MDHENILAIKDLIRPPRRDDFKDVYIVTELMDTDLHQIIRSNQSLTDDHCQYFLYQLLRGLKYVHSANVLHRDLKPSNLFLNANCDLKIADFGLARTTSETDLMTEYVVTRWYRAPELLLNCSQYTAAIDVWSVGCILGEIITRQPLFPGRDYIQQLKLITELIGSPDDSSLGFLRSDNARRYMKQLPQYPRQDFRLRFRNMSDGAVDLLERMLVFDPSRRITVDEALHHPYLASLHDINEEPTCPAPFSFDFEQPSFTEEHMKELIWRETLAFNPDPPY

SEQ ID NO: 60968 - DNA, 1121 bp, Triticum aestivum
  misc_feature (1)..(1121): Ceres Seq. ID no. 12784351
aacagacggccggccggaacatgcccgctcgtcgggactcgggagtaccgaccaatgctcgccgcctgccgatcagaagtcgcgacgagctcacctaatattccacctctccctgaccgccacccaacaacctaaccacatggccgtataatactccactgcagaagcgaggtgctcgtgaagtcggcgtgatatccggagtagccagcaagcccagcccagtggccgatccgtgatccgtgttggagagagcgagggagagaagatgcggccgcggctggtgctcttcggcgactcaatcaccgagcagtcctttgcccccggcggctggggcgccgccctcgcggagcacttcgcgaggcaggcggatgtggtgctgcgcgggctcagcgggtacaacacgcgctgggcgctgaaggtgctggatagagccatggagggggcggccgacggcggcgcggacccggcggcagtgacggtgttcttcggcgccaacgacgccaccctgcccgacgagatgcaggcgcaccagcacgtgccgctcggggagtacaaggacaacctgcgcgcgatctgtgcctacttcaagaataagtggccctccgctgccatcatactcatcacccctccaccgatccacgagccggcgaggattcgagacatatatggagataatgacccttcaagacagcctgaaagaacaaatgaagctgctggcacttatgcacaagcatgcataactgttgctaaagaattgggtcatccagttatagacatctggacacagatgcagcaatgtcctgattggcaaacatctgcattaagtgacgggctacatttcaccccgtccgggaacaaaattttgttcgacgaggtgctgaagacactggaaagtgttggtttcagccagcacagtctccggtccgatctccctctcttccatgaaattgaccccaaggacccactgaaagcctttgagatttgaagaaggtatctgccgcatggttggattcccagaaggaaggcactatgactcagctttatgttctgaaaacaaactatgttggtttggtgactgatgtgttctgtaacatggatatattgtgcctatgttctatgtc

SEQ ID NO: 60969 - protein, 239 aa, Triticum aestivum
  peptide (1)..(239): Ceres Seq. ID no. 12784352
MRPRLVLFGDSITEQSFAPGGWGAALAEHFARQADVVLRGLSGYNTRWALKVLDRAMEGAADGGADPAAVTVFFGANDATLPDEMQAHQHVPLGEYKDNLRAICAYFKNKWPSAAIILITPPPIHEPARIRDIYGDNDPSRQPERTNEAAGTYAQACITVAKELGHPVIDIWTQMQQCPDWQTSALSDGLHFTPSGNKILFDEVLKTLESVGFSQHSLRSDLPLFHEIDPKDPLKAFEI

SEQ ID NO: 60970 - protein, 183 aa, Triticum aestivum
  peptide (1)..(183): Ceres Seq. ID no. 12784353
MEGAADGGADPAAVTVFFGANDATLPDEMQAHQHVPLGEYKDNLRAICAYFKNKWPSAAIILITPPPIHEPARIRDIYGDNDPSRQPERTNEAAGTYAQACITVAKELGHPVIDIWTQMQQCPDWQTSALSDGLHFTPSGNKILFDEVLKTLESVGFSQHSLRSDLPLFHEIDPKDPLKAFEI

SEQ ID NO: 60971 - protein, 155 aa, Triticum aestivum
  peptide (1)..(155): Ceres Seq. ID no. 12784354
MQAHQHVPLGEYKDNLRAICAYFKNKWPSAAIILITPPPIHEPARIRDIYGDNDPSRQPERTNEAAGTYAQACITVAKELGHPVIDIWTQMQQCPDWQTSALSDGLHFTPSGNKILFDEVLKTLESVGFSQHSLRSDLPLFHEIDPKDPLKAFEI

SEQ ID NO: 60972 - DNA, 1275 bp, Triticum aestivum
  misc_feature (1)..(1275): Ceres Seq. ID no. 15225252
attcaaacatttttgtctcagacaaaagcatctgaacacactcaagaacatatatacatccccaccaaacaaacaaaaataaccatggaagtaaatcaagaagcttcatcaatgccagtagttcccatagatagtttctcttacagttgggtagttaactgtccttctttagaagattccattgatgattatcatcaaacctacgaagattcttcttcttccttcatagagatggatccaagattgcctccttcgagaagattcttcatcaacaaatcccatgaaagtagcttcaagttcgataacttcgtctctttctccgacgaagatcactctttagttcacgccgacgagcttttccgcgacggctacgtcatgccttatctatcaaaagccacgtcagcagctacggaagaagaatatgagccgttggacaagaaaacggagaagaagatggagacacgtgacattaagagcaagtctccttcttcttgtagaaagttgagaagagtttcgaaatgggttttgttgttattgacgccactgtgtaagagattaaggagatgtagaaccgctggatcatccggaggtatcggtatcgactctaggatccgtgtaacgacgttgtctagaagcagagttcattctgatgaaatgacttcgtcgccaagaataagtgttgcagatgattattattggagaaggtcttgtgactcagagagctccatttacgaagccgttcttcattgcaagaaatctttcgagaaatgagacttaagaatccatggaaaaggagcgggtagagtagagatggagaatattaagaagaataagcaaattacattacacgttactcatggagtgggaaagagagagcaacttgtgttgtgtctttttgttgtttctctctcttgaattaaagagattgatgtgatgattccatgtgaatgtgtcatctgatttgaatctagaacttttttttacatgagtgggcacatatatagggcagctagcagaatcaagaaaatattttcagattttcttggctattatggtttcttttcatatatgtaatcctatatgtatcttatatgtgcctacccatgttttactttctggtccaattgtgttttgaatattcttactttttgtgaaaattttgtcttttattgtctttataaatcatatgtggatgtcatcatatatatgcatatgattgaactccttttcttatcataattgtaattcaaatcaattaaatctaacaaagagaag

SEQ ID NO: 60973 - protein, 256 aa, Triticum aestivum
  peptide (1)..(256): Ceres Seq. ID no. 15225253
IQTFLSQTKASEHTQEHIYIPTKQTKITMEVNQEASSMPVVPIDSFSYSWVVNCPSLEDSIDDYHQTYEDSSSSFIEMDPRLPPSRRFFINKSHESSFKFDNFVSFSDEDHSLVHADELFRDGYVMPYLSKATSAATEEEYEPLDKKTEKKMETRDIKSKSPSSCRKLRRVSKWVLLLLTPLCKRLRRCRTAGSSGGIGIDSRIRVTTLSRSRVHSDEMTSSPRISVADDYYWRRSCDSESSIYEAVLHCKKSFEK

SEQ ID NO: 60974 - protein, 228 aa, Triticum aestivum
  peptide (1)..(228): Ceres Seq. ID no. 15225254
MEVNQEASSMPVVPIDSFSYSWVVNCPSLEDSIDDYHQTYEDSSSSFIEMDPRLPPSRRFFINKSHESSFKFDNFVSFSDEDHSLVHADELFRDGYVMPYLSKATSAATEEEYEPLDKKTEKKMETRDIKSKSPSSCRKLRRVSKWVLLLLTPLCKRLRRCRTAGSSGGIGIDSRIRVTTLSRSRVHSDEMTSSPRISVADDYYWRRSCDSESSIYEAVLHCKKSFEK

SEQ ID NO: 60975 - protein, 219 aa, Triticum aestivum
  peptide (1)..(219): Ceres Seq. ID no. 15225255
MPVVPIDSFSYSWVVNCPSLEDSIDDYHQTYEDSSSSFIEMDPRLPPSRRFFINKSHESSFKFDNFVSFSDEDHSLVHADELFRDGYVMPYLSKATSAATEEEYEPLDKKTEKKMETRDIKSKSPSSCRKLRRVSKWVLLLLTPLCKRLRRCRTAGSSGGIGIDSRIRVTTLSRSRVHSDEMTSSPRISVADDYYWRRSCDSESSIYEAVLHCKKSFEK

SEQ ID NO: 60976 - DNA, 955 bp, Triticum aestivum
  misc_feature (1)..(955): Ceres Seq. ID no. 12627215
gtcaaagcaaaagctaaatcatcttcctctcgtcaccaatcaaatggcgtctttgtcttcaatgcagatggttcacacttctcagattggtgttaagtcgcagttagtttcttctgcaaaccgaacatctccatcagtttcctctggntctgcattgtcttcgagactacactatgcagcaagtttccctctcaagaagcaattctcaggagcttatgcgaccatcaagaaccagagaacagcttgtgttaaatcaatggcagctgaggaagaggaagtgatagaacctcaggctaaagtgacgaacaaggtttactttgatgttgagattggtggtgaagtcgctggaaggattgtgatgggtctgttcggtgacgtcgtgcccaaaaccgttgagaacttccgtgtcttgtgtactggtgagaagaagtatggttacaaaggttcttccttccatcgtattattaaagatttcatgatccaaggaggtgacttcaccgagggaaatggtactggaggtattagtatctacggtgccaagtttgaagatgaaaacttcaccttgaagcatactggacctggaatcttgagtatggccaacgctggtcccaatactaatggaagccagttcttcatttgcactgtcaagactccatggttagacaacaagcatgttgtgtttggacaagtcattgaaggtatgaagcttgttaggacacttgaatctcaggagacacgcgccttcgatgttcccaagaaaggttgcagaatctatgcctgtggagagctccctctggatgcttgataaccacactattgagatcagtccatggtcattgccatctttgttttgttattatgagagtttcaagttatggtctttatgtttatttctttatgattacatgagttgaaagtacaatgtaagagtcttattaaagtttatttatctttt

SEQ ID NO: 60977 - protein, 267 aa, Triticum aestivum
  peptide (1)..(267): Ceres Seq. ID no. 12627216
  misc_feature (49)..(49): Xaa is any aa, unknown or other
SKQKLNHLPLVTNQMASLSSMQMVHTSQIGVKSQLVSSANRTSPSVSSXSALSSRLHYAASFPLKKQFSGAYATIKNQRTACVKSMAAEEEEVIEPQAKVTNKVYFDVEIGGEVAGRIVMGLFGDVVPKTVENFRVLCTGEKKYGYKGSSFHRIIKDFMIQGGDFTEGNGTGGISIYGAKFEDENFTLKHTGPGILSMANAGPNTNGSQFFICTVKTPWLDNKHVVFGQVIEGMKLVRTLESQETRAFDVPKKGCRIYACGELPLDA

SEQ ID NO: 60978 - protein, 253 aa, Triticum aestivum
  peptide (1)..(253): Ceres Seq. ID no. 12627217
  misc_feature (35)..(35): Xaa is any aa, unknown or other
MASLSSMQMVHTSQIGVKSQLVSSANRTSPSVSSXSALSSRLHYAASFPLKKQFSGAYATIKNQRTACVKSMAAEEEEVIEPQAKVTNKVYFDVEIGGEVAGRIVMGLFGDVVPKTVENFRVLCTGEKKYGYKGSSFHRIIKDFMIQGGDFTEGNGTGGISIYGAKFEDENFTLKHTGPGILSMANAGPNTNGSQFFICTVKTPWLDNKHVVFGQVIEGMKLVRTLESQETRAFDVPKKGCRIYACGELPLDA

SEQ ID NO: 60979 - protein, 247 aa, Triticum aestivum
  peptide (1)..(247): Ceres Seq. ID no. 12627218
  misc_feature (29)..(29): Xaa is any aa, unknown or other
MQMVHTSQIGVKSQLVSSANRTSPSVSSXSALSSRLHYAASFPLKKQFSGAYATIKNQRTACVKSMAAEEEEVIEPQAKVTNKVYFDVEIGGEVAGRIVMGLFGDVVPKTVENFRVLCTGEKKYGYKGSSFHRIIKDFMIQGGDFTEGNGTGGISIYGAKFEDENFTLKHTGPGILSMANAGPNTNGSQFFICTVKTPWLDNKHVVFGQVIEGMKLVRTLESQETRAFDVPKKGCRIYACGELPLDA

SEQ ID NO: 60980 - DNA, 776 bp, Triticum aestivum
  misc_feature (1)..(776): Ceres Seq. ID no. 13661280
acaagaagcaagtgaaaagaaagaagaaacaacacaacaagccaccacgtacgtaagctttatcaccttcaaaaatgtcgggttggttcggggggaagacggacgccaaggacgaggaggccgccaagacggggccgtccgtccaggaccgcgccatcgaggcgaaggaccagaccatcagcttcatcggcgagaaaagcgaggccgtcaccaaggcggcctcggacaccgccgacgcggccatgaagatgggcggcgacgccatggggaaggcctccgagacggggcaggccatcacggaccgcgccatcgagagcaaggaccagacgttcggcttcttcggagagaagacggaggctgccaagaagatggccgtcgacaccggcgacgctgccaagcagaagtccgccgaggccgcaaagtgtgtcgaggagaccgcggcgaagttcaccggggaacccgccgcccccaaggagcccaccggcaacatgttccagcaggccggcgggcaggtgatgggtgccgctactggcgccagggacgccgtcatgaacacgctcgggatgggaggagacaaagccgacaccggcaccgccaaatgaagaccgcaaagcgcaaaggacggctagcccacttttcgtttcgttattccctccgtgttgctttattttccgttccaagaaactgatttctacgcatgcgtcggttgtttaaacttcgtccggtgtattcaaagatgctttgaatatacagatttgctwaaaaaaaaaaaaaaa

SEQ ID NO: 60981 - protein, 228 aa, Triticum aestivum
  peptide (1)..(228): Ceres Seq. ID no. 15220097
QEASEKKEETTQQATTYVSFITFKNVGLVRGEDGRQGRGGRQDGAVRPGPRHRGEGPDHQLHRREKRGRHQGGLGHRRRGHEDGRRRHGEGLRDGAGHHGPRHREQGPDVRLLRREDGGCQEDGRRHRRRCQAEVRRGRKVCRGDRGEVHRGTRRPQGAHRQHVPAGRRAGDGCRYWRQGRRHEHARDGRRQSRHRHRQMKTAKRKGRLAHFSFRYSLRVALFSVPRN

SEQ ID NO: 60982 - protein, 175 aa, Triticum aestivum
  peptide (1)..(175): Ceres Seq. ID no. 15220098
MSGWFGGKTDAKDEEAAKTGPSVQDRAIEAKDQTISFIGEKSEAVTKAASDTADAAMKMGGDAMGKASETGQAITDRAIESKDQTFGFFGEKTEAAKKMAVDTGDAAKQKSAEAAKCVEETAAKFTGEPAAPKEPTGNMFQQAGGQVMGAATGARDAVMNTLGMGGDKADTGTAK

SEQ ID NO: 60983 - protein, 119 aa, Triticum aestivum
  peptide (1)..(119): Ceres Seq. ID no. 15220099
MKMGGDAMGKASETGQAITDRAIESKDQTFGFFGEKTEAAKKMAVDTGDAAKQKSAEAAKCVEETAAKFTGEPAAPKEPTGNMFQQAGGQVMGAATGARDAVMNTLGMGGDKADTGTAK

SEQ ID NO: 60984 - DNA, 959 bp, Triticum aestivum
  misc_feature (1)..(959): Ceres Seq. ID no. 14301452
ataggtaatcataccacaacccgagcattctacaaccactttcatcaacgccatacacgtctcctaccctcacagttcgttgctccgcacatcagcaggacttgcaatggcgggagacggcgagctgaagctgctgggcgtgtggacgggcccgttcgtcatcagggtgcgcgtggtgctcaacctcaagtctctgccgtacgagtacgtggaggagaacctgggcagcaagagcgcgctcctcctgggctccaacccggtgcaccagagcgtgcccgtcctcctccacggcggccgccccgtgaacgagtcccaggtcatcgtgcagtacatcgacgaggtctgggcgggggccggcccgtccgtgctcccggccgacccctacgagcgcgccacggcgcgcttctgggcggcgtacgtcgacgacaaggtcgggtcggcgtggacggggatgctcttctcgtgcaagacggaggaggagagggcggaggccgtgtcccgggccgtggcggcgctggagacgctggagggcgcgttcgcggagtgctccaaggggaaggcgttcttcggcggcgacgccatcgggttcgttgacgtcgtgctcggcggctacctcgggtggttcggggcgatcgacaagatcatcgggcgccggctgatcgacccggcgaggacgccgctgctggccaggtgggaggagcagttccgcgcggcggacgcggccaagggcgtcgtgccggacgacgccgacaagatgctcgagttcttcccaccgtgctcgcttgggtcgccgccaaagcgaagtgaactgtgagcccgtgacatcgccagctcgtgacatgtgtgtttgtgtgtgtgcgtgtctgagtccgtccagtgtgtgctgaataaatgcaccgcatgtcgtgtgttgtaccaagggcaaacgatgctgaataattttgatgtttgttgatttc

SEQ ID NO: 60985 - protein, 235 aa, Triticum aestivum
  peptide (1)..(235): Ceres Seq. ID no. 14301453
MAGDGELKLLGVWTGPFVIRVRVVLNLKSLPYEYVEENLGSKSALLLGSNPVHQSVPVLLHGGRPVNESQVIVQYIDEVWAGAGPSVLPADPYERATARFWAAYVDDKVGSAWTGMLFSCKTEEERAEAVSRAVAALETLEGAFAECSKGKAFFGGDAIGFVDVVLGGYLGWFGAIDKIIGRRLIDPARTPLLARWEEQFRAADAAKGVVPDDADKMLEFFPPCSLGSPPKRSEL

SEQ ID NO: 60986 - protein, 197 aa, Triticum aestivum
  peptide (1)..(197): Ceres Seq. ID no. 14301454
IGNHTTTRAFYNHFHQRHTRLLPSQFVAPHISRTCNGGRRRAEAAGRVDGPVRHQGARGAQPQVSAVRVRGGEPGQQERAPPGLQPGAPERARPPPRRPPRERVPGHRAVHRRGLGGGRPVRAPGRPLRARHGALLGGVRRRQGRVGVDGDALLVQDGGGEGGGRVPGRGGAGDAGGRVRGVLQGEGVLRRRRHRVR

SEQ ID NO: 60987 - protein, 120 aa, Triticum aestivum
  peptide (1)..(120): Ceres Seq. ID no. 14301455
MLFSCKTEEERAEAVSRAVAALETLEGAFAECSKGKAFFGGDAIGFVDVVLGGYLGWFGAIDKIIGRRLIDPARTPLLARWEEQFRAADAAKGVVPDDADKMLEFFPPCSLGSPPKRSEL

SEQ ID NO: 60988 - DNA, 662 bp, Triticum aestivum
  misc_feature (1)..(662): Ceres Seq. ID no. 12623263
ataacccacagagaacccaagaaaccttctcaaatcctctaaagaaaagaaatggcctccacagctatctcaagcgtcatcgtcggaacatccttcctccgccgtcaaacatctcccatcagcctccgttccctccccttagccaacactcagaccctcttcggcctcaagtcaggaaccgcacgtggtggacgcgtcacagccatggctacatacaaggtcaagttcatcactcccgaaggagagcaagaggttgagtgcgacgacgacgtttacgtcctcgacgctgctgaggaagccgggatcgacttgccttactcttgccgtgccggttcttgctcgagctgtgcaggtaaagttgtgtctggttttgttgaccagtctgaccagagtttcctcgatgatgaccagattgctgcagggtttgttctcacctgtgcggcttatcctacttctgatgttaccattgagacccacagagaagatgacattgtttaagacaaaagctccattaacatgctgcttttgatggtttcataatcattcatgtctttacattttgggttgagtttgttgttactttagtataatctatattgttgtctgttgtaattgttcttggtttggaccatcttttggttagatcaatggataactgtttc

SEQ ID NO: 60989 - protein, 148 aa, Triticum aestivum
  peptide (1)..(148): Ceres Seq. ID no. 12623264
MASTAISSVIVGTSFLRRQTSPISLRSLPLANTQTLFGLKSGTARGGRVTAMATYKVKFITPEGEQEVECDDDVYVLDAAEEAGIDLPYSCRAGSCSSCAGKVVSGFVDQSDQSFLDDDQIAAGFVLTCAAYPTSDVTIETHREDDIV

SEQ ID NO: 60990 - protein, 97 aa, Triticum aestivum
  peptide (1)..(97): Ceres Seq. ID no. 12623265
MATYKVKFITPEGEQEVECDDDVYVLDAAEEAGIDLPYSCRAGSCSSCAGKVVSGFVDQSDQSFLDDDQIAAGFVLTCAAYPTSDVTIETHREDDIV

SEQ ID NO: 60991 - protein, 84 aa, Triticum aestivum
  peptide (1)..(84): Ceres Seq. ID no. 12623266
NPQRTQETFSNPLKKRNGLHSYLKRHRRNILPPPSNISHQPPFPPLSQHSDPLRPQVRNRTWWTRHSHGYIQGQVHHSRRRARG

SEQ ID NO: 60992 - DNA, 665 bp, Triticum aestivum
  misc_feature (1)..(665): Ceres Seq. ID no. 12623585
aaccttgtcttgttcttcctctcactctctgcgccgcggttcgtcttagatcttttcctcccccaagcaaaagcttcttcgatcttcctcgtgtctctaaaaaagcaatggcgagcttgagagaaccgccgaacgagcaagccatcctcaacatctacgagtccatgagatcagagctgagccaaatctactccaacataaccgacctcgagatgcaagtcagcgagcactccctcgtcgtcaacgccatccagcctctcgaccagtcaagaaaatgcttccgcatgatcggaggcgttcttgtcgagagaaccatcaaagaggtgctcccagctgttcaccgcaacaaggaagggctagaagaggtcgtcaggaagctgtacgagacgttggagaagaagaagaaggatatgacggagtttgaaggtaagtataagatcaggctaaggaaacaggacgagtccaaggaagaaggtggtagtaataataaaaaggaaggtaatgctcaaggtgttctcgttggagctgctagtacgagccagtaaacactctttcttctcctatcgttgtgctttgcatctttttttttgctggtgatggtgtttacaatattagtagattggagaaccaaaacgttatctttatattcaacatgagagtcttac

SEQ ID NO: 60993 - protein, 180 aa, Triticum aestivum
  peptide (1)..(180): Ceres Seq. ID no. 12623586
PCLVLPLTLCAAVRLRSFPPPSKSFFDLPRVSKKAMASLREPPNEQAILNIYESMRSELSQIYSNITDLEMQVSEHSLVVNAIQPLDQSRKCFRMIGGVLVERTIKEVLPAVHRNKEGLEEVVRKLYETLEKKKKDMTEFEGKYKIRLRKQDESKEEGGSNNKKEGNAQGVLVGAASTSQ

SEQ ID NO: 60994 - protein, 145 aa, Triticum aestivum
  peptide (1)..(145): Ceres Seq. ID no. 12623587
MASLREPPNEQAILNIYESMRSELSQIYSNITDLEMQVSEHSLVVNAIQPLDQSRKCFRMIGGVLVERTIKEVLPAVHRNKEGLEEVVRKLYETLEKKKKDMTEFEGKYKIRLRKQDESKEEGGSNNKKEGNAQGVLVGAASTSQ

SEQ ID NO: 60995 - protein, 126 aa, Triticum aestivum
  peptide (1)..(126): Ceres Seq. ID no. 12623588
MRSELSQIYSNITDLEMQVSEHSLVVNAIQPLDQSRKCFRMIGGVLVERTIKEVLPAVHRNKEGLEEVVRKLYETLEKKKKDMTEFEGKYKIRLRKQDESKEEGGSNNKKEGNAQGVLVGAASTSQ

SEQ ID NO: 60996 - DNA, 448 bp, Triticum aestivum
  misc_feature (1)..(448): Ceres Seq. ID no. 13661162
aagaaaaccctacattacgtagagcttcgtctctccatcgaatccagcaacgacgacnatgatgatctctcgtcgattagcttccagattccttaaaccctcgtcttcctcatccctaagcatctcccttcaccatctccactcttcttcttccataagaaaccatttgatccacagatcagaacagcttcaagagctgggtctctttagatccttctctgctttcatcaccaatcccaacaccgagaagcttcgatctcagacacgatcaacgaggtacttctcaacaccgagccaagaggtcwatccgaatccagaggaggagccaaagatgaagcaccaggagatcgaaggcccgacggtggagcgcgacgtgtcagctttaggtnacgagacgagaaaagtgtkcgaagggatgatgaagaacatgtacagtctaagtggagcc

SEQ ID NO: 60997 - protein, 130 aa, Triticum aestivum
  peptide (1)..(130): Ceres Seq. ID no. 13661163
  misc_feature (83)..(83): Xaa is any aa, unknown or other
  misc_feature (111)..(111): Xaa is any aa, unknown or other
  misc_feature (117)..(117): Xaa is any aa, unknown or other
MMISRRLASRFLKPSSSSSLSISLHHLHSSSSIRNHLIHRSEQLQELGLFRSFSAFITNPNTEKLRSQTRSTRYFSTPSQEVXPNPEEEPKMKHQEIEGPTVERDVSALGXETRKVXEGMMKNMYSLSGA

SEQ ID NO: 60998 - protein, 129 aa, Triticum aestivum
  peptide (1)..(129): Ceres Seq. ID no. 13661164
  misc_feature (82)..(82): Xaa is any aa, unknown or other
  misc_feature (110)..(110): Xaa is any aa, unknown or other
  misc_feature (116)..(116): Xaa is any aa, unknown or other
MISRRLASRFLKPSSSSSLSISLHHLHSSSSIRNHLIHRSEQLQELGLFRSFSAFITNPNTEKLRSQTRSTRYFSTPSQEVXPNPEEEPKMKHQEIEGPTVERDVSALGXETRKVXEGMMKNMYSLSGA

SEQ ID NO: 60999 - DNA, 611 bp, Triticum aestivum
  misc_feature (1)..(611): Ceres Seq. ID no. 13661557
aggtcttttagatcgatcggatctgaatcatggacgaggaggcagcaaaacctagagacaccaccataaaccagcaacaacaatactattacggaacgtttcaaggcgttgcaaattatcctcctcccgctccgccaccgcttccgcatcaacctattgtcacgagtcccttgcttcctcctgtacatggttatcagactctccaagaatatacagtggttgaggtgagaccggtgagagagcatgacgttccttgctgtggctttggcatgggctggttcttgtttattatgggcttcttgttcggtgggatcccttggtatctcggtgctgttattattcttttcacctcagttgatcatcgcgagaaggctggttacgttgcttgttctgtcgcatccgttgtctatttgattgccgtcatgctcgggatggctgggaatattaacatcatctggtgacagatactcccttacatatcacatttcaataacgtatatgcatcatcataaccatagtgatttacaaaagcaaatgttgttattctgtgttgtatttatttgtttacaacaatgatcaatatgttcttgattcctttgatggcatcttcc

SEQ ID NO: 61000 - protein, 143 aa, Triticum aestivum
  peptide (1)..(143): Ceres Seq. ID no. 13661558
MDEEAAKPRDTTINQQQQYYYGTFQGVANYPPPAPPPLPHQPIVTSPLLPPVHGYQTLQEYTVVEVRPVREHDVPCCGFGMGWFLFIMGFLFGGIPWYLGAVIILFTSVDHREKAGYVACSVASVVYLIAVMLGMAGNINIIW

SEQ ID NO: 61001 - DNA, 907 bp, Triticum aestivum
  misc_feature (1)..(907): Ceres Seq. ID no. 13598102
aacctctctgcttcacttaatctgtgtgttgcctcttgaaaaaacccatcataaacccttctttacctttgtgctcatcttccttcctcgttatcaacagtctcaatcgaaaccgattcattgagaatgacggagatggtaacgcctggagacgtgctcggtaatgcggctgagttaaaacccgggaaaggagcttacgtcaacgacaacaccatctacgcttccctcacaggatctcgccggattgtttctcctcttcccgaatctcttgaccagagagctactgtggaagttactggtcacaaggcgcatggacttatccccgagcctggctctcttgtcttagctagggttactaaagttatggctcgtatggcttctgttgatatcttgtgtgttggttcaaaggccgttcgtgaaaaatttgctggcgtaatcaggcaacaagatgttagagaaacagagattgacaaagttgagattcatcagtctttccgtcctggtgacattgttagagctgtggttctgtctcttggtgactcacgggcttactatctgtcaactgctaagaatgagcttggtgtggtctctgctgagagcgctgcaggtgaaacaatggttccgattagttggacagagatgcaatgtcctttgtctggccaaaccgagcagaggaaagttgccaaggtggcctaatttgaatgacactacagataatctggcttctatcatagatgtgtgtctctacaacaagaaaagacatgtttgattattacagttttgagctcttttgacatgctttaacttaaaagaccatgttttgtcaagtgcaaaagcaacttgcctttattcctaaactcagaagacatttcaatgaaagggttaagagagaatgaatttgaatgtg

SEQ ID NO: 61002 - protein, 189 aa, Triticum aestivum
  peptide (1)..(189): Ceres Seq. ID no. 13598103
MTEMVTPGDVLGNAAELKPGKGAYVNDNTIYASLTGSRRIVSPLPESLDQRATVEVTGHKAHGLIPEPGSLVLARVTKVMARMASVDILCVGSKAVREKFAGVIRQQDVRETEIDKVEIHQSFRPGDIVRAVVLSLGDSRAYYLSTAKNELGVVSAESAAGETMVPISWTEMQCPLSGQTEQRKVAKVA

SEQ ID NO: 61003 - protein, 186 aa, Triticum aestivum
  peptide (1)..(186): Ceres Seq. ID no. 13598104
MVTPGDVLGNAAELKPGKGAYVNDNTIYASLTGSRRIVSPLPESLDQRATVEVTGHKAHGLIPEPGSLVLARVTKVMARMASVDILCVGSKAVREKFAGVIRQQDVRETEIDKVEIHQSFRPGDIVRAVVLSLGDSRAYYLSTAKNELGVVSAESAAGETMVPISWTEMQCPLSGQTEQRKVAKVA

SEQ ID NO: 61004 - protein, 110 aa, Triticum aestivum
  peptide (1)..(110): Ceres Seq. ID no. 13598105
MARMASVDILCVGSKAVREKFAGVIRQQDVRETEIDKVEIHQSFRPGDIVRAVVLSLGDSRAYYLSTAKNELGVVSAESAAGETMVPISWTEMQCPLSGQTEQRKVAKVA

SEQ ID NO: 61005 - DNA, 730 bp, Triticum aestivum
  misc_feature (1)..(730): Ceres Seq. ID no. 13664090
ataccgtctcctctcaacgaaagcttacaaaaaattcaccctaaatactttagtttataaataaagctcccaaaatctaagagaggagaagacaaagacttacaagaaaaaaggcatcataatggccaaattcttcatcgtgttcccttgcctctgcccctatgttttcaccaccctccttcacttggtggccgctgatgccgacgactttgacccgtttcaacatcacgggcttccgtctactgcgacacaatgccgcgtccaattcgttacccgcctcagtaaattcctcgaaggggcaaaggtaaagcttgagtgcaagagtcgtgtgaaccagacagtgacactgaccaaagaagctgtgactgacaaagacggaaaataccagatggaagttatgggagaccacgaagaggaactgtgcgagatcatcctcgtccaatcaccggacgcagagtgtggcgaagtgaacaacgaagagttcctaagaaacgcagcaaggatcagtctcacggctaacgatggcattgtctctaatgagattcgaaccattaacccacttgggttcatgaggaagactcctctcgccgattgtcctcaagttttcaaggagcttggaatcgtccctgacgtcatcttctaagcttaataccgatatacatcgatctctgaacaattttaatttttgttgtaactctttacatttcgtatataacaacatttatatttg

SEQ ID NO: 61006 - protein, 173 aa, Triticum aestivum
  peptide (1)..(173): Ceres Seq. ID no. 13664091
MAKFFIVFPCLCPYVFTTLLHLVAADADDFDPFQHHGLPSTATQCRVQFVTRLSKFLEGAKVKLECKSRVNQTVTLTKEAVTDKDGKYQMEVMGDHEEELCEIILVQSPDAECGEVNNEEFLRNAARISLTANDGIVSNEIRTINPLGFMRKTPLADCPQVFKELGIVPDVIF

SEQ ID NO: 61007 - DNA, 1310 bp, Triticum aestivum
  misc_feature (1)..(1310): Ceres Seq. ID no. 13661195
asaacatcctaatcgaaaacatcaacgaggggatgcttcattgcgcgaaaagcttttgggacatagggacgaggcgttcaaaaataatattcagtcaggtccgattattcctatcccgagctcacctatccaggtgaacacagaagtattccggcaacttcatggttcagtcagccccggctcagattactactatgcgtcagcaagatctctatcgaggagcccagtgcctacaggtacatggttggggaataatcgccaggcaacaaaagttcctccacaaatgaacgacgaaggtgcatctttatttggcgagtttgttccagcacagtctgcaccagctgctattacaaaagattccctctcagtggtaccatggatttctgttgtcttgggcatgtgtgtgttgcatattttggttggaaccgcgcatagggacgcttccaatgaaattatcatccctgtcggcagaaagctcttagttgtagcggatgaccatgcaggttcatctctgaaccatggcagtggaagtggaattggaagctttcttggttgggccatggcagttatctatatgggcggacgacttccccagatcttcttaaatatgcaaagaggccatgccgaggggctcagtccgctaatgtttacctttgctttagtggggaatacgacatatgttgggagtatccttgtgaatagtttggactgggcacgacttagaccaaatctgccgtggcttgtagatgctggaggatgcgttttgcttgattctttcattattcttcagttcctttattttcattaccggaagcaaagtgggcgtgatgaacttgacaatttggataaagcctaatgcacagcaaacaaagtatttcatttcttttcttcaatggaaaagacatggagctaccacctgcgtggggattgtgcatttttcttggaaagctgcgcaatagccactccccgtgcagaactgcagagacaaggttcacacgcttaatttgcggtgaatgagctgcggcgccgcatggttaagggatgaaatctgttaagggatagatgcagcagtctgccgtgttagaataccaaaaatgtatgtgtcatgtactcagggtcatgctatatctgtacatcgtatggtgatttgcagttcttcatgctatctctatttttgtagtggtgtcgtcttgtgtaggccattgttgtcggatgctcagattcaaatacgcgtcgaggccccatcctttgactctaaatatggttatgcattacaaaaaaaaaaaaaaaaaagcttatcgataccgtcg

SEQ ID NO: 61008 - protein, 284 aa, Triticum aestivum
  peptide (1)..(284): Ceres Seq. ID no. 15220083
  misc_feature (1)..(1): Xaa is any aa, unknown or other
XHPNRKHQRGDASLREKLLGHRDEAFKNNIQSGPIIPIPSSPIQVNTEVFRQLHGSVSPGSDYYYASARSLSRSPVPTGTWLGNNRQATKVPPQMNDEGASLFGEFVPAQSAPAAITKDSLSVVPWISVVLGMCVLHILVGTAHRDASNEIIIPVGRKLLVVADDHAGSSLNHGSGSGIGSFLGWAMAVIYMGGRLPQIFLNMQRGHAEGLSPLMFTFALVGNTTYVGSILVNSLDWARLRPNLPWLVDAGGCVLLDSFIILQFLYFHYRKQSGRDELDNLDKA

SEQ ID NO: 61009 - protein, 190 aa, Triticum aestivum
  peptide (1)..(190): Ceres Seq. ID no. 15220084
MNDEGASLFGEFVPAQSAPAAITKDSLSVVPWISVVLGMCVLHILVGTAHRDASNEIIIPVGRKLLVVADDHAGSSLNHGSGSGIGSFLGWAMAVIYMGGRLPQIFLNMQRGHAEGLSPLMFTFALVGNTTYVGSILVNSLDWARLRPNLPWLVDAGGCVLLDSFIILQFLYFHYRKQSGRDELDNLDKA

SEQ ID NO: 61010 - protein, 152 aa, Triticum aestivum
  peptide (1)..(152): Ceres Seq. ID no. 15220085
MCVLHILVGTAHRDASNEIIIPVGRKLLVVADDHAGSSLNHGSGSGIGSFLGWAMAVIYMGGRLPQIFLNMQRGHAEGLSPLMFTFALVGNTTYVGSILVNSLDWARLRPNLPWLVDAGGCVLLDSFIILQFLYFHYRKQSGRDELDNLDKA

SEQ ID NO: 61011 - DNA, 1328 bp, Triticum aestivum
  misc_feature (1)..(1328): Ceres Seq. ID no. 15169505
accatcacaaacagatgatgaagctgctgctctcccagcatcttcccaatcaccagatggacctatgagagccagcacaagcaactgttggctgttgctggctaccaccaccaccgaactctcaagccaacctccatcaccatttggctttgccctgtaattccaagagcgccaaaccaagatctcagctgccaacaccaccaaagctgatccatggacctgtcggcgaacccggacagccctctgtctggagggggcaacggtggcggctcctcgagcagcatcacctcctcgctttccgtggcctcagggggcactccgcagtcgccgagcaggtacgaggcgcagaagcggcgcgactggaacacgttcgggcagtacctgcggaaccaccggccgccgctgagcctggctcagtgcagcggggcgcacgtcctggagttcctgcgctaccttgaccagttcggcaagaccaaggtgcacgcctcggcctgccccttcttcggccacccgagcccgccggcaccctgcccgtgcccgctccgtcaggcctggggcagcctggacgccctcgtcggccgcctccgcgccgcctacgaggagaacggcggcagccccgagtccaaccccttcgctgcgcgcgccgtccgcctctaccttcgcgaggtccgcgagcaccaggcccgcgcccgcggcgtcagctacgagaagaagaagcgcaagaagccgcagcagctggccggcgacagcagcagcggcagcttccatggcaaccagcaccagccccctcccggcccgcctcccgccgccggttgctgagctgatcgaggcgacgacgacgacccgcccccagccggtggtcgatcgaacgatctcctatttggccggtatgccagatatattttatgtgcgctcgcgtatgcatgcatgcgcacgcatggttatggctttgcacttctcatttgtgcgtgtgtgtatcagctagtactgtcagttgtcgtcgtcgaacactgctgcattgctcgtgtttcgacctagttggctttgattagcttgggttaagttctagtcgagtttatcactagtttaatttccttccatgtaggatcgagtcaagtaaaatgatttgctgtagtgtgaagtgaagtgagggggacatgcatgcagggagagagagagataaatgtatggagatctctcttgctacagctagctgcatgtgtgtgtgtgtgtgtgtggttcgtgcaagattgtaagtctgtagtgcagtgtccgttctgcggtctgcgcatcatgtgtcaactcgatctagcatcgcttattgtttc

SEQ ID NO: 61012 - protein, 201 aa, Triticum aestivum
  peptide (1)..(201): Ceres Seq. ID no. 15169506
MDLSANPDSPLSGGGNGGGSSSSITSSLSVASGGTPQSPSRYEAQKRRDWNTFGQYLRNHRPPLSLAQCSGAHVLEFLRYLDQFGKTKVHASACPFFGHPSPPAPCPCPLRQAWGSLDALVGRLRAAYEENGGSPESNPFAARAVRLYLREVREHQARARGVSYEKKKRKKPQQLAGDSSSGSFHGNQHQPPPGPPPAAGC

SEQ ID NO: 61013 - DNA, 984 bp, Triticum aestivum
  misc_feature (1)..(984): Ceres Seq. ID no. 12623915
aatcaaaaaaaaaactttcaaatccctagaaagatgtcgacggaggaagaaaccaaggtggttgtcgagtcaggagacgccgaagcgacggtgacggagaagaagcctgctgcgaaaggcggcgctaaagctaagaagacgccggcgaagaagaagcctgctgctgctccgaggaagagaaccacttcgtctcaccctccttacgaagagatgatcaaagacgcgatcgtgacgctgaaggagagaaccggatctagccaatacgcgattcagaagttcatcgaggagaagcagaagtcgcttcctccaactttcaggaagcttctcctcgtcaatctcaggagactcgtcgcttccgggaagctagtcaaagtcaaagcctctttcaagattccgtctgcggctaaaccggcggctacgactaaaccggttaacaagaaaccagctgctgctgttactaaaccgaagggtaaagctcctgctaaggccaaaccggctgctaaaggagccaagaaacctgctgctgctgctaagcctaaggcaaagacaacagcaacaactaaagccgctgcgaagcccaaacctaagacgaagagtgtagctgctgtttcgaagaccaaggcggttgctgcgaagcctaaggcgaaggagagacctgctaaagcgtcgaggacttcgactaggacgtctccagggaagaaggcagcagctccggctaagaaagctgctgctgctgcgactaagaaggctccggctaagagtgtgaaggttaaatctccagcgaagagggcttcgacgaggaagaagtgattggttttagcttctcttagggttaaagtctttgtataattgaatcgtctatgaagggggcttgttttttcttcttccaaagtttatctttgtcttggtttcttctcgaaacccttttatcttgtaatttttggtttgtttgaaaattcaatagctatatgtgatggggtttgc

SEQ ID NO: 61014 - protein, 269 aa, Triticum aestivum
  peptide (1)..(269): Ceres Seq. ID no. 12623916
NQKKNFQIPRKMSTEEETKVVVESGDAEATVTEKKPAAKGGAKAKKTPAKKKPAAAPRKRTTSSHPPYEEMIKDAIVTLKERTGSSQYAIQKFIEEKQKSLPPTFRKLLLVNLRRLVASGKLVKVKASFKIPSAAKPAATTKPVNKKPAAAVTKPKGKAPAKAKPAAKGAKKPAAAAKPKAKTTATTKAAAKPKPKTKSVAAVSKTKAVAAKPKAKERPAKASRTSTRTSPGKKAAAPAKKAAAAATKKAPAKSVKVKSPAKRASTRKK

SEQ ID NO: 61015 - protein, 258 aa, Triticum aestivum
  peptide (1)..(258): Ceres Seq. ID no. 12623917
MSTEEETKVVVESGDAEATVTEKKPAAKGGAKAKKTPAKKKPAAAPRKRTTSSHPPYEEMIKDAIVTLKERTGSSQYAIQKFIEEKQKSLPPTFRKLLLVNLRRLVASGKLVKVKASFKIPSAAKPAATTKPVNKKPAAAVTKPKGKAPAKAKPAAKGAKKPAAAAKPKAKTTATTKAAAKPKPKTKSVAAVSKTKAVAAKPKAKERPAKASRTSTRTSPGKKAAAPAKKAAAAATKKAPAKSVKVKSPAKRASTRKK

SEQ ID NO: 61016 - protein, 199 aa, Triticum aestivum
  peptide (1)..(199): Ceres Seq. ID no. 12623918
MIKDAIVTLKERTGSSQYAIQKFIEEKQKSLPPTFRKLLLVNLRRLVASGKLVKVKASFKIPSAAKPAATTKPVNKKPAAAVTKPKGKAPAKAKPAAKGAKKPAAAAKPKAKTTATTKAAAKPKPKTKSVAAVSKTKAVAAKPKAKERPAKASRTSTRTSPGKKAAAPAKKAAAAATKKAPAKSVKVKSPAKRASTRKK

SEQ ID NO: 61017 - DNA, 1192 bp, Triticum aestivum
  misc_feature (1)..(1192): Ceres Seq. ID no. 15225038
cttcgctttccctctggccgccctctcccccgcggaagaaacccaaccctagcctccgccgtgcgtctccggcgacccttcagcagcaccgccgggcggcctcgcgggctctcctggagcggttccgctgcaaatctgaagcgcgagcgttgaggaggaggaggtgttggtcggcgatttactgatttggggggcggaggaggatggggtcgtcgtcgaaggtggtgcggccggaggaggtgctggagtcgctgaagaacgacggcaccgtcgacgcgctccgcatgaagatcatggcccagctcaaggccgacgaggacatgaagaaaaatactatgatgatggtggaacaaagcaaagttctgaagactcctggagctgagaaaaagaccaagagggagctgtttgatgctcttagacaagaattggaaactccggttcttgagaaagtctcaaaggcagtttgggagctgatactcgacaatggtggactagggaaagagatcaccgagacagttgagaaagtcttctgccggctcagcggaattgatgtgatgccacctccagcttcaacatccggtgctcctcaagagaaacagacaaacatggctgtagaggaggatcagaaggatatggaaatggatgcctctgaaccatcgtcttcctcaaggaagaggcctttcagtgacatcagtgtgaaaggagcaggtgctataccaaacggtggcgctacataccagcatgacgatcatgaggacgggaactaggagatctgggcgtgtcgtggacaagcattcgggtgatcctggggagagcgtgtgctcaattgcatcagtggaaaaccttatgcgtcggggatcaatcagtgctactgcggcgctgtctcctgcacattgcatgggaggaggcaccaaggctggtgcgaataagggactagatggactcatgctcaaggcgcacactggatgatctctccctcctgcgtgaggatgtcattctgtaataggatagaccttacttagatcccttgctgcgcgctggatgtgttgccgaaccaattgctcttagtagttgtagtttgcatatagtctggcctgctactttggtgaggctcgagtgctaccattatatttcggtttgctgttctccgttttatgcaataaaatggagagggggaaaccccttttgttac

SEQ ID NO: 61018 - protein, 187 aa, Triticum aestivum
  peptide (1)..(187): Ceres Seq. ID no. 15225039
MGSSSKVVRPEEVLESLKNDGTVDALRMKIMAQLKADEDMKKNTMMMVEQSKVLKTPGAEKKTKRELFDALRQELETPVLEKVSKAVWELILDNGGLGKEITETVEKVFCRLSGIDVMPPPASTSGAPQEKQTNMAVEEDQKDMEMDASEPSSSSRKRPFSDISVKGAGAIPNGGATYQHDDHEDGN

SEQ ID NO: 61019 - protein, 160 aa, Triticum aestivum
  peptide (1)..(160): Ceres Seq. ID no. 15225040
MKIMAQLKADEDMKKNTMMMVEQSKVLKTPGAEKKTKRELFDALRQELETPVLEKVSKAVWELILDNGGLGKEITETVEKVFCRLSGIDVMPPPASTSGAPQEKQTNMAVEEDQKDMEMDASEPSSSSRKRPFSDISVKGAGAIPNGGATYQHDDHEDGN

SEQ ID NO: 61020 - protein, 157 aa, Triticum aestivum
  peptide (1)..(157): Ceres Seq. ID no. 15225041
MAQLKADEDMKKNTMMMVEQSKVLKTPGAEKKTKRELFDALRQELETPVLEKVSKAVWELILDNGGLGKEITETVEKVFCRLSGIDVMPPPASTSGAPQEKQTNMAVEEDQKDMEMDASEPSSSSRKRPFSDISVKGAGAIPNGGATYQHDDHEDGN

SEQ ID NO: 61021 - DNA, 765 bp, Triticum aestivum
  misc_feature (1)..(765): Ceres Seq. ID no. 13661569
caacgccacatacgtgacttgactcaagttgagcacactttgtgatggaggcatggagccaaccagatcaccactagttttgctcgtggcgcaagccgtactcgctgcggcgatgctgcaacaaccatcagaagggagggtgcaggcagtggcgccatcagcgccacatctcgccggaggcaaagaagctgaagtagcagccgctacctcctcgccggcttcaccattcaccggcgacacgccattagttttgctcgtggcgtacgccgtactcgcggaggcgatgctgcaaccatcagagacgagggtacaggcggctacctcctcgccttcttcacagttcaccggtgacccgccacggccctccctcccgggcttgccgcctctacctggcttgcccgcgttaccgccgtcgccgggcttcccgggcatggcaggcgcgcagtcgtctccttcgccttcgcagcagccggccaaaacatgcttggagccgctgatacttgcggaaccgtgcgtcagttacctgacgaactccagcgtgccggcgccgccgagaacgtgctgcgacggcttcaggtcgctcgtcggcggcggcgacaggatttgcctgtgccacgccatcatgggcgacctgggtacatttgcaggcgggacgatagaccagcacgtcgccggagcttcttctgatgtgcatcggcaagtctgaatcgttgtttgttttgttttattaactgtatgaacttacgagatgaactgtcatgtgtt

SEQ ID NO: 61022 - protein, 217 aa, Triticum aestivum
  peptide (1)..(217): Ceres Seq. ID no. 13661570
MEPTRSPLVLLVAQAVLAAAMLQQPSEGRVQAVAPSAPHLAGGKEAEVAAATSSPASPFTGDTPLVLLVAYAVLAEAMLQPSETRVQAATSSPSSQFTGDPPRPSLPGLPPLPGLPALPPSPGFPGMAGAQSSPSPSQQPAKTCLEPLILAEPCVSYLTNSSVPAPPRTCCDGFRSLVGGGDRICLCHAIMGDLGTFAGGTIDQHVAGASSDVHRQV

SEQ ID NO: 61023 - protein, 197 aa, Triticum aestivum
  peptide (1)..(197): Ceres Seq. ID no. 13661571
MLQQPSEGRVQAVAPSAPHLAGGKEAEVAAATSSPASPFTGDTPLVLLVAYAVLAEAMLQPSETRVQAATSSPSSQFTGDPPRPSLPGLPPLPGLPALPPSPGFPGMAGAQSSPSPSQQPAKTCLEPLILAEPCVSYLTNSSVPAPPRTCCDGFRSLVGGGDRICLCHAIMGDLGTFAGGTIDQHVAGASSDVHRQV

SEQ ID NO: 61024 - protein, 140 aa, Triticum aestivum
  peptide (1)..(140): Ceres Seq. ID no. 13661572
MLQPSETRVQAATSSPSSQFTGDPPRPSLPGLPPLPGLPALPPSPGFPGMAGAQSSPSPSQQPAKTCLEPLILAEPCVSYLTNSSVPAPPRTCCDGFRSLVGGGDRICLCHAIMGDLGTFAGGTIDQHVAGASSDVHRQV

SEQ ID NO: 61025 - DNA, 677 bp, Triticum aestivum
  misc_feature (1)..(677): Ceres Seq. ID no. 12598241
atatacaaaaacccactacagaatactaccagcagttcttcgttgcagcatcatcacacagatttaaggttcaatctccagacagaaaatggcgaacgcggtgtcgggcgtggcggtgagcgaggagtgcgtgagggcgttccaggagctgcgcgcggggcgcgcgcaccggttcgtggtgtacaagatggacgacgccgtgcagcaggtggtggtggacaaggtgggcggccgcgacgccggcttcgacgacctggccgcggcactccccgccgacgactgccgctacgccgtctacgacctcgacttcaccgtcggcgacgccaccgccaaaggcgcggacggggaggcgccgcgcagcaagatcttcttcatctcctggtcgccggcgagtgcggaggtgaagagcaagatgatctacgccagctccaacgaggggttcaanaaggagctggacggcacgcagatcgacgtgcaggccaccgaccccagcgagctcacgctngacatcctcacgaccacgccacctaaccaatcaatcaagcccctatgtatgattgacggttcacgcgtgcacgttacgtgcgtgtgctagctttgtgctgtgcatgtatctttgccctcttcgattgtgttgtgtgcttccaattggatcgtgtcgtcgaccccnanagaat

SEQ ID NO: 61026 - protein, 176 aa, Triticum aestivum
  peptide (1)..(176): Ceres Seq. ID no. 12598242
  misc_feature (149)..(149): Xaa is any aa, unknown or other
  misc_feature (169)..(169): Xaa is any aa, unknown or other
IYKNPLQNTTSSSSLQHHHTDLRFNLQTENGERGVGRGGERGVREGVPGAARGARAPVRGVQDGRRRAAGGGGQGGRPRRRLRRPGRGTPRRRLPLRRLRPRLHRRRRHRQRRGRGGAAQQDLLHLLVAGECGGEEQDDLRQLQRGVQXGAGRHADRRAGHRPQRAHAXHPHDHAT

SEQ ID NO: 61027 - protein, 168 aa, Triticum aestivum
  peptide (1)..(168): Ceres Seq. ID no. 12598243
  misc_feature (119)..(119): Xaa is any aa, unknown or other
  misc_feature (139)..(139): Xaa is any aa, unknown or other
MANAVSGVAVSEECVRAFQELRAGRAHRFVVYKMDDAVQQVVVDKVGGRDAGFDDLAAALPADDCRYAVYDLDFTVGDATAKGADGEAPRSKIFFISWSPASAEVKSKMIYASSNEGFXKELDGTQIDVQATDPSELTXDILTTTPPNQSIKPLCMIDGSRVHVTCVC

SEQ ID NO: 61028 - protein, 135 aa, Triticum aestivum
  peptide (1)..(135): Ceres Seq. ID no. 12598244
  misc_feature (86)..(86): Xaa is any aa, unknown or other
  misc_feature (106)..(106): Xaa is any aa, unknown or other
MDDAVQQVVVDKVGGRDAGFDDLAAALPADDCRYAVYDLDFTVGDATAKGADGEAPRSKIFFISWSPASAEVKSKMIYASSNEGFXKELDGTQIDVQATDPSELTXDILTTTPPNQSIKPLCMIDGSRVHVTCVC

SEQ ID NO: 61029 - DNA, 935 bp, Triticum aestivum
  misc_feature (1)..(935): Ceres Seq. ID no. 12598102
cgctgctctgctctgctctgctcatcttccttgtaggctaggctagggtttatcttcggattacgagcgaaatcctcgggcaatggcgtcggtgcagctctgcggtgccgcggccgttggcgcggcggggttctccgggaaggtagcggccaacgcgccggcggcggtcggggtacgcccggcccggcggggggcgctccgcgggctcgtcgccagggccgccaccgtcgtcgcccccatgtacacgacggtcaagcccttggctgacagagtgcttctgaagaccaagactgccgagcagaagacgaccggtgggattctgctcccttcaactgcgcagtctaaacctcagagtggtgaggtggttgctgttggagagggaagaaccattggggatagcaaagtagaagtcggcattaaggttggggctcaggttgtatattcgaagtatgctggaatggaggtggagttgaatgattccaaccatctgatcctaaaagaggacgatatcataggtattctggagacagaggatgtgaaagacatgaagcctcttagcgaccgtgttcttatcaaggtagctgtagctgaagataaaactgcgggggggctgctgctgactaacagtgtccaggagaagccatctgttggaacggtggtcgctgtcggcccgggccatntggacgaggaaggcaagaggatcccgttgccggtatccacaggcaattccgttctgtactccaagtatgctggcgccgagttcaagggtgccgatggcacaaactacatcgtgctgagggtatctgacctgatggctatcctctcttgagctggattgtagcgcaaggcgcggttttcctgatcctaaatgttccaaaggcagcttaaactagatgaagagaaatgagaatccccttcaatgtttgtggctctgc

SEQ ID NO: 61030 - protein, 248 aa, Triticum aestivum
  peptide (1)..(248): Ceres Seq. ID no. 12598103
  misc_feature (200)..(200): Xaa is any aa, unknown or other
MASVQLCGAAAVGAAGFSGKVAANAPAAVGVRPARRGALRGLVARAATVVAPMYTTVKPLADRVLLKTKTAEQKTTGGILLPSTAQSKPQSGEVVAVGEGRTIGDSKVEVGIKVGAQVVYSKYAGMEVELNDSNHLILKEDDIIGILETEDVKDMKPLSDRVLIKVAVAEDKTAGGLLLTNSVQEKPSVGTVVAVGPGHXDEEGKRIPLPVSTGNSVLYSKYAGAEFKGADGTNYIVLRVSDLMAILS

SEQ ID NO: 61031 - protein, 196 aa, Triticum aestivum
  peptide (1)..(196): Ceres Seq. ID no. 12598104
  misc_feature (148)..(148): Xaa is any aa, unknown or other
MYTTVKPLADRVLLKTKTAEQKTTGGILLPSTAQSKPQSGEVVAVGEGRTIGDSKVEVGIKVGAQVVYSKYAGMEVELNDSNHLILKEDDIIGILETEDVKDMKPLSDRVLIKVAVAEDKTAGGLLLTNSVQEKPSVGTVVAVGPGHXDEEGKRIPLPVSTGNSVLYSKYAGAEFKGADGTNYIVLRVSDLMAILS

SEQ ID NO: 61032 - DNA, 506 bp, Triticum aestivum
  misc_feature (1)..(506): Ceres Seq. ID no. 12598105
atcctcgagcccaagcagcaaaacgcgagcagagagcgcaacacgaagatggcgacgatgtccctcgccgcggcctcacccctcaccgcctccactccccacggcctcgccgtgtccgcgccccgagcgccattcctcggcctccgctcatttggcgcgccggcgacgcggttcgcgggactggcggcggcgccgcggccgtcggggaggggcgatgcggcggtggtgaggatggcgaagagggagcaggagctggaggagatacgggccatggagacggagaatctggagcaggaggtggtggacctgaagggggagctcttcctgctccgcctcaagcgctccgcgcgccaggagttcaagtccagcgagttcggccgcatgcgcaagagggttgctcgtctgctgactgtgagaagagaaagggaaattgaacaaggaatcaacaaaagaaattctaggaagcttgacaggaaatggaaactgggtattgtggttggaccacc

SEQ ID NO: 61033 - protein, 168 aa, Triticum aestivum
  peptide (1)..(168): Ceres Seq. ID no. 12598106
ILEPKQQNASRERNTKMATMSLAAASPLTASTPHGLAVSAPRAPFLGLRSFGAPATRFAGLAAAPRPSGRGDAAVVRMAKREQELEEIRAMETENLEQEVVDLKGELFLLRLKRSARQEFKSSEFGRMRKRVARLLTVRREREIEQGINKRNSRKLDRKWKLGIVVGP

SEQ ID NO: 61034 - protein, 152 aa, Triticum aestivum
  peptide (1)..(152): Ceres Seq. ID no. 12598107
MATMSLAAASPLTASTPHGLAVSAPRAPFLGLRSFGAPATRFAGLAAAPRPSGRGDAAVVRMAKREQELEEIRAMETENLEQEVVDLKGELFLLRLKRSARQEFKSSEFGRMRKRVARLLTVRREREIEQGINKRNSRKLDRKWKLGIVVGP

SEQ ID NO: 61035 - protein, 149 aa, Triticum aestivum
  peptide (1)..(149): Ceres Seq. ID no. 12598108
MSLAAASPLTASTPHGLAVSAPRAPFLGLRSFGAPATRFAGLAAAPRPSGRGDAAVVRMAKREQELEEIRAMETENLEQEVVDLKGELFLLRLKRSARQEFKSSEFGRMRKRVARLLTVRREREIEQGINKRNSRKLDRKWKLGIVVGP

SEQ ID NO: 61036 - DNA, 909 bp, Triticum aestivum
  misc_feature (1)..(909): Ceres Seq. ID no. 12627237
gataacaaactgagcggcagaggcggccatagccgcgagcgaaagcttctctgtgtacaaatcgacttcgatgccactcgtcggtagccctcgccacggcccgccgctgaagctcgctggccgcgcccagcgccggcctccgccccgcaccattgcgcccaaatgcgacatctacttccctcccccgcgcctgaccagaagagccgtttccgccgcctcgctgctcctcaccgccctccctttccccgcctcgtcaccgcaactccccgtggcctccgcatcggaaacggaggcagaagccgggggaggagaaggaggcgcaccggcgctggagttggagcggtacacagaccaggaccaggggttcaccctcctcaagcccgcctcatggcccaaggtggaaaaggcgggcgcgacggcgctgtttcagcaagaggggaaggggagtaacaatattggggtcgtcgtcaatcctgttcgcctctcctcgctgacggatttcggcacaccgcagtttgtcgctgacaggcttctacaggcagagaagaaaaaggaaagtaccaaatctgcagaggtgatttccaccagagagagatcaggtcgcgatggcctgacagtgtacgaaatcgagtattcgttggatagcaccaggggagggatgaagcgcatcttctcagcggcgtttgttgcttctagaaatctttatctgctcaatgtagcctactctgatactgaggagaagcccttggacaagcagactagacttgttttggaggaagtccttcattcctttgattctgtgtagtttctttctcttaacaggggatgtatcatgtatgtctccctttcttgtttatacaaacttcgaccctaacataagcttctttacgttgatttgtaaaaagagtt

SEQ ID NO: 61037 - protein, 244 aa, Triticum aestivum
  peptide (1)..(244): Ceres Seq. ID no. 12627238
MPLVGSPRHGPPLKLAGRAQRRPPPRTIAPKCDIYFPPPRLTRRAVSAASLLLTALPFPASSPQLPVASASETEAEAGGGEGGAPALELERYTDQDQGFTLLKPASWPKVEKAGATALFQQEGKGSNNIGVVVNPVRLSSLTDFGTPQFVADRLLQAEKKKESTKSAEVISTRERSGRDGLTVYEIEYSLDSTRGGMKRIFSAAFVASRNLYLLNVAYSDTEEKPLDKQTRLVLEEVLHSFDSV

SEQ ID NO: 61038 - DNA, 640 bp, Triticum aestivum
  misc_feature (1)..(640): Ceres Seq. ID no. 12599839
acaactcgcagctcacaagcctcaagcactactgcacgcagatccaaagcattcgcttgccatcatcccctctcctctccaagtctcgggcaaggctttcaccgtcgacaagaaccggatggctcgcttcgccgtcgtcgccgccatcctcgccctcctcgccgtcggcgccgccgcgcagggccccatgccggcgccccggatggccccgcttccggcgccaccggcgaggtccccggccaccgcccccgcgccggtcgccacccctccaaccgccgcgtcgccgtccccgatggcatctccccctgccccgaccaccgacgctccctccgcgatgacgccgtccgcggtctctgccacacccaccggcgcacccatcggcgcccccaccggcacccccgcgagctccgccgtttactcatcggccgccagcttcgtcgcagtcgtcggagcggtcgccgccgccatcgtgttctagatggatcgacgatttttttagcggggggactctgttcgctgttgtctatacaatttcattctttctgagatttcttcgttatagacggaggaaagattacacacgacattgcgatgtaatcttgatacgagattattatgaatataaaattctttcatttgt

SEQ ID NO: 61039 - protein, 181 aa, Triticum aestivum
  peptide (1)..(181): Ceres Seq. ID no. 12599840
TTRSSQASSTTARRSKAFACHHPLSSPSLGQGFHRRQEPDGSLRRRRRHPRPPRRRRRRAGPHAGAPDGPASGATGEVPGHRPRAGRHPSNRRVAVPDGISPCPDHRRSLRDDAVRGLCHTHRRTHRRPHRHPRELRRLLIGRQLRRSRRSGRRRHRVLDGSTIFLAGGLCSLLSIQFHSF

SEQ ID NO: 61040 - protein, 158 aa, Triticum aestivum
  peptide (1)..(158): Ceres Seq. ID no. 12599841
QLAAHKPQALLHADPKHSLAIIPSPLQVSGKAFTVDKNRMARFAVVAAILALLAVGAAAQGPMPAPRMAPLPAPPARSPATAPAPVATPPTAASPSPMASPPAPTTDAPSAMTPSAVSATPTGAPIGAPTGTPASSAVYSSAASFVAVVGAVAAAIVF

SEQ ID NO: 61041 - protein, 119 aa, Triticum aestivum
  peptide (1)..(119): Ceres Seq. ID no. 12599842
MARFAVVAAILALLAVGAAAQGPMPAPRMAPLPAPPARSPATAPAPVATPPTAASPSPMASPPAPTTDAPSAMTPSAVSATPTGAPIGAPTGTPASSAVYSSAASFVAVVGAVAAAIVF

SEQ ID NO: 61042 - DNA, 819 bp, Triticum aestivum
  misc_feature (1)..(819): Ceres Seq. ID no. 13590650
ttcccccccttccgccccgtcccgtctccctccccccttcctcggcggccgccgccgccccccaccgcggcgagtccctccgtccacagccggcctaagccgccgccgcgtgcgcccggggtcaccgaggaggcggcgccatgaggttggagaagtgctggttctgctcctccaccgtctaccccggccacggcatccagttcgtccgcaacgacgccaagatctttcggttctgccgatcaaaatgccacaagaacttcaagatgaagaggawccctcgcaaggttaagtggaccaaggcgtacagacgcctgcgtggaaaggacatgacacaggatgccacgtttgagttcgagaggaagaggaacaggccggagcgctacgaccgtaacgtcactgagcacactctcaaggccatcccacttatcacaaagatcagacatgaacggcagaagaaacacatchcagagagacagaaggytggtaagagcatggtgcgaaagagmgacgccaaggagctggatcaggatattggcatggttcccaagaaggagaccgagamctatgtagccaagcagaaggttctagtttytcagctgaagaccgaggagaatcttatggaagagtaatggaatcmaacagttttgtgtgtgcgcgtgcatgtgatcctcttytatatggagkamtttgtgttccatcagattgtagacgacagtgaacatttgttttccactcaccatgagcaagttatgcatgtgatgttatcgcgtggacgatggtcagatttgctctcccmccgtttaatagaattgsgaaatt

SEQ ID NO: 61043 - protein, 162 aa, Triticum aestivum
  peptide (1)..(162): Ceres Seq. ID no. 15220992
  misc_feature (45)..(45): Xaa is any aa, unknown or other
  misc_feature (109)..(109): Xaa is any aa, unknown or other
  misc_feature (114)..(114): Xaa is any aa, unknown or other
  misc_feature (122)..(122): Xaa is any aa, unknown or other
  misc_feature (141)..(141): Xaa is any aa, unknown or other
  misc_feature (151)..(151): Xaa is any aa, unknown or other
MRLEKCWFCSSTVYPGHGIQFVRNDAKIFRFCRSKCHKNFKMKRXPRKVKWTKAYRRLRGKDMTQDATFEFERKRNRPERYDRNVTEHTLKAIPLITKIRHERQKKHIXERQKXGKSMVRKXDAKELDQDIGMVPKKETEXYVAKQKVLVXQLKTEENLMEE

SEQ ID NO: 61044 - protein, 121 aa, Triticum aestivum
  peptide (1)..(121): Ceres Seq. ID no. 15220993
  misc_feature (4)..(4): Xaa is any aa, unknown or other
  misc_feature (68)..(68): Xaa is any aa, unknown or other
  misc_feature (73)..(73): Xaa is any aa, unknown or other
  misc_feature (81)..(81): Xaa is any aa, unknown or other
  misc_feature (100)..(100): Xaa is any aa, unknown or other
  misc_feature (110)..(110): Xaa is any aa, unknown or other
MKRXPRKVKWTKAYRRLRGKDMTQDATFEFERKRNRPERYDRNVTEHTLKAIPLITKIRHERQKKHIXERQKXGKSMVRKXDAKELDQDIGMVPKKETEXYVAKQKVLVXQLKTEENLMEE

SEQ ID NO: 61045 - protein, 100 aa, Triticum aestivum
  peptide (1)..(100): Ceres Seq. ID no. 15220994
  misc_feature (47)..(47): Xaa is any aa, unknown or other
  misc_feature (52)..(52): Xaa is any aa, unknown or other
  misc_feature (60)..(60): Xaa is any aa, unknown or other
  misc_feature (79)..(79): Xaa is any aa, unknown or other
  misc_feature (89)..(89): Xaa is any aa, unknown or other
MTQDATFEFERKRNRPERYDRNVTEHTLKAIPLITKIRHERQKKHIXERQKXGKSMVRKXDAKELDQDIGMVPKKETEXYVAKQKVLVXQLKTEENLMEE

SEQ ID NO: 61046 - DNA, 699 bp, Triticum aestivum
  misc_feature (1)..(699): Ceres Seq. ID no. 13591265
agcaaatccaagacacacacacacacacacacaaactagcttagcaggttgtcactgatcaccgtggtcgacgagaagacgacgatggcggtnaggctgatgctggtggcggcgctgctgtgcgcggcggcggcggcggccgcggcgcagcnggcgaacaacgtgcgcgcgacgtaccactactaccggccggcccagaacaactgggacctgggcgcgccggcggtgagcgcctactgcgcgacctgggacgccagcnagccgctgtcgtggcggtccaagtacgggtggacggcgttctgcggccccgccggcgcccacgggcaggcggcgtgcggcaagtgcctccgggtgacgaacccggcgacgggggcgcaggtgacggcgaggatcgtggaccagtgcgccaacggcgggctggacctggactgggacnccgtcttcaccaagatngacaccaacggggtcgggtaccagcagggccncctcaacgtcaactaccagttcgtcgactgccgcgactagatgaaatgaaagggtaagcaagctatgataagaataaaaggctagctagtagcgggctagctacgagtgagcactgagactgatccatgctgttgaataaaagctaccacgtgttgctgcattgtatacgtgtatacagtacgtacatggaaggaaataaagtggatcgtttcc

SEQ ID NO: 61047 - protein, 146 aa, Triticum aestivum
  peptide (1)..(146): Ceres Seq. ID no. 13591266
  misc_feature (3)..(3): Xaa is any aa, unknown or other
  misc_feature (23)..(23): Xaa is any aa, unknown or other
  misc_feature (59)..(59): Xaa is any aa, unknown or other
  misc_feature (118)..(118): Xaa is any aa, unknown or other
  misc_feature (123)..(123): Xaa is any aa, unknown or other
  misc_feature (134)..(134): Xaa is any aa, unknown or other
MAXRLMLVAALLCAAAAAAAAQXANNVRATYHYYRPAQNNWDLGAPAVSAYCATWDASXPLSWRSKYGWTAFCGPAGAHGQAACGKCLRVTNPATGAQVTARIVDQCANGGLDLDWDXVFTKXDTNGVGYQQGXLNVNYQFVDCRD

SEQ ID NO: 61048 - protein, 141 aa, Triticum aestivum
  peptide (1)..(141): Ceres Seq. ID no. 13591267
  misc_feature (18)..(18): Xaa is any aa, unknown or other
  misc_feature (54)..(54): Xaa is any aa, unknown or other
  misc_feature (113)..(113): Xaa is any aa, unknown or other
  misc_feature (118)..(118): Xaa is any aa, unknown or other
  misc_feature (129)..(129): Xaa is any aa, unknown or other
MLVAALLCAAAAAAAAQXANNVRATYHYYRPAQNNWDLGAPAVSAYCATWDASXPLSWRSKYGWTAFCGPAGAHGQAACGKCLRVTNPATGAQVTARIVDQCANGGLDLDWDXVFTKXDTNGVGYQQGXLNVNYQFVDCRD

SEQ ID NO: 61049 - DNA, 900 bp, Triticum aestivum
  misc_feature (1)..(900): Ceres Seq. ID no. 12781196
ataacccgaactctagaaaacttttcctcttatctctctccctctctcccaagtgtggttttcaacccattcgtaaagatcatgaaccttgaagagaaaccaaccatggcttcgagggctctacctcaagccgaaaatctctactacgtccggtgcagcatctgcaacaccatcctcgcggttgggataccaatgaagagaatgcttgacactgtaacggtgaaatgtggccattgtggtaacctctcgtttctcaccacaacccctcctctgcaaggccatgtcagcctcacccttcagatgcagagctttgatgggagtgagtataagaagggaagctcttcttcctcctcctcttctacctccagtgaccagccaccgtctcctagaccaccctttgtcgttaaacctcctgagaagaagcagagactcccatcggcttacaaccgcttcatgagggatgagatacaacgtatcaagagtgccaatccggaaataccacatcgcgaagcttttagtgctgctgccaaaaattgggctaagtacatacccaattctcctacttccattgcttccggagccagcaacatccatggttttggatttggtgagaagaagtgatagcccaaggaaatgtgcctaaaaataataaacgcacgtgtgcgagatcaacctttctggaaagggtttagttagctgcgtcgtttttctcatgttgtgttgctttagatgtttaaagttggtgtgttttcatttgtgtgtctctgcagaaatgatgttgccttagtatctttagttctgtctgtcttagatatgaaagctacattacgttgttgtgttcatctggacgttcatgtcgggacgttataagtttgtcttaatcctataacatttctgcct

SEQ ID NO: 61050 - protein, 206 aa, Triticum aestivum
  peptide (1)..(206): Ceres Seq. ID no. 12781197
ITRTLENFSSYLSPSLPSVVFNPFVKIMNLEEKPTMASRALPQAENLYYVRCSICNTILAVGIPMKRMLDTVTVKCGHCGNLSFLTTTPPLQGHVSLTLQMQSFDGSEYKKGSSSSSSSSTSSDQPPSPRPPFVVKPPEKKQRLPSAYNRFMRDEIQRIKSANPEIPHREAFSAAAKNWAKYIPNSPTSIASGASNIHGFGFGEKK

SEQ ID NO: 61051 - protein, 179 aa, Triticum aestivum
  peptide (1)..(179): Ceres Seq. ID no. 12781198
MNLEEKPTMASRALPQAENLYYVRCSICNTILAVGIPMKRMLDTVTVKCGHCGNLSFLTTTPPLQGHVSLTLQMQSFDGSEYKKGSSSSSSSSTSSDQPPSPRPPFVVKPPEKKQRLPSAYNRFMRDEIQRIKSANPEIPHREAFSAAAKNWAKYIPNSPTSIASGASNIHGFGFGEKK

SEQ ID NO: 61052 - protein, 171 aa, Triticum aestivum
  peptide (1)..(171): Ceres Seq. ID no. 12781199
MASRALPQAENLYYVRCSICNTILAVGIPMKRMLDTVTVKCGHCGNLSFLTTTPPLQGHVSLTLQMQSFDGSEYKKGSSSSSSSSTSSDQPPSPRPPFVVKPPEKKQRLPSAYNRFMRDEIQRIKSANPEIPHREAFSAAAKNWAKYIPNSPTSIASGASNIHGFGFGEKK

SEQ ID NO: 61053 - DNA, 716 bp, Triticum aestivum
  misc_feature (1)..(716): Ceres Seq. ID no. 13661089
acaacagcaaaccaaatcccccaagaccaaaaaaggccccagcaacccaagcgcgtcgaccccatccacagttgaatctctgagtttactttcagagaagattttagtcgagatggcgcaggcgatcgaggctcagagggagggcgcggaggtgtaccacggcgcggcgctgtgcgcggagaaggcggtggagctgctggccgagaccaacatgccgctgggcctgctgccgctggcagacatcgaggaggtgggctacaaccgcgccaccggcttcgtctggctgcgccagaagaaggcgctcacgcacaccttcaagcagatcgggcggcaggtctcgtacggcaccgaggtgacggccttcgtcgaggaccgcaagatgaagcgcatgaccggggtcaagagcaaggagctcctcatctggatcaccctctgcgacatgtacatcgagaaggacgatccctccaagatcaccttcaagacgcccacagggctggggaggaccttccccgtctccgccttcgagaagcaggacgacggcaaggccaaggccgcggctgccgacggcaaggaggccgtcgtggccaagtaggtgaggacggccggcatactctacaaagtttggatgaagagtcctcgagtccaatattaactatatacaaagtttggatgaagagtactatttgcttttatctttataataaactacggattat

SEQ ID NO: 61054 - protein, 196 aa, Triticum aestivum
  peptide (1)..(196): Ceres Seq. ID no. 13661090
QQQTKSPKTKKGPSNPSASTPSTVESLSLLSEKILVEMAQAIEAQREGAEVYHGAALCAEKAVELLAETNMPLGLLPLADIEEVGYNRATGFVWLRQKKALTHTFKQIGRQVSYGTEVTAFVEDRKMKRMTGVKSKELLIWITLCDMYIEKDDPSKITFKTPTGLGRTFPVSAFEKQDDGKAKAAAADGKEAVVAK

SEQ ID NO: 61055 - protein, 159 aa, Triticum aestivum
  peptide (1)..(159): Ceres Seq. ID no. 13661091
MAQAIEAQREGAEVYHGAALCAEKAVELLAETNMPLGLLPLADIEEVGYNRATGFVWLRQKKALTHTFKQIGRQVSYGTEVTAFVEDRKMKRMTGVKSKELLIWITLCDMYIEKDDPSKITFKTPTGLGRTFPVSAFEKQDDGKAKAAAADGKEAVVAK

SEQ ID NO: 61056 - protein, 126 aa, Triticum aestivum
  peptide (1)..(126): Ceres Seq. ID no. 13661092
MPLGLLPLADIEEVGYNRATGFVWLRQKKALTHTFKQIGRQVSYGTEVTAFVEDRKMKRMTGVKSKELLIWITLCDMYIEKDDPSKITFKTPTGLGRTFPVSAFEKQDDGKAKAAAADGKEAVVAK

SEQ ID NO: 61057 - DNA, 1140 bp, Triticum aestivum
  misc_feature (1)..(1140): Ceres Seq. ID no. 15179622
acgtacggtgggctagaagataataggcgcgagtttttccatgttgctccgcctgaagattaccaccgtccagcctgtggcgctgcttcttgggcatgaccatggcgcgacagcatccccgcggcgtctcgccggagcccttccgcagggcggtggagcgtccacgagggcaaagaggctgaggagcgtggcggtggcgatggcgctcaaggaggaggagccggagagcagccgaagccgcttcgccgggggcggcccgagctgggaccccaggatggagatcggagtcccatacgagcaaagaccggttaacgagtactccgctctcaaggagagcaccttgtactcttgggcagagctgagtccaggctctttcttcatgcgcctaggcagcctgtgcctggtcacatttacagttctggcggccccaatctcagccgcaagtttcagtcccggaaaggatccactcaagttcgtgctagctgctgggattgggaccctgctcctggtgtctcttgtggttctcaggatctacctgggttggagctacgtgggtgacaggctattatcggcagtcgtgccgtatgaagaaaccgggtggtacgatggccaaatgtgggtcaagccagcagaggtgctggctcgcgacagactattgggatcttacaaggtaaagccggtgatcaacctgctcaaacagacactggtgggcaccggtgcgctgctcgtcggggcggtggcactcttcgccttcgccgcccccgtcgaggaattcgtccactccttcaatggagcccccactaccgcctcctctaagccgatcatgaggagagaggacctgctgaagctgcctgccgaggtgaggcaagacgacgacctcgctgcggctgctgcggaggccgccaatggacgcccggtttactgcagggaccgctactaccgggcgctcgccggcggtcagtactgcacctcggacgacctgctcaactgatgatagcaaatagtaatagtacatacgtattctggtatatgcagtttgccacattgatataataagcacaagttaagcaaatgtatcttatcggaatgaaattttgggaagaacgatgttgttgattctgtaatagattgcttcatgat

SEQ ID NO: 61058 - protein, 316 aa, Triticum aestivum
  peptide (1)..(316): Ceres Seq. ID no. 15179623
MLLRLKITTVQPVALLLGHDHGATASPRRLAGALPQGGGASTRAKRLRSVAVAMALKEEEPESSRSRFAGGGPSWDPRMEIGVPYEQRPVNEYSALKESTLYSWAELSPGSFFMRLGSLCLVTFTVLAAPISAASFSPGKDPLKFVLAAGIGTLLLVSLVVLRIYLGWSYVGDRLLSAVVPYEETGWYDGQMWVKPAEVLARDRLLGSYKVKPVINLLKQTLVGTGALLVGAVALFAFAAPVEEFVHSFNGAPTTASSKPIMRREDLLKLPAEVRQDDDLAAAAAEAANGRPVYCRDRYYRALAGGQYCTSDDLLN

SEQ ID NO: 61059 - protein, 263 aa, Triticum aestivum
  peptide (1)..(263): Ceres Seq. ID no. 15179624
MALKEEEPESSRSRFAGGGPSWDPRMEIGVPYEQRPVNEYSALKESTLYSWAELSPGSFFMRLGSLCLVTFTVLAAPISAASFSPGKDPLKFVLAAGIGTLLLVSLVVLRIYLGWSYVGDRLLSAVVPYEETGWYDGQMWVKPAEVLARDRLLGSYKVKPVINLLKQTLVGTGALLVGAVALFAFAAPVEEFVHSFNGAPTTASSKPIMRREDLLKLPAEVRQDDDLAAAAAEAANGRPVYCRDRYYRALAGGQYCTSDDLLN

SEQ ID NO: 61060 - protein, 238 aa, Triticum aestivum
  peptide (1)..(238): Ceres Seq. ID no. 15179625
MEIGVPYEQRPVNEYSALKESTLYSWAELSPGSFFMRLGSLCLVTFTVLAAPISAASFSPGKDPLKFVLAAGIGTLLLVSLVVLRIYLGWSYVGDRLLSAVVPYEETGWYDGQMWVKPAEVLARDRLLGSYKVKPVINLLKQTLVGTGALLVGAVALFAFAAPVEEFVHSFNGAPTTASSKPIMRREDLLKLPAEVRQDDDLAAAAAEAANGRPVYCRDRYYRALAGGQYCTSDDLLN

SEQ ID NO: 61061 - DNA, 853 bp, Triticum aestivum
  misc_feature (1)..(853): Ceres Seq. ID no. 12597985
acaccacccggagaactgagctgagatactacttctgttctcttctccccccttttccgagccccccacccgtcatctctccagcctccagtctccgccgacgccatggggcaggtctgggcgtctctgcaagagaagctccaagggcggcactggaaggagaggcaggtgcggaagatcaccgacagggtgttcgaccggctcaccgaggatacccggaagcccgagaaggacgccctcaagttcgaggaggtctacatcgccgtcctctgcgtctacaatgacatcaacaagtacttgccggggccgcactacgaccctccgtccaaggagaggctcaaggaactcatgaaagagtttgacatcgacatgaacggtctcctggatcgcgaggagttcgcggagttcatccggaagctgaccgccgagtcactctgcgcgatcagcctcaagctgatcatcacgctggtcgccgcccctgcgctggcgctggcgaccaanagggcaaccgagggcgtccccggngtcggcaaggtagtgcacaaggtgcccaatgccatttatgccgccgccatcaccatggctgccgtgntcatccagagatccgccgagggcgtngagtanaagcggcatcgcgccgtgaactgtagatgcnccaggcaaccagggagggtgtaaatgtgctgtgatttgccgtgtgaagggtgatgccctgtgggacttatagttttttctgtaataccttcctgtctgtgcttcttggtgttgctagcctggtgtgattcaaaaagacagtattcgctgcttgttgacatgataaattnttggactaaataaanccgtggtcctgctg

SEQ ID NO: 61062 - protein, 190 aa, Triticum aestivum
  peptide (1)..(190): Ceres Seq. ID no. 12597986
  misc_feature (132)..(132): Xaa is any aa, unknown or other
  misc_feature (140)..(140): Xaa is any aa, unknown or other
  misc_feature (163)..(163): Xaa is any aa, unknown or other
  misc_feature (171)..(171): Xaa is any aa, unknown or other
  misc_feature (173)..(173): Xaa is any aa, unknown or other
  misc_feature (184)..(184): Xaa is any aa, unknown or other
MGQVWASLQEKLQGRHWKERQVRKITDRVFDRLTEDTRKPEKDALKFEEVYIAVLCVYNDINKYLPGPHYDPPSKERLKELMKEFDIDMNGLLDREEFAEFIRKLTAESLCAISLKLIITLVAAPALALATXRATEGVPXVGKVVHKVPNAIYAAAITMAAVXIQRSAEGXEXKRHRAVNCRCXRQPGRV

SEQ ID NO: 61063 - protein, 109 aa, Triticum aestivum
  peptide (1)..(109): Ceres Seq. ID no. 12597987
  misc_feature (51)..(51): Xaa is any aa, unknown or other
  misc_feature (59)..(59): Xaa is any aa, unknown or other
  misc_feature (82)..(82): Xaa is any aa, unknown or other
  misc_feature (90)..(90): Xaa is any aa, unknown or other
  misc_feature (92)..(92): Xaa is any aa, unknown or other
  misc_feature (103)..(103): Xaa is any aa, unknown or other
MKEFDIDMNGLLDREEFAEFIRKLTAESLCAISLKLIITLVAAPALALATXRATEGVPXVGKVVHKVPNAIYAAAITMAAVXIQRSAEGXEXKRHRAVNCRCXRQPGRV

SEQ ID NO: 61064 - protein, 102 aa, Triticum aestivum
  peptide (1)..(102): Ceres Seq. ID no. 12597988
  misc_feature (44)..(44): Xaa is any aa, unknown or other
  misc_feature (52)..(52): Xaa is any aa, unknown or other
  misc_feature (75)..(75): Xaa is any aa, unknown or other
  misc_feature (83)..(83): Xaa is any aa, unknown or other
  misc_feature (85)..(85): Xaa is any aa, unknown or other
  misc_feature (96)..(96): Xaa is any aa, unknown or other
MNGLLDREEFAEFIRKLTAESLCAISLKLIITLVAAPALALATXRATEGVPXVGKVVHKVPNAIYAAAITMAAVXIQRSAEGXEXKRHRAVNCRCXRQPGRV

SEQ ID NO: 61065 - DNA, 1231 bp, Triticum aestivum
  misc_feature (1)..(1231): Ceres Seq. ID no. 15225993
atttagcttcccattacaaacacagatcaaaacttcgttcttgtcggaaaaaacaaatcaatggcaaacgcctggaaaagagacaagaatcagaagctattagctccaaagaccttaataatcactcttcttgttctctccatcatcttcctctcctcactcttcttcttctcctcctcctcctcctcctcatatctccaaaacaccaatccaaatccgaccatctccaccaagttcccaatcccacccttcgactgcttcaaatgcccccaatccaaacccgtgatcgccaacgtcgtcgagaatctcaaataccctttcctctactccctcgccgatctcggtaacctcccggagaagccgcacaagaacatcgtgaggctgctcaaggggaagccctttcggaaaccggacatctccgctacgattcaggaggttctggagaggatgagtgctgatggcaaaagagatgggttcgttgtcgatgtgggagctaatgtcggtatggctagcttcgctgccgcggccatggggtttaaagtgcttgcctttgagcctgttttcgagaatttgcagaggatctgtgatgggatttggttcaatagagttgcctctttggtcactgtgtttgaagctgctgcttctgatagaaatggggatattaccttccacaagttggttggaaggcttgacaacagcgcggtttcgaaggtgggagcaagacttgcattcaagtccaacaaagaaatagcggtccaagtgaaatccatacctcttgatgaactcatcccgccttctcaaccgatccttttaatcaagatcgatgttcaaggctgggagaagcatgttttaaacggtgcaaagaagctgctctcgaggaaaccggcggaagctccgtatctaatctacgaggaagatgaaagattgctcaaggcgagcaatagtagctccaaagagatacgggatttcctgaaaagcgttgggtatagcaagtgcgtcgagcatggcacagatgcgcattgcactaaggagtaattgacattggaactttgcgagaagggctaataagttgttgccatgcgagttgaggaacataagaaaatgaggccattagtatttgctgagaaagaaagttgctaattgtggtcagtcatatttgtttctccttgtaatatttactcattttttgtgataccagttctaactagtaaagatatgttattgttgatgt

SEQ ID NO: 61066 - protein, 324 aa, Triticum aestivum
  peptide (1)..(324): Ceres Seq. ID no. 15225994
MANAWKRDKNQKLLAPKTLIITLLVLSIIFLSSLFFFSSSSSSSYLQNTNPNPTISTKFPIPPFDCFKCPQSKPVIANVVENLKYPFLYSLADLGNLPEKPHKNIVRLLKGKPFRKPDISATIQEVLERMSADGKRDGFVVDVGANVGMASFAAAAMGFKVLAFEPVFENLQRICDGIWFNRVASLVTVFEAAASDRNGDITFHKLVGRLDNSAVSKVGARLAFKSNKEIAVQVKSIPLDELIPPSQPILLIKIDVQGWEKHVLNGAKKLLSRKPAEAPYLIYEEDERLLKASNSSSKEIRDFLKSVGYSKCVEHGTDAHCTKE

SEQ ID NO: 61067 - protein, 195 aa, Triticum aestivum
  peptide (1)..(195): Ceres Seq. ID no. 15225995
MSADGKRDGFVVDVGANVGMASFAAAAMGFKVLAFEPVFENLQRICDGIWFNRVASLVTVFEAAASDRNGDITFHKLVGRLDNSAVSKVGARLAFKSNKEIAVQVKSIPLDELIPPSQPILLIKIDVQGWEKHVLNGAKKLLSRKPAEAPYLIYEEDERLLKASNSSSKEIRDFLKSVGYSKCVEHGTDAHCTKE

SEQ ID NO: 61068 - protein, 176 aa, Triticum aestivum
  peptide (1)..(176): Ceres Seq. ID no. 15225996
MASFAAAAMGFKVLAFEPVFENLQRICDGIWFNRVASLVTVFEAAASDRNGDITFHKLVGRLDNSAVSKVGARLAFKSNKEIAVQVKSIPLDELIPPSQPILLIKIDVQGWEKHVLNGAKKLLSRKPAEAPYLIYEEDERLLKASNSSSKEIRDFLKSVGYSKCVEHGTDAHCTKE

SEQ ID NO: 61069 - DNA, 1102 bp, Triticum aestivum
  misc_feature (1)..(1102): Ceres Seq. ID no. 13598724
gactaatatttttcagttgtcaccaaatttctgctctttttaagtaatttaattttatatcagattaaattaaatcccctccgttgttaacgttgtattgttttctgggatgcaggacggcggatcaaagttcttctggttctccatctgcatcatgttcatacgatgtctactgctttggaaaagtattgctggagctggtgacagggagacttggtatcagtgcatcaagtgacggtacaacaagtgattggcttgataacaccctgaggtacatcaacatttatgagaaagagctcatgagcaaaatcattgacccaaccctcattattgatgaggatcatttggaggaagtctgggcaatggcaattgtcgcgaagtcttgcttgaatcctaggtcttcgaagcggccaccaatgaaatatatcctaaaagcacttgagaatcccttgaaagtggtaagagaagataacggctctagctcggccaggttgagagcaacatcttcaaggggttcatggaatgctgcattcttcgggagttggcggcatagctcgtcagagattggtccttcaagggatgataacatgtttaaacggtcagagacaatcaaatcatctggagggagcaatggtgatcactcttcgtcccgcaggaggcaatctaaggagatcttccccgagccatctggttctcgtgacacagaggattaaggatacttcattctttctttttgcgatcctttgggttaacagaggttgctctgttgaagctctgctgccagcgtgtgattagattctttcagctgaaaagccggagggcgaattcgcctgttgccaatgacttcgcaagcagcggactgtcgccgaggcaccattttttgggggttggaatgtgaggtgagcgtatggaggtccgtgtataccctgcctggtgcactgtctggactatggcgtggagtggctctggtttctctttcttttccttttttcttcttctcctggtcatgattaaagaggaaatgtcgagctgattctttttctccttcctgctgtaattgattgtttcattgttgatcatagcaaaaatgttcgttccgtcc

SEQ ID NO: 61070 - protein, 137 aa, Triticum aestivum
  peptide (1)..(137): Ceres Seq. ID no. 13598725
MSKIIDPTLIIDEDHLEEVWAMAIVAKSCLNPRSSKRPPMKYILKALENPLKVVREDNGSSSARLRATSSRGSWNAAFFGSWRHSSSEIGPSRDDNMFKRSETIKSSGGSNGDHSSSRRRQSKEIFPEPSGSRDTED

SEQ ID NO: 61071 - protein, 116 aa, Triticum aestivum
  peptide (1)..(116): Ceres Seq. ID no. 13598726
MAIVAKSCLNPRSSKRPPMKYILKALENPLKVVREDNGSSSARLRATSSRGSWNAAFFGSWRHSSSEIGPSRDDNMFKRSETIKSSGGSNGDHSSSRRRQSKEIFPEPSGSRDTED

SEQ ID NO: 61072 - protein, 98 aa, Triticum aestivum
  peptide (1)..(98): Ceres Seq. ID no. 13598727
MKYILKALENPLKVVREDNGSSSARLRATSSRGSWNAAFFGSWRHSSSEIGPSRDDNMFKRSETIKSSGGSNGDHSSSRRRQSKEIFPEPSGSRDTED

SEQ ID NO: 61073 - DNA, 1005 bp, Triticum aestivum
  misc_feature (1)..(1005): Ceres Seq. ID no. 12598249
aaatatccacggagcgcacggaggagatcgtcgtcatccgccaaaccagatcggcttcttcttcttcttcttcttcttcaacttcgcagaatcgtcggcggtcgtctcttcctctagttagatccttcgagagcaatgggaggaggcaatgatggtcatgggtacccacccggtggccaggggggataccctccggcagggtacccgccgcagcagggaggttaccctccacagcaaggaggttaccctccacagcaaggatacccgcctgcacctggagcttacccacctgcacctggggcataccctcctgcacctggggcgtaccctcctgcacctggagcgggaggccctgacggggagaaggggctcctctccaacatcatgcatggtgttgccggtgctcatggtggtggtcatggctacccatctggtggccacgggtaccccccgcagcagcatggataccctcagcaaggctaccctcctcagcatggctacccaccgcagcagcatggctaccctccacagcagcatggctacccccctgctggctaccctggctcatctggtcacagtggtagccatggaggaggaggcatgggcatgggtggcattctggctggaggagcagcagctgctgccgccgcttacggagcacacaagctttctcacggcggccacggtggaggtggacacatgatgggaggcatgatgggcggccatggaggatatggcggcgggtacggccaccacggcggcaagttcaagcacgggaagcacggccacggcaagttcaagcacggcaagcatgggaagcacggcatgttcggcggcggcggaaagttcaagaagtggaagtaatgcgctagctagtagcttcaccatggctgatgaatcaaaaaaaatacctaatctcttcgtgtaggcttccagaacttggtttggtcagggaaagcctttgtagatgtatctaagcagggtgtggtgtggttgcttcccggc

SEQ ID NO: 61074 - protein, 242 aa, Triticum aestivum
  peptide (1)..(242): Ceres Seq. ID no. 12598250
MGGGNDGHGYPPGGQGGYPPAGYPPQQGGYPPQQGGYPPQQGYPPAPGAYPPAPGAYPPAPGAYPPAPGAGGPDGEKGLLSNIMHGVAGAHGGGHGYPSGGHGYPPQQHGYPQQGYPPQHGYPPQQHGYPPQQHGYPPAGYPGSSGHSGSHGGGGMGMGGILAGGAAAAAAAYGAHKLSHGGHGGGGHMMGGMMGGHGGYGGGYGHHGGKFKHGKHGHGKFKHGKHGKHGMFGGGGKFKKWK

SEQ ID NO: 61075 - protein, 184 aa, Triticum aestivum
  peptide (1)..(184): Ceres Seq. ID no. 12598251
MMVMGTHPVARGDTLRQGTRRSREVTLHSKEVTLHSKDTRLHLELTHLHLGHTLLHLGRTLLHLEREALTGRRGSSPTSCMVLPVLMVVVMATHLVATGTPRSSMDTLSKATLLSMATHRSSMATLHSSMATPLLATLAHLVTVVAMEEEAWAWVAFWLEEQQLLPPLTEHTSFLTAATVEVDT

SEQ ID NO: 61076 - protein, 183 aa, Triticum aestivum
  peptide (1)..(183): Ceres Seq. ID no. 12598252
MVMGTHPVARGDTLRQGTRRSREVTLHSKEVTLHSKDTRLHLELTHLHLGHTLLHLGRTLLHLEREALTGRRGSSPTSCMVLPVLMVVVMATHLVATGTPRSSMDTLSKATLLSMATHRSSMATLHSSMATPLLATLAHLVTVVAMEEEAWAWVAFWLEEQQLLPPLTEHTSFLTAATVEVDT

SEQ ID NO: 61077 - DNA, 778 bp, Triticum aestivum
  misc_feature (1)..(778): Ceres Seq. ID no. 13661310
ataaattcccacgaccatcggaccaaagaatcatacccctctcttctagccattcaaactagtaaacaatggggatactcaggaagaaaaaacacgagcgaaagccgtcgtttaagagtgttttaacctcaatattagctacacaagccgcaacattcctcttgttgatctccggtgtatccctcgccggcacagccaccgcatttatcgctaccatgccactattcgtagtattcagtccgattctcgtaccagctggtattaccactggtttactgactacgggtttagcagccgccggtggcgccggtgcgactgctgtcaccatcatcctgtggctctacaagcaagcaacgggcaaggagccgccagcagtcctgtcaaaagtcttgaaaaagataataccaggtgctgcagccgcgccagcagccgcaccagcagccgctccagcagccgcaccagctgccgcgccagcagccgcaccagcacctaagcccgcagccgcaccagcacctaagccagcagccccaccggcactatgaaaagaagtggtgggcatgagtaaaggctgatatggaaaatttgatacatggaaacaaaagagtaatccaactttttaaaaataaataacaacttcacgtggggatagaaaaaaattcaaatattattctactaatggatgtcgtggtacaaagtagtaacaaatgtaagcatatttattgtatagcattttaagaacgaagctgtgtatcgttgatattagtaccttattcaagtt

SEQ ID NO: 61078 - protein, 157 aa, Triticum aestivum
  peptide (1)..(157): Ceres Seq. ID no. 13661311
MGILRKKKHERKPSFKSVLTSILATQAATFLLLISGVSLAGTATAFIATMPLFVVFSPILVPAGITTGLLTTGLAAAGGAGATAVTIILWLYKQATGKEPPAVLSKVLKKIIPGAAAAPAAAPAAAPAAAPAAAPAAAPAPKPAAAPAPKPAAPPAL

SEQ ID NO: 61079 - protein, 108 aa, Triticum aestivum; identical to SEQ ID NO: 51988
  peptide (1)..(108): Ceres Seq. ID no. 13661312

SEQ ID NO: 61080 - DNA, 513 bp, Triticum aestivum
  misc_feature (1)..(513): Ceres Seq. ID no. 13663329
agtaatactaggctcaaagacaggaaaggtcacacgcactcccctgatctccccgtttctccccaaatcctcagcaaccccgccagatcgcgggcgatcttctcgcaggctgcctgcgacgagcgcgtgtgccaggcgccagcaaccaccggcctccttgcagtggcgcacctgcagccgctgcataataatccgtagcggcgacagtgagaaagcgagagaagaggggatgaccagcctgtccatcacggtgatgacgctgaacctgcacgaggggaatcaaccgggcgagagccctaacagctgggagaagcgccgcgacatctgcgtcagcgtcatcaccagttactcccccaccatcctctgcacccagcaagggttgaggtgccagctggactacctacagcaatgcctgcctggttatgagcaatttggcatttcaagaaaaagttcacaggacaccactgatgaatattgcacaatattctacgaaaaggagaaggtggagcttac

SEQ ID NO: 61081 - protein, 170 aa, Triticum aestivum
  peptide (1)..(170): Ceres Seq. ID no. 13663330
VILGSKTGKVTRTPLISPFLPKSSATPPDRGRSSRRLPATSACARRQQPPASLQWRTCSRCIIIRSGDSEKAREEGMTSLSITVMTLNLHEGNQPGESPNSWEKRRDICVSVITSYSPTILCTQQGLRCQLDYLQQCLPGYEQFGISRKSSQDTTDEYCTIFYEKEKVEL

SEQ ID NO: 61082 - protein, 94 aa, Triticum aestivum
  peptide (1)..(94): Ceres Seq. ID no. 13663331
MTSLSITVMTLNLHEGNQPGESPNSWEKRRDICVSVITSYSPTILCTQQGLRCQLDYLQQCLPGYEQFGISRKSSQDTTDEYCTIFYEKEKVEL

SEQ ID NO: 61083 - protein, 86 aa, Triticum aestivum
  peptide (1)..(86): Ceres Seq. ID no. 13663332
MTLNLHEGNQPGESPNSWEKRRDICVSVITSYSPTILCTQQGLRCQLDYLQQCLPGYEQFGISRKSSQDTTDEYCTIFYEKEKVEL

SEQ ID NO: 61084 - DNA, 769 bp, Triticum aestivum
  misc_feature (1)..(769): Ceres Seq. ID no. 13661117
atcgaaaaacccacatacgacaagaaaactgcaccagtgcacaccagtgctagtgtgtgacacgccaccatgaggtctctgcaggctgtgctcgtggcggtcctcgtcctgctcgccgtcgccgcgacgacagacgccgcgtgggcgccgataccggaccgcgacctgaacggcatggtggtgcagcaggcgggccggttcgccgtgctcgtgcatgacatcacgcaccggacgaccctggtgttcgtcaaggtggagcgcggcgagatggagcggccggtcggcggcggcaacggcaccaactaccggctcgtggtgaccgcggcgagggcgcccggcgggaacaagggccagtacgagtgcgtcgtgtggggcgtgcccggctcgcgcaccagcacctggaagctcctcagcttcaaggcgctctagctgcatgcatggccactgagcactcgtacgtgtgagtgtgatggtccgaggcaaagccgcgcgcgtactccgctgaataatctgcatatagtatgtgcatgggttttttaagtactggtacacgtcctttaatttgtaacccgcgtaggcacggcaaatacctgtctgcgtgcagtccgcacacactagcgccggaataagtaagttgtgactatcacccagtatacttcttttttgtcatcactgcccgaatgatgtatgttggtgattttataagagtcttgatactatgatcgttccctactakgakgggggtcttgatactatgatcgttcccttg

SEQ ID NO: 61085 - protein, 119 aa, Triticum aestivum
  peptide (1)..(119): Ceres Seq. ID no. 15220071
MRSLQAVLVAVLVLLAVAATTDAAWAPIPDRDLNGMVVQQAGRFAVLVHDITHRTTLVFVKVERGEMERPVGGGNGTNYRLVVTAARAPGGNKGQYECVVWGVPGSRTSTWKLLSFKAL

SEQ ID NO: 61086 - protein, 84 aa, Triticum aestivum
  peptide (1)..(84): Ceres Seq. ID no. 15220072
MVVQQAGRFAVLVHDITHRTTLVFVKVERGEMERPVGGGNGTNYRLVVTAARAPGGNKGQYECVVWGVPGSRTSTWKLLSFKAL

SEQ ID NO: 61087 - DNA, 869 bp, Triticum aestivum
  misc_feature (1)..(869): Ceres Seq. ID no. 13662992
atcggtacttaggttgtgatcccttcaccactgcgccatgcccacatccaaggcatttctcatcttggtgctcgccgtgctcactcccatggcggcgacctcccaggacacggcgacgaacctcaccctccacaacctgtgcgcgtaccctgtgtggccgctcatcactccgaacatcggcctccccgccatccccgacctggacgacgccgccagccgcctcgacgggggcggagaggggctcgtcaccctggcgttcccttccggcgcgtggtccggccgcgtcgtggcgcgcaccggctgcagcagcagcgatgactacgactcctcctccccctcctcctcctcgacggcggcggtggccaggtgcgtcacgggcatgccgccggcgccggtgacggtggcgcaggtgagcgtgcacgggtccggcgggctggcggagtacagcgtgagcctggtggacgggttcaacctgccggtgatggtgacgccgcacgggttcgagcagggccggcagtgcccgtccctcggctgcgccgtggacctcgacgtggactgcccccgcgacgccagggcccccgccggcgggtgcagggcccagggtcaggggcacttcttcaaggagaggtgcccggacactcggacgacgccgacggacgtggaggccacgccacagcgctgcctccagcccggcgagctcaagatcgtcttctgccccgattcttccgactagtcacttgctaccacacacactaggctagctagaccggctgtgtgtcactcacgatgccggttatataataagctaagcgattgattgctgattcgctaagccagattcaaccgaataatatgttaactattcttct

SEQ ID NO: 61088 - protein, 231 aa, Triticum aestivum
  peptide (1)..(231): Ceres Seq. ID no. 13662993
MPTSKAFLILVLAVLTPMAATSQDTATNLTLHNLCAYPVWPLITPNIGLPAIPDLDDAASRLDGGGEGLVTLAFPSGAWSGRVVARTGCSSSDDYDSSSPSSSSTAAVARCVTGMPPAPVTVAQVSVHGSGGLAEYSVSLVDGFNLPVMVTPHGFEQGRQCPSLGCAVDLDVDCPRDARAPAGGCRAQGQGHFFKERCPDTRTTPTDVEATPQRCLQPGELKIVFCPDSSD

SEQ ID NO: 61089 - protein, 214 aa, Triticum aestivum
  peptide (1)..(214): Ceres Seq. ID no. 13662994
MAATSQDTATNLTLHNLCAYPVWPLITPNIGLPAIPDLDDAASRLDGGGEGLVTLAFPSGAWSGRVVARTGCSSSDDYDSSSPSSSSTAAVARCVTGMPPAPVTVAQVSVHGSGGLAEYSVSLVDGFNLPVMVTPHGFEQGRQCPSLGCAVDLDVDCPRDARAPAGGCRAQGQGHFFKERCPDTRTTPTDVEATPQRCLQPGELKIVFCPDSSD

SEQ ID NO: 61090 - protein, 131 aa, Triticum aestivum
  peptide (1)..(131): Ceres Seq. ID no. 13662995
RYLGCDPFTTAPCPHPRHFSSWCSPCSLPWRRPPRTRRRTSPSTTCARTLCGRSSLRTSASPPSPTWTTPPAASTGAERGSSPWRSLPARGPAASWRAPAAAAAMTTTPPPPPPPRRRRWPGASRACRRRR

SEQ ID NO: 61091 - DNA, 627 bp, Triticum aestivum
  misc_feature (1)..(627): Ceres Seq. ID no. 12623242
acaaaaccatcacagctagtactagacaccgagacagcccttggaagatcgatcagtagctaccaaaaccaatttcgattttagcctcgcttgaacgcggacattttccgagtttctatttctcattgatagggagcatctgccaaaccagcagcacgcaaaatgaagcaaagattgtcatccaattgagcatgtcgtgcgacaaacgccggtcgaaagcactgacgctggcctccagagcagccggggtgacgtcgatgggcataaccggcgacgccagggaccagctggaggtggtcggtgacggcgtcgacccggtgtgcctcgtcagctgcctccgcaagaaactcggccacgcccacatcatcaaggtagaggaagtgaagaagccggaggagaagaagaagccggtgaaccccccgcagtactactactcgccggcgccggccggctactaccaccaccaatacccgccgcacatggtcgtctgcgaggaacagcctagcaactgccggaccatgtaactgccagagaacgattttgacgtagtactttaattttgtcagcaactatagttgcatacatgtacttgtaaattaattggaggaagaaataaaaaggagaaag

SEQ ID NO: 61092 - protein, 110 aa, Triticum aestivum
  peptide (1)..(110): Ceres Seq. ID no. 12623243
MSCDKRRSKALTLASRAAGVTSMGITGDARDQLEVVGDGVDPVCLVSCLRKKLGHAHIIKVEEVKKPEEKKKPVNPPQYYYSPAPAGYYHHQYPPHMVVCEEQPSNCRTM

SEQ ID NO: 61093 - protein, 88 aa, Triticum aestivum
  peptide (1)..(88): Ceres Seq. ID no. 12623244
MGITGDARDQLEVVGDGVDPVCLVSCLRKKLGHAHIIKVEEVKKPEEKKKPVNPPQYYYSPAPAGYYHHQYPPHMVVCEEQPSNCRTM

SEQ ID NO: 61094 - DNA, 1016 bp, Triticum aestivum
  misc_feature (1)..(1016): Ceres Seq. ID no. 13664262
gtattaagacatgaggagctgagtcttccggagagactgcgaaaaccctaatttcgttcgtgcgcgaaaggggtttttggttctatcttcagacaacgatgatgcaccactcaaccgacgattcggaacctgatggtgctatgcccgtccaacaaagagacgactctgcctcctcctccgactctgcttccgccgtttctaatcacaccatcactannaccgtttaccatggctcctccgaccaccatctccatgttcctcagcacgccactttcggggatgtgaagaaagcctttgttctggaaactgggttggaggctactgatctgaagatcttgttcaggggagatgtgaaagatgacgctgagcagttgcaagctgctggtgttacggacgggtctgtagttgtccttgtggatgagcctaataagggagttgaccatgttgaaccgcctcctgtgatgaccgaagagattgccaaggctattgctgctgttctagcagtctctggagaggtcgatgagctctcggatagggttggtgctttagaggctgctgtcgatggagggacgatagttgcggtgaaggagtttgacatgactgctgagctgctcatgaggcagttgctcaaattggatggcatcaaggcagatggggaagctagactacagcgaaaggcagaggtacgtagggttcaaaagttgcaggaggatgtggatacgttgaaggcaagatgttacagagcaaagccgcagctgtaagcactgagtgggattcgttctgaaacggtgttggagagcttgaaccctcctccgccagctttcgccttgtaccaatgtaaacccaagattgggagaaattttactgacatttttattattctgttacgttacaaaaaaaatattgcttctttttgttattgttaaatgaggaaatgaccagaaaaatatgggttgtatcctggaatttgtatgatttttttagtatctcaatctgaatagcaatacatttttttt

SEQ ID NO: 61095 - protein, 220 aa, Triticum aestivum
  peptide (1)..(220): Ceres Seq. ID no. 13664263
  misc_feature (40)..(40): Xaa is any aa, unknown or other
MMHHSTDDSEPDGAMPVQQRDDSASSSDSASAVSNHTITXTVYHGSSDHHLHVPQHATFGDVKKAFVLETGLEATDLKILFRGDVKDDAEQLQAAGVTDGSVVVLVDEPNKGVDHVEPPPVMTEEIAKAIAAVLAVSGEVDELSDRVGALEAAVDGGTIVAVKEFDMTAELLMRQLLKLDGIKADGEARLQRKAEVRRVQKLQEDVDTLKARCYRAKPQL

SEQ ID NO: 61096 - protein, 219 aa, Triticum aestivum
  peptide (1)..(219): Ceres Seq. ID no. 13664264
  misc_feature (39)..(39): Xaa is any aa, unknown or other
MHHSTDDSEPDGAMPVQQRDDSASSSDSASAVSNHTITXTVYHGSSDHHLHVPQHATFGDVKKAFVLETGLEATDLKILFRGDVKDDAEQLQAAGVTDGSVVVLVDEPNKGVDHVEPPPVMTEEIAKAIAAVLAVSGEVDELSDRVGALEAAVDGGTIVAVKEFDMTAELLMRQLLKLDGIKADGEARLQRKAEVRRVQKLQEDVDTLKARCYRAKPQL

SEQ ID NO: 61097 - protein, 206 aa, Triticum aestivum
  peptide (1)..(206): Ceres Seq. ID no. 13664265
  misc_feature (26)..(26): Xaa is any aa, unknown or other
MPVQQRDDSASSSDSASAVSNHTITXTVYHGSSDHHLHVPQHATFGDVKKAFVLETGLEATDLKILFRGDVKDDAEQLQAAGVTDGSVVVLVDEPNKGVDHVEPPPVMTEEIAKAIAAVLAVSGEVDELSDRVGALEAAVDGGTIVAVKEFDMTAELLMRQLLKLDGIKADGEARLQRKAEVRRVQKLQEDVDTLKARCYRAKPQL

SEQ ID NO: 61098 - DNA, 892 bp, Triticum aestivum
  misc_feature (1)..(892): Ceres Seq. ID no. 13661594
agattcaggtgatggcaatgctaatggcagtacaggcagtggtagatcagtaggaaatcatatggttaacccatcacaaattgggaaggcagagtcagttaatctccagtttggttcttttgggattagcgcgtggctgagtgacacaggcggtggcaccagccatgctggaagtgtagatgacctgagggctgatgggatcgagacaagcggtagatacttctcctcatgctgcagctcaccaaaaacgtcagactgcgcctccaaagagcatatggaggattattcagtctatggtagtgaagaggatgctgacgacccacctgatgctgaaactgatgaggatctaactgatgaagaaagggatgctcatgagattgaagcgggctccgtcgacgagcactccaccaagtctgacgaggagtacgacgacctagccatgcaggacgtgatggggaacggcaactgctccgacgacgacgacgagcaagctgcagggtacggcaccaggggctcacagcccatggaggagagcatccttggagcagatggcgccgtggtggagggcaggtaccaccacaacctggacctcttcacgatgtccaaggacgtcgccgccacaaagatgccgtgcgcgtgacacagcctaacccgaccaacccctgggggaagaaagacaccactgccacggttcactgtcagccgcggtgctcttgggcacattctccggtggtgcttaggagtctgcaccggttactgtacccatatgagcttatgttggtggttgtgactgttagaggatctcatgcttggctatatataggaatcctggggctttgcccttttgtcgaaactcgaataatgaaaagttgaaattgcattctgaatttgc

SEQ ID NO: 61099 - protein, 212 aa, Triticum aestivum
  peptide (1)..(212): Ceres Seq. ID no. 13661595
DSGDGNANGSTGSGRSVGNHMVNPSQIGKAESVNLQFGSFGISAWLSDTGGGTSHAGSVDDLRADGIETSGRYFSSCCSSPKTSDCASKEHMEDYSVYGSEEDADDPPDAETDEDLTDEERDAHEIEAGSVDEHSTKSDEEYDDLAMQDVMGNGNCSDDDDEQAAGYGTRGSQPMEESILGADGAVVEGRYHHNLDLFTMSKDVAATKMPCA

SEQ ID NO: 61100 - protein, 192 aa, Triticum aestivum
  peptide (1)..(192): Ceres Seq. ID no. 13661596
MVNPSQIGKAESVNLQFGSFGISAWLSDTGGGTSHAGSVDDLRADGIETSGRYFSSCCSSPKTSDCASKEHMEDYSVYGSEEDADDPPDAETDEDLTDEERDAHEIEAGSVDEHSTKSDEEYDDLAMQDVMGNGNCSDDDDEQAAGYGTRGSQPMEESILGADGAVVEGRYHHNLDLFTMSKDVAATKMPCA

SEQ ID NO: 61101 - protein, 121 aa, Triticum aestivum
  peptide (1)..(121): Ceres Seq. ID no. 13661597
MEDYSVYGSEEDADDPPDAETDEDLTDEERDAHEIEAGSVDEHSTKSDEEYDDLAMQDVMGNGNCSDDDDEQAAGYGTRGSQPMEESILGADGAVVEGRYHHNLDLFTMSKDVAATKMPCA

SEQ ID NO: 61102 - DNA, 1120 bp, Triticum aestivum
  misc_feature (1)..(1120): Ceres Seq. ID no. 13661606
cttttctttcgataagacctcactctgctttcctctgctctgctcctactcgtgtcccggtcacgccacctcccgaccccccaaatcgcgagaccacccgcggcggctggccggccggcgggataggcgacgaggcgaagtaactcgagacggcgcgggcggaccgctccgtgtggctcatgaagcgctcccccatcgtctcccaggcccggcagggcgcctccgcctcctccagcgaagctaaccctaacccggccgtcgccaaggtcgtgctgtccctcgaccccctcagctccgctgagccctccctccagctcaagatggagatgcctcaaactagggaaactagcacttgcaacttaccaaagagttgccccttgaatatgttcttcctcctccgtctcttcgctatcgccatcctgccttgctctgccaacaacgccacccaactggtctatgacacagaaggcaacgagctaaatagcaagtcaaattactacatcctcccagccaaacctgcaagcggtggcggcctcaaagccatcccaaccggtctacggtgcctacattttgtggtcgaggagcgcagcgagacgactctcctcgacacgcccatgcgattcatgccgttgccagaacacgcttctaccactgagccgatccgcctttcgagtgacatatggatccgcctttcgagtgacatatggatcgagtttcacgacttgagaagcttttgctccgaaaggctagattggcccttaccgaacaggtgccggagtcgtcatcaggagagcctaaacacatggctgccggcagtgaagagggcctaagatcatttggggtgttccgggacggatctctcgggatataagataatttcatgtgttggcaaggggccatgcagagacctaggtttgcatgtttacaaggacaagacatggctgactgtaaaggataaaccttttatggttgtgtttaggaaaaagactatataggtgtttttttgcttgcttcttgaggtgatccctgtaggcgagttcattgtatcgccactgtggtgttcatgttatgtaatgtgttcccccactttgcaataaagcgatactaactatattatgtg

SEQ ID NO: 61103 - protein, 216 aa, Triticum aestivum
  peptide (1)..(216): Ceres Seq. ID no. 13661607
MKRSPIVSQARQGASASSSEANPNPAVAKVVLSLDPLSSAEPSLQLKMEMPQTRETSTCNLPKSCPLNMFFLLRLFAIAILPCSANNATQLVYDTEGNELNSKSNYYILPAKPASGGGLKAIPTGLRCLHFVVEERSETTLLDTPMRFMPLPEHASTTEPIRLSSDIWIRLSSDIWIEFHDLRSFCSERLDWPLPNRCRSRHQESLNTWLPAVKRA

SEQ ID NO: 61104 - protein, 169 aa, Triticum aestivum
  peptide (1)..(169): Ceres Seq. ID no. 13661608
MEMPQTRETSTCNLPKSCPLNMFFLLRLFAIAILPCSANNATQLVYDTEGNELNSKSNYYILPAKPASGGGLKAIPTGLRCLHFVVEERSETTLLDTPMRFMPLPEHASTTEPIRLSSDIWIRLSSDIWIEFHDLRSFCSERLDWPLPNRCRSRHQESLNTWLPAVKRA

SEQ ID NO: 61105 - protein, 167 aa, Triticum aestivum
  peptide (1)..(167): Ceres Seq. ID no. 13661609
MPQTRETSTCNLPKSCPLNMFFLLRLFAIAILPCSANNATQLVYDTEGNELNSKSNYYILPAKPASGGGLKAIPTGLRCLHFVVEERSETTLLDTPMRFMPLPEHASTTEPIRLSSDIWIRLSSDIWIEFHDLRSFCSERLDWPLPNRCRSRHQESLNTWLPAVKRA

SEQ ID NO: 61106 - DNA, 846 bp, Triticum aestivum
  misc_feature (1)..(846): Ceres Seq. ID no. 15173102
taccccggcgagtaaggaggcacggccatcgccaacgtgctcttcggaagatacaatccagggggaaggctgccgctaacgtggtacaagaacgagtacatcagcaagatcccgatgacgtccatggcgctgcggccggtcgccggcaaggggtaccctggcaggacctacaagttctacggcgggccggaagtgctctacccgttcggccacggtctcagctacagcaacttcagctacgcgtccgacgccaccgccgcatcggtcacagtcccggttggcgcatgggagtcctgcaagcagctcacccgcaagccggggacggccccgctggcctgcccggccgtcaacgttgccgggcacgggtgccaagaggaggtaggcttcagtctgaccgtggccaaccgtggcagcagggacggcacccacgtcgtgatggtctacacggtgccgccggccgaggtggacgacgcaccgctgaagcagctggtggcgttccggagggtgttcgtgcccgctggagccgccgtccaagtgccgttcacgctcaatgtgtgcaaggcgttcgccatcgtcgaggagacggcgtacaccgtcgtgccgtcgggcgtcagcacggtcctggtcggagacgaagcgctgtcattctctttccccgtgaagatcgagctggctgtatagattctttacatgtccattgaattttttagtttctttacataccaaagatgaaagattgaaggccaaaccgttagatactgtgggcagcacgtataatatcttctccttttctttgcgagaagtgtaatatcttctcctctgctactataaacgcacagtttacac

SEQ ID NO: 61107 - protein, 232 aa, Triticum aestivum
  peptide (1)..(232): Ceres Seq. ID no. 15173103
PRRVRRHGHRQRALRKIQSRGKAAANVVQERVHQQDPDDVHGAAAGRRQGVPWQDLQVLRRAGSALPVRPRSQLQQLQLRVRRHRRIGHSPGWRMGVLQAAHPQAGDGPAGLPGRQRCRARVPRGGRLQSDRGQPWQQGRHPRRDGLHGAAGRGGRRTAEAAGGVPEGVRARWSRRPSAVHAQCVQGVRHRRGDGVHRRAVGRQHGPGRRRSAVILFPREDRAGCIDSLHVH

SEQ ID NO: 61108 - protein, 188 aa, Triticum aestivum
  peptide (1)..(188): Ceres Seq. ID no. 15173104
MTSMALRPVAGKGYPGRTYKFYGGPEVLYPFGHGLSYSNFSYASDATAASVTVPVGAWESCKQLTRKPGTAPLACPAVNVAGHGCQEEVGFSLTVANRGSRDGTHVVMVYTVPPAEVDDAPLKQLVAFRRVFVPAGAAVQVPFTLNVCKAFAIVEETAYTVVPSGVSTVLVGDEALSFSFPVKIELAV

SEQ ID NO: 61109 - protein, 185 aa, Triticum aestivum
  peptide (1)..(185): Ceres Seq. ID no. 15173105
MALRPVAGKGYPGRTYKFYGGPEVLYPFGHGLSYSNFSYASDATAASVTVPVGAWESCKQLTRKPGTAPLACPAVNVAGHGCQEEVGFSLTVANRGSRDGTHVVMVYTVPPAEVDDAPLKQLVAFRRVFVPAGAAVQVPFTLNVCKAFAIVEETAYTVVPSGVSTVLVGDEALSFSFPVKIELAV

SEQ ID NO: 61110 - DNA, 1088 bp, Triticum aestivum
  misc_feature (1)..(1088): Ceres Seq. ID no. 13661175
cgaaaagcacccaagttcagtctagatcgagtaggtagaagcccattgatcaacttcacttagcatttttgtccatccttgtccatggccactcaccccaatttccatgctagtgcatttgatgggtcggtgcaaaacaccgagtttaagttcagtagcttgtactggcaccacatttattctggaccaagcccaaaccaatcagttttgataggtgcagaggctaccactgggttgggccagtcagcagttaacgattggacgatttatggtggggttggctccgacgcggagctagtggcacgcgcacaaggattgcatctctacgctggtagttggcacaatacattcacccttcgtttcgagattgaaaggcttaagaaaagcacgcttcaggtaatgggagcatctgtagaggatgaaggtgagtggtctattgtcggcgggacaggtgatctcgcgatggcacgtggtgttgtagccaaaaggctgcatgagaaaacagatggtggagacatagtcgagcttaccatacatggattctgtcgcatgcaactgcccattctcaacaagaggggcccatggggtagcaagcagggttccgctgttggtttggaaaaaccctccaagattgcaagtatcaccatccattatcaagaaataattaattcgtttgaatatatttacgtcgaccaatatggcaacattggtaacacaaatatttggggcactaagagtcccaatcacgcagagatcgtgctcggccctgatgagatagtgacgggaatgtccggaactgtgatcaaacataataatctcgatgttatacagacactgatgtttaccaccagcaagaaaacatacgggccttatggaaacaccacaaatatacaaggtggtactactttcagcaccgtcgtgccaaatggccaagcaattgtcggcttcttcgggcatactgatatgaaatgcctgaacggaattggtgtctatatggcctaggttttatttgagtcatatgtggttaatttggttgttctttcaagaagaataagatgtttagggatctccggccccgttcttatgat

SEQ ID NO: 61111 - protein, 305 aa, Triticum aestivum
  peptide (1)..(305): Ceres Seq. ID no. 15220076
MATHPNFHASAFDGSVQNTEFKFSSLYWHHIYSGPSPNQSVLIGAEATTGLGQSAVNDWTIYGGVGSDAELVARAQGLHLYAGSWHNTFTLRFEIERLKKSTLQVMGASVEDEGEWSIVGGTGDLAMARGVVAKRLHEKTDGGDIVELTIHGFCRMQLPILNKRGPWGSKQGSAVGLEKPSKIASITIHYQEIINSFEYIYVDQYGNIGNTNIWGTKSPNHAEIVLGPDEIVTGMSGTVIKHNNLDVIQTLMFTTSKKTYGPYGNTTNIQGGTTFSTVVPNGQAIVGFFGHTDMKCLNGIGVYMA

SEQ ID NO: 61112 - protein, 200 aa, Triticum aestivum
  peptide (1)..(200): Ceres Seq. ID no. 15220077
MGASVEDEGEWSIVGGTGDLAMARGVVAKRLHEKTDGGDIVELTIHGFCRMQLPILNKRGPWGSKQGSAVGLEKPSKIASITIHYQEIINSFEYIYVDQYGNIGNTNIWGTKSPNHAEIVLGPDEIVTGMSGTVIKHNNLDVIQTLMFTTSKKTYGPYGNTTNIQGGTTFSTVVPNGQAIVGFFGHTDMKCLNGIGVYMA

SEQ ID NO: 61113 - protein, 179 aa, Triticum aestivum
  peptide (1)..(179): Ceres Seq. ID no. 15220078
MARGVVAKRLHEKTDGGDIVELTIHGFCRMQLPILNKRGPWGSKQGSAVGLEKPSKIASITIHYQEIINSFEYIYVDQYGNIGNTNIWGTKSPNHAEIVLGPDEIVTGMSGTVIKHNNLDVIQTLMFTTSKKTYGPYGNTTNIQGGTTFSTVVPNGQAIVGFFGHTDMKCLNGIGVYMA

SEQ ID NO: 61114 - DNA, 774 bp, Triticum aestivum
  misc_feature (1)..(774): Ceres Seq. ID no. 13661176
cctagcagaggaggcggcggaggcagagaaggagagcggcagctcgcgcgcgcgcgcccccattgccgccgcagcaggagcccgccgattccaatccaaggaggagctttgaaggtttgtcagggcggggaagatggttctcaagacagagctctgccgtttcagtggtgccaagatatacccagggaaggggatcagattcatccgctcagactctcaagtcttccttttctccaactcaaagtgcaagagctacttccacaaccgtctcaagccagctaagcttgcatggacggccatgtacaggaagcagcacaagaaggatattcatgctgaggctgcaaagaagaggcgccgcaccaccaagaggccgtattccaggtcaattgtaggtgcttcccttgaagttatccagaagaagagagctgagaagccggaggtccgtgatgcagccagggaagcagctctgcgtgagatcaaggagcgcattaagaagaccaaggatgagaagaaagctaagaaggtggaggtgacgaaatcccagaagaccgccggcagaggcaatgcccccaaacccgggaaggcccccaagcttggcggtggtggtgggaagcgctaggtggcgtccctgccgatcaatgcgaaattttgaactagttacatgatgtcctaccctgtatcttttaggaagtttttggctcaaacctgctgttgccgtcggtatgcagcatctgggtgcataaaccgtcgtcaatgtgagattgttttatgctc

SEQ ID NO: 61115 - protein, 161 aa, Triticum aestivum
  peptide (1)..(161): Ceres Seq. ID no. 13661177
MVLKTELCRFSGAKIYPGKGIRFIRSDSQVFLFSNSKCKSYFHNRLKPAKLAWTAMYRKQHKKDIHAEAAKKRRRTTKRPYSRSIVGASLEVIQKKRAEKPEVRDAAREAALREIKERIKKTKDEKKAKKVEVTKSQKTAGRGNAPKPGKAPKLGGGGGKR

SEQ ID NO: 61116 - protein, 106 aa, Triticum aestivum
  peptide (1)..(106): Ceres Seq. ID no. 13661178
MYRKQHKKDIHAEAAKKRRRTTKRPYSRSIVGASLEVIQKKRAEKPEVRDAAREAALREIKERIKKTKDEKKAKKVEVTKSQKTAGRGNAPKPGKAPKLGGGGGKR

SEQ ID NO: 61117 - protein, 93 aa, Triticum aestivum
  peptide (1)..(93): Ceres Seq. ID no. 13661179
PSRGGGGGREGERQLARARPHCRRSRSPPIPIQGGALKVCQGGEDGSQDRALPFQWCQDIPREGDQIHPLRLSSLPFLQLKVQELLPQPSQAS

SEQ ID NO: 61118 - DNA, 849 bp, Triticum aestivum
  misc_feature (1)..(849): Ceres Seq. ID no. 13661185
agaacatcctaatcgaaaatagattgttcctacacacgccatttgcattcttctctctcttcagctactaaccaacgaatctctctctctctctaaaacaatggctcaggaagacgtcgctgctgctgctgctgctgctaacggtgctaccacggcggtggagaagtccgttacgttcacggcgtacaagcctcagctgattgtggaagcacagaaggtcggtgacgctgttgcgttctacaaggctgtgtttggcgccgtggagactggacgctctctctaccccaagcgtaaggctgaccaagagctccctcacctcgtctcttccgagctcgagctcgccggaacaaccgtagtcgtttctgacgtatccgttaactctggccctgatgcgaagacggggactatgcctgcgatcctcgaaaccgatgacgtggaagctgccgttgcgaaggccgttgcggctggagctgtcaaggaggaggaggaggaggaggtctcggagggtggagtcaaggggaaagtgacggatccgttcgggttcacgtggatctttgttgctccggcgaagaagagtgagaaggaaggaaacaaagaggtctaactgttaaccgtcggatctgatcatttcgtcggtttctgaacgaactttttaatattattatcctatgctttttattagtttgtcttttgtggaatctccggtatgagtaaaccggattgattaggctaaaatgacttttgttcttcaccaccttttgacataaacttggtgaaagaaataacaaaaatatcggatgttaatgtcaaaaaaaaaaaaaaaaaagcttatcgataccgtcgacctyg

SEQ ID NO: 61119 - protein, 167 aa, Triticum aestivum; identical to SEQ ID NO: 1109
  peptide (1)..(167): Ceres Seq. ID no. 15220082

SEQ ID NO: 61120 - DNA, 870 bp, Triticum aestivum
  misc_feature (1)..(870): Ceres Seq. ID no. 13664275
agaacatcctaatcgaaaaataccaactctacagttaagatctacctcacagtttaataacctttatttcatactttctcctctatttcatccaaacaccaaagttttagaaatggcaacagcatcggttaacatgcagtcagtcttcgcctgtgggttggccactcgcaagatcaacacaaacaagctcttcttcgccggaaacttcccaaatctcaagaggaactatccggtgggagtgaagtgcatggctgagggagaacccatgaaggacgagtccgcaccttcgacctccgcggctaagcctttgtctagctcatcatcgccgccacctcctccacctcctactaaacctaaggtgagcacgaagtttagcgacttgctagcgtttagcggtccagcaccagaaagaataaacgggcgtttagcgatggttggattcgtggcggccttggcggttgaactttccaagggtgaaaacgttttggctcagatctcggacggcggcgtctcgtggttccttggtacgactgcgatcttgacgcttgcgtcgcttgtaccccttttcaagggtatcaccgccgagtctaagtccaaaggtttcatgacgtccgacgctgagctttggaacggacgtttcgcgatgcttggtttggtcgcgttggcgttcactgagtttgtcaagggtgggacccttgtctgaggaaagaaaatttcttattggggagaatgttatattacagttttgcccttgtaaagttatctggtatgatatgtgtttaagcctatggtgtgtttctttacatatgtattagtgacatgagactttgtggtaaagcactatatcagtaaaagtagtgatgtttttct

SEQ ID NO: 61121 - protein, 233 aa, Triticum aestivum
  peptide (1)..(233): Ceres Seq. ID no. 13664276
EHPNRKIPTLQLRSTSQFNNLYFILSPLFHPNTKVLEMATASVNMQSVFACGLATRKINTNKLFFAGNFPNLKRNYPVGVKCMAEGEPMKDESAPSTSAAKPLSSSSSPPPPPPPTKPKVSTKFSDLLAFSGPAPERINGRLAMVGFVAALAVELSKGENVLAQISDGGVSWFLGTTAILTLASLVPLFKGITAESKSKGFMTSDAELWNGRFAMLGLVALAFTEFVKGGTLV

SEQ ID NO: 61122 - protein, 196 aa, Triticum aestivum
  peptide (1)..(196): Ceres Seq. ID no. 13664277
MATASVNMQSVFACGLATRKINTNKLFFAGNFPNLKRNYPVGVKCMAEGEPMKDESAPSTSAAKPLSSSSSPPPPPPPTKPKVSTKFSDLLAFSGPAPERINGRLAMVGFVAALAVELSKGENVLAQISDGGVSWFLGTTAILTLASLVPLFKGITAESKSKGFMTSDAELWNGRFAMLGLVALAFTEFVKGGTLV

SEQ ID NO: 61123 - protein, 189 aa, Triticum aestivum
  peptide (1)..(189): Ceres Seq. ID no. 13664278
MQSVFACGLATRKINTNKLFFAGNFPNLKRNYPVGVKCMAEGEPMKDESAPSTSAAKPLSSSSSPPPPPPPTKPKVSTKFSDLLAFSGPAPERINGRLAMVGFVAALAVELSKGENVLAQISDGGVSWFLGTTAILTLASLVPLFKGITAESKSKGFMTSDAELWNGRFAMLGLVALAFTEFVKGGTLV

SEQ ID NO: 61124 - DNA, 911 bp, Triticum aestivum
  misc_feature (1)..(911): Ceres Seq. ID no. 13664381
atactaactcacacacaaattactagacatcctcgttctctgtgcagttccaacaatcctagtgatggcgtgtgcaagccatgtcatgattttccttgtgttctcaaatttagccatagccatggccacccttcctcctcccttgtatgaccctaacctagggaagtgtaagaatagttgtgaggaagagctcaatctatctttgtacctacaccaagttgtgacaggaccagcccacaaccaagaagtaattctcagccctggctttcctaacatgtttggtatgatagccgtcgttgactggaccatatacgccgtccctgattccacttcaagtatcattgctcgggcaaagggaatgactatccaggctacccaaagcgaggtcaatggtgttgcctggtttcttcctttcagcatggtctttcaggattccaggtttggcggttctacgctgcaagtgatgggagcaattactggtgcagtagatggtgagtgggctattgtgggtgggactggcaaattgtccacggcacgtggtactattaagttcatagcagtccaggcacagagcaccccaacctttgaggtctacagaaggattgatatccatgcattctacacacccgcaccggccgtttaagatatgaagaatacacatgcagcactccgactggaaaggcgagccagcaatctcgcataaataaaatatgtgttttccattatgactagtagtactacctcgttgtaatatgtggtcaagtcgtctttactttcaaaaaatgcaggagtttgtggcatatcattgaaaatcttagacataaatccacaaggcctttgtccttttttgtaaaattggactgtatgatttaatttggaatattacaatcttaatatattatgtgaaaagg

SEQ ID NO: 61125 - protein, 192 aa, Triticum aestivum
  peptide (1)..(192): Ceres Seq. ID no. 13664382
MACASHVMIFLVFSNLAIAMATLPPPLYDPNLGKCKNSCEEELNLSLYLHQVVTGPAHNQEVILSPGFPNMFGMIAVVDWTIYAVPDSTSSIIARAKGMTIQATQSEVNGVAWFLPFSMVFQDSRFGGSTLQVMGAITGAVDGEWAIVGGTGKLSTARGTIKFIAVQAQSTPTFEVYRRIDIHAFYTPAPAV

SEQ ID NO: 61126 - protein, 185 aa, Triticum aestivum
  peptide (1)..(185): Ceres Seq. ID no. 13664383
MIFLVFSNLAIAMATLPPPLYDPNLGKCKNSCEEELNLSLYLHQVVTGPAHNQEVILSPGFPNMFGMIAVVDWTIYAVPDSTSSIIARAKGMTIQATQSEVNGVAWFLPFSMVFQDSRFGGSTLQVMGAITGAVDGEWAIVGGTGKLSTARGTIKFIAVQAQSTPTFEVYRRIDIHAFYTPAPAV

SEQ ID NO: 61127 - protein, 173 aa, Triticum aestivum
  peptide (1)..(173): Ceres Seq. ID no. 13664384
MATLPPPLYDPNLGKCKNSCEEELNLSLYLHQVVTGPAHNQEVILSPGFPNMFGMIAVVDWTIYAVPDSTSSIIARAKGMTIQATQSEVNGVAWFLPFSMVFQDSRFGGSTLQVMGAITGAVDGEWAIVGGTGKLSTARGTIKFIAVQAQSTPTFEVYRRIDIHAFYTPAPAV

SEQ ID NO: 61128 - DNA, 1113 bp, Triticum aestivum
  misc_feature (1)..(1113): Ceres Seq. ID no. 13661469
atcaatcactcttaacccaaatcgctgaaagcagtacagtatgacgatcatgcggatgttcctagctctctgcgcccttgggttcgtcgcaggagtagtagaagatggatcgtcgtttgacgtcagcgcttacccggtcaagtgggatgaggacccatctgtgggatcaggggacgtggccgctccaccgtctcccggtactgaggcgccggcgccgcctccgaagcatcacatgatggtgaagaagggcatgctgtttctggagcgcgacctctttgccggggcgctcctgccggcaaacacccggctgggctacgtcagacgcacgagttcaccaggcccagtcatttcaagtactacaagcccagtaccacccttcaggtacagcagtttcgagaaaatcttgaagttttacaatgtaacgcacggctccaagcaagcagggaggatctcggagactctccagttctgcgaggaggcgggagacaaggaaccacacgcgtgcgcaacgtctgtggccgccgcgagagacttcgcggccaccgttttggggaccaaggagccgcgcgcggtcacttcaatccttcacggacgcacacaacccctccgctacgtggtggcgcccaacggaatcgccagcgtcggcggcgacgcggtggtgccatgccaccccctggcgtaccctgtggaggtcttttactgccacaaccccagcaacgtgcaagcgctccgtgtccaacttgttggacaggaggacccttccgtcggcgccacggccatcgcagtatgccacaaggataccagctactgggatgaggcatacttcatgatgctcaacggatcccgtggcgagccgatatgtcacttcatgccggccaattaccttctgtggctctaggaggtgaggacacgagcagcaagtacgagagttgagagacagccggccggtgacgtgtaatttcggacttagtagccgatctagcttaaataaacgtcactgtatctgtatgcccttaccagttattgtaagcgcatgtagcgcaaagatatatgtaccccgaaaaatgatacgtatgatacagatatatattgtgaamtrraaaaaaagggggg

SEQ ID NO: 61129 - protein, 285 aa, Triticum aestivum
  peptide (1)..(285): Ceres Seq. ID no. 15218784
MTIMRMFLALCALGFVAGVVEDGSSFDVSAYPVKWDEDPSVGSGDVAAPPSPGTEAPAPPPKHHMMVKKGMLFLERDLFAGALLPANTRLGYVRRTSSPGPVISSTTSPVPPFRYSSFEKILKFYNVTHGSKQAGRISETLQFCEEAGDKEPHACATSVAAARDFAATVLGTKEPRAVTSILHGRTQPLRYVVAPNGIASVGGDAVVPCHPLAYPVEVFYCHNPSNVQALRVQLVGQEDPSVGATAIAVCHKDTSYWDEAYFMMLNGSRGEPICHFMPANYLLWL

SEQ ID NO: 61130 - protein, 282 aa, Triticum aestivum
  peptide (1)..(282): Ceres Seq. ID no. 15218785
MRMFLALCALGFVAGVVEDGSSFDVSAYPVKWDEDPSVGSGDVAAPPSPGTEAPAPPPKHHMMVKKGMLFLERDLFAGALLPANTRLGYVRRTSSPGPVISSTTSPVPPFRYSSFEKILKFYNVTHGSKQAGRISETLQFCEEAGDKEPHACATSVAAARDFAATVLGTKEPRAVTSILHGRTQPLRYVVAPNGIASVGGDAVVPCHPLAYPVEVFYCHNPSNVQALRVQLVGQEDPSVGATAIAVCHKDTSYWDEAYFMMLNGSRGEPICHFMPANYLLWL

SEQ ID NO: 61131 - protein, 280 aa, Triticum aestivum
  peptide (1)..(280): Ceres Seq. ID no. 15218786
MFLALCALGFVAGVVEDGSSFDVSAYPVKWDEDPSVGSGDVAAPPSPGTEAPAPPPKHHMMVKKGMLFLERDLFAGALLPANTRLGYVRRTSSPGPVISSTTSPVPPFRYSSFEKILKFYNVTHGSKQAGRISETLQFCEEAGDKEPHACATSVAAARDFAATVLGTKEPRAVTSILHGRTQPLRYVVAPNGIASVGGDAVVPCHPLAYPVEVFYCHNPSNVQALRVQLVGQEDPSVGATAIAVCHKDTSYWDEAYFMMLNGSRGEPICHFMPANYLLWL

SEQ ID NO: 61132 - DNA, 907 bp, Triticum aestivum
  misc_feature (1)..(907): Ceres Seq. ID no. 13661617
aaaagtcatatcttcttgtaccactctccttcaaacatagtcagagaaaaacagcaactcttgtctgaaaaatcagagagagagagagagagaaaaagaatggatcaaaatgtgctaggcactcaagtatacccctacacgacccaaacccatggccagtgcatcatcgttnaccagatcgatggatcatcatcaggcgaaggatcaaagccggtgaagcggcggaggaggaggaggagcaaagggtcgtctgccacgagcgaagatgacatgacggcgatcggagtgatgttgaggaagaggaagttgaccgatgagcaagtgaatatgctcgaattcagcttcgagaacgagcacaagcttgagtcagggaggaaagagaagatcgccgcagagttaggtctcgacccgagacaggtggctgtttggttccagaaccgccgtgcacggtggaagaacaagaaactcgaggaagaatacgccaaactgaagagccaacacgacaccgtcgtcctcggccaatgtcagctcgaatctcaggtattaaaactgtcggaacaattgagtgaagctcaaaacgaaattcgaaaactttccgagcgacttgctcaagaaacattaacaaacagtccgagttcacctcgttctgttgaagccaatggtgcaccaattcatttcgagtttccgccggatgttaattacaacatcccgttttacatatcggataatagttacttgcagaacatggagtattgggatggtttgtatgtgtaattttaacaactaaaatatttagagtctatggatcgaaaatcatgtttaaattaatgtataaatagatgtttgtcaacctgttgtaaatgcagtgtttaaaatatttttattttaataaataactttgtttctc

SEQ ID NO: 61133 - protein, 257 aa, Triticum aestivum
  peptide (1)..(257): Ceres Seq. ID no. 13661618
  misc_feature (58)..(58): Xaa is any aa, unknown or other
KSHIFLYHSPSNIVREKQQLLSEKSERERERKRMDQNVLGTQVYPYTTQTHGQCIIVXQIDGSSSGEGSKPVKRRRRRRSKGSSATSEDDMTAIGVMLRKRKLTDEQVNMLEFSFENEHKLESGRKEKIAAELGLDPRQVAVWFQNRRARWKNKKLEEEYAKLKSQHDTVVLGQCQLESQVLKLSEQLSEAQNEIRKLSERLAQETLTNSPSSPRSVEANGAPIHFEFPPDVNYNIPFYISDNSYLQNMEYWDGLYV

SEQ ID NO: 61134 - protein, 224 aa, Triticum aestivum
  peptide (1)..(224): Ceres Seq. ID no. 13661619
  misc_feature (25)..(25): Xaa is any aa, unknown or other
MDQNVLGTQVYPYTTQTHGQCIIVXQIDGSSSGEGSKPVKRRRRRRSKGSSATSEDDMTAIGVMLRKRKLTDEQVNMLEFSFENEHKLESGRKEKIAAELGLDPRQVAVWFQNRRARWKNKKLEEEYAKLKSQHDTVVLGQCQLESQVLKLSEQLSEAQNEIRKLSERLAQETLTNSPSSPRSVEANGAPIHFEFPPDVNYNIPFYISDNSYLQNMEYWDGLYV

SEQ ID NO: 61135 - protein, 167 aa, Triticum aestivum
  peptide (1)..(167): Ceres Seq. ID no. 13661620
MTAIGVMLRKRKLTDEQVNMLEFSFENEHKLESGRKEKIAAELGLDPRQVAVWFQNRRARWKNKKLEEEYAKLKSQHDTVVLGQCQLESQVLKLSEQLSEAQNEIRKLSERLAQETLTNSPSSPRSVEANGAPIHFEFPPDVNYNIPFYISDNSYLQNMEYWDGLYV

SEQ ID NO: 61136 - DNA, 1028 bp, Triticum aestivum
  misc_feature (1)..(1028): Ceres Seq. ID no. 12623490
gcaggccgtcgctagctatcatccaaagaccaacgagtacgccaacatgtgaagtgcaccgagctgagcagtgagtgagcggccggggacgcggtcgacgagccaagaatggcgacgcaccatcgtgctctcctcctcctgctcgccgtgctgctccccgcggccgccttcgccgacccggacgccgtgcaggacttctgcgtgccggaccccgggcgcggccggccggtggagctcaacctcatccgctcctacccgtgcaggaaccccgcgaacctcaccgcgggcgacttcgccttctcaggcgtgcgcgcggcgggcaacttctcggcggacacggggttcgcgggggtgtccgtcacgccggcgcagttcccgggcctgcacaccctcggcatgtccttcgcgcgcgccgacctctcggcggccggcggcgtcaacccgccccactaccacccgcgcgccaccgagacggcgctagtgctcgccggccgcgtctacgccggcttcgtcgacaccgccggccgcctcttcgccaaggtgctcgtggagggggaggtcatggtgttcccccgcggcatggtgcacttccagctcaacgtcggcgaccagcccgccaccgtctacggcaccttcaacagcgagaaccccgggatcgtgcgcgtcccggccaccgtgttcgggtccgggatcagggacgccgtcctcgagagggccttcgggctctcccccgaggagctccggcggatcgagaagaggttcggcgtgcccaagaaggccgagctggaggactagttaattagtttattactacttcgttcgttgctggccggccatggccgcatgcgcatgattagttgacaggtagacttgtgggttgggagtatgggcaatacttatctctttccatttgattaatataatatacttgtggatttatagtggtggttggtagggctcatccgcgtaatgatacgaaaagtgtaaggtatacaaatgattgcgagtatattatactctctgttttt

SEQ ID NO: 61137 - protein, 228 aa, Triticum aestivum
  peptide (1)..(228): Ceres Seq. ID no. 12623491
MATHHRALLLLLAVLLPAAAFADPDAVQDFCVPDPGRGRPVELNLIRSYPCRNPANLTAGDFAFSGVRAAGNFSADTGFAGVSVTPAQFPGLHTLGMSFARADLSAAGGVNPPHYHPRATETALVLAGRVYAGFVDTAGRLFAKVLVEGEVMVFPRGMVHFQLNVGDQPATVYGTFNSENPGIVRVPATVFGSGIRDAVLERAFGLSPEELRRIEKRFGVPKKAELED

SEQ ID NO: 61138 - protein, 132 aa, Triticum aestivum
  peptide (1)..(132): Ceres Seq. ID no. 12623492
MSFARADLSAAGGVNPPHYHPRATETALVLAGRVYAGFVDTAGRLFAKVLVEGEVMVFPRGMVHFQLNVGDQPATVYGTFNSENPGIVRVPATVFGSGIRDAVLERAFGLSPEELRRIEKRFGVPKKAELED

SEQ ID NO: 61139 - DNA, 808 bp, Triticum aestivum
  misc_feature (1)..(808): Ceres Seq. ID no. 13661143
aacatcctaatcgaaaaacaccacacgcaacgcaagccttcgcacccgaacgcaagaaagagagagagagagagagagagagcacacgcggcgggggaaaagcaggagcgaagcgagggatcgggaggaacatcggcgaggccatggcgcggcggggcacggaggcgttcccggacctgggcgcgcactgcgacagggaggactgcaaccagctcgacttcctgcccttcgactgcaacggctgcggcaaggtgttctgcacggagcaccgcgcgtacgttgaccacggctgcccgctcgcggccgacaacggccgcaccgtcgtcgtctgcgaggcctgcggcgactccatcgagcgcgccgggtcggacgagacggatgcgcagatcctcgagaagcacgcgcggtcgcgccggggctgcgacccggccaggaagctcaagccgcgatgccccgcgcggcgctgcaaggagacactcaccttctccaacacgagccactgcaaggagtgcgggcagaagctgtgcctcaagcaccggttccccgaggaccacgggtgctcgcgcgtgtcgccggtgggggccgccgccgccgcgaggagggccggcgactgcggccgcgacgcgcagaagacaaaggacggcggtgggtgggcgctgccgccgttgatccggaatttcaattgattaccctgaagctgaaattgtggctgggatttacgcaattcatggaacgtttgttttctccggtgtcatattttcaattgtgcacattttgttgttgttaaatgaagaatcaaattcagtct

SEQ ID NO: 61140 - protein, 227 aa, Triticum aestivum
  peptide (1)..(227): Ceres Seq. ID no. 13661144
HPNRKTPHATQAFAPERKKERERERESTRGGGKAGAKRGIGRNIGEAMARRGTEAFPDLGAHCDREDCNQLDFLPFDCNGCGKVFCTEHRAYVDHGCPLAADNGRTVVVCEACGDSIERAGSDETDAQILEKHARSRRGCDPARKLKPRCPARRCKETLTFSNTSHCKECGQKLCLKHRFPEDHGCSRVSPVGAAAAARRAGDCGRDAQKTKDGGGWALPPLIRNFN

SEQ ID NO: 61141 - protein, 222 aa, Triticum aestivum
  peptide (1)..(222): Ceres Seq. ID no. 13661145
NILIEKHHTQRKPSHPNARKRERERERAHAAGEKQERSEGSGGTSARPWRGGARRRSRTWARTATGRTATSSTSCPSTATAAARCSARSTARTLTTAARSRPTTAAPSSSARPAATPSSAPGRTRRMRRSSRSTRGRAGAATRPGSSSRDAPRGAARRHSPSPTRATARSAGRSCASSTGSPRTTGARACRRWGPPPPRGGPATAAATRRRQRTAVGGRCRR

SEQ ID NO: 61142 - protein, 180 aa, Triticum aestivum
  peptide (1)..(180): Ceres Seq. ID no. 13661146
MARRGTEAFPDLGAHCDREDCNQLDFLPFDCNGCGKVFCTEHRAYVDHGCPLAADNGRTVVVCEACGDSIERAGSDETDAQILEKHARSRRGCDPARKLKPRCPARRCKETLTFSNTSHCKECGQKLCLKHRFPEDHGCSRVSPVGAAAAARRAGDCGRDAQKTKDGGGWALPPLIRNFN

SEQ ID NO: 61143 - DNA, 725 bp, Triticum aestivum
  misc_feature (1)..(725): Ceres Seq. ID no. 12623748
ctgaatagtcttgaaccgataaggagaggagacgaccgtaaaatcccggagaggagcgccccgggcagcgatggcgacgagggtgtgggcggcgtcggcggcggccttaaaccccactctcctccccctttcgtcttccgcacgtccgagcaggcccgccccctccacgcggccgagcgggcacctccgactgcgcagccgcccgccgcggccggccagggtcgtgtgccgccgcgccaagaacgccgccttcgaggactacaagttcccggactccatccccgagttcgccgagcaggagacgagcaagttcagggagcacatgacgtggcggctggagcagaagaaggagcagtacttcgggaagcacgtggaggacatcgtcgacgtctgcaccgaggtcttgagcacgttcttgcaacatgagtactgcggacccgggacgctcctggttcaccccttcttggatatgaagggcgagatcaaagagaggggcctccccggcgcgcctcaggctgcgcgcgcccccatcgcgtgggctgagaagaacatcgacaaggactggaaggagtgggacggagattgatagcgctgacttccttttgtctctgctgtagcagcagcatgtggtacctgtagtagtagtagtcttaatgtttcagtagcagcaggaatctaactatagattttagtttagtcatattcatcctatctggatcccgaga

SEQ ID NO: 61144 - protein, 171 aa, Triticum aestivum
  peptide (1)..(171): Ceres Seq. ID no. 12623749
MATRVWAASAAALNPTLLPLSSSARPSRPAPSTRPSGHLRLRSRPPRPARVVCRRAKNAAFEDYKFPDSIPEFAEQETSKFREHMTWRLEQKKEQYFGKHVEDIVDVCTEVLSTFLQHEYCGPGTLLVHPFLDMKGEIKERGLPGAPQAARAPIAWAEKNIDKDWKEWDGD

SEQ ID NO: 61145 - protein, 141 aa, Triticum aestivum
  peptide (1)..(141): Ceres Seq. ID no. 12623750
LNSLEPIRRGDDRKIPERSAPGSDGDEGVGGVGGGLKPHSPPPFVFRTSEQARPLHAAERAPPTAQPPAAAGQGRVPPRQERRLRGLQVPGLHPRVRRAGDEQVQGAHDVAAGAEEGAVLREARGGHRRRLHRGLEHVLAT

SEQ ID NO: 61146 - protein, 87 aa, Triticum aestivum
  peptide (1)..(87): Ceres Seq. ID no. 12623751
MTWRLEQKKEQYFGKHVEDIVDVCTEVLSTFLQHEYCGPGTLLVHPFLDMKGEIKERGLPGAPQAARAPIAWAEKNIDKDWKEWDGD

SEQ ID NO: 61147 - DNA, 848 bp, Triticum aestivum
  misc_feature (1)..(848): Ceres Seq. ID no. 13598740
atgatatgacaagttgctcagatatatcccgtgaggcccttgaatgagcaatctccaattgtaaagcctggattaaactctagtatcactagaacaggagttggtgaagcagtgtcgcccaatggttcccaaaacggacagacacctttggccattttgggtctacagttatcaaagctttctataaaaaagaccagctacttcagtgacaagacagagattcaaaagtctgctactcttcttggatatgttgcacatgcggtctcccttattgcatcatatctcgatgttcctcttcgatatccactacggttgggaggttcacattcttatgttgttgatcatgccccttcagttgacccatctatagctccaggagtaagttcttctaccccttcgagcacgagcatgaggacaatggaatttcctctgttttttgaaggccaagaaacaacaagatcggcatatgctgtattcttgttaaacaaggatgtcgaacaacttctgaaccacattggcgctgaaagtcttggcccaagacatgtactagctaacctgaagcagctaacaaccattgtccagtcasaacaatacatttctgattgatttaacccaaaggaacacagttttgaatttctgagggatgatattryttgcttatggctgagtcctagtgtaacctggtgcwgtttttwscgagcrcctttcctttcccaggacagaaatgagctcaggtctccctttgctgacatgttgatgtaaacgcgtaaaycgctttctccgtgtaaaacgttrtcacttggatgtgtacakgaaatagatggatgatgataaatgagttgtagtgc

SEQ ID NO: 61148 - protein, 65 aa, Triticum aestivum
  peptide (1)..(65): Ceres Seq. ID no. 15222415
  misc_feature (60)..(60): Xaa is any aa, unknown or other
MRTMEFPLFFEGQETTRSAYAVFLLNKDVEQLLNHIGAESLGPRHVLANLKQLTTIVQSXQYISD

SEQ ID NO: 61149 - protein, 62 aa, Triticum aestivum
  peptide (1)..(62): Ceres Seq. ID no. 15222416
  misc_feature (57)..(57): Xaa is any aa, unknown or other
MEFPLFFEGQETTRSAYAVFLLNKDVEQLLNHIGAESLGPRHVLANLKQLTTIVQSXQYISD

SEQ ID NO: 61150 - protein, 40 aa, Triticum aestivum
  peptide (1)..(40): Ceres Seq. ID no. 15222417
MLHMRSPLLHHISMFLFDIHYGWEVHILMLLIMPLQLTHL

SEQ ID NO: 61151 - DNA, 1180 bp, Triticum aestivum
  misc_feature (1)..(1180): Ceres Seq. ID no. 13664220
accaaccaagcaaccgagccaaacaggctcaccttccaacagtagtatagctgccgaagcaaatcaacatggcgagtggcacgagggatctcggcgtggcgcttgctgtcctgctcctgctgttcatgttcggggcctccgccgctgccgcggtcgtccccagcatcgacgccacgcggacccgccacctgccgctgccgcctggactgctgcgcggcccggagagcgtcgccttcgacgccaaaggcaacggcccatacagcggcgtctccgacggccgcgtcctcaagtggaacggcgacaggctcggctggacgacgtacacttacagccctggatacagcagcgaggcgtgcacggcgtccgtccgccgccccgagaccgtgaccgagagccgctgcggccgtccgctgggcctacggtttcacctcaagtctggctacttgtacatagccgacgcctacaaggggctcatgagggtcgcgccaggaggtggggaggcgacggtgcttgtgacggaggccgatggcgctcctctccgtttcaccaacggcgtggacgtcgaccaggtgaccggtgaagtctacttcaccgacagctctatgaaatatcaaaggtcacaacacgagatggtaacaagaaccggggactcgacaggccgcctaatgagatatgatccacgcacaggaaaagtgattgtgctaaaggccggcatcacttaccccaatggtctcgccatcagcgttgaccggacacacctcgtcatctcatcgaccgggccgtgcaagttgttgaggtactggaccaaaggtcccaagacaggcacgatcgaactgttaactgatctaccgggctatcctgataatgtgagcccggataagagaggaggatactgggtggcattacatcatgagaagacagagctcccctttgacgttgatagccatctacttgccttgaggatcaatgctgatggaaaaataatcgaggagatgagaggacccaaaggcatgaggccgacagaggtggtggaacggacaggcggtagactatttgtgggatccgtcgagctttcttatgtggccgtggccacccgcaaatagagattaatttaagttctgtaaaggatttgcattgagcatgctctttttttcaatgtcatgttctgcttttctttccc

SEQ ID NO: 61152 - protein, 344 aa, Triticum aestivum
  peptide (1)..(344): Ceres Seq. ID no. 15220299
MASGTRDLGVALAVLLLLFMFGASAAAAVVPSIDATRTRHLPLPPGLLRGPESVAFDAKGNGPYSGVSDGRVLKWNGDRLGWTTYTYSPGYSSEACTASVRRPETVTESRCGRPLGLRFHLKSGYLYIADAYKGLMRVAPGGGEATVLVTEADGAPLRFTNGVDVDQVTGEVYFTDSSMKYQRSQHEMVTRTGDSTGRLMRYDPRTGKVIVLKAGITYPNGLAISVDRTHLVISSTGPCKLLRYWTKGPKTGTIELLTDLPGYPDNVSPDKRGGYWVALHHEKTELPFDVDSHLLALRINADGKIIEEMRGPKGMRPTEVVERTGGRLFVGSVELSYVAVATRK

SEQ ID NO: 61153 - protein, 325 aa, Triticum aestivum
  peptide (1)..(325): Ceres Seq. ID no. 15220300
MFGASAAAAVVPSIDATRTRHLPLPPGLLRGPESVAFDAKGNGPYSGVSDGRVLKWNGDRLGWTTYTYSPGYSSEACTASVRRPETVTESRCGRPLGLRFHLKSGYLYIADAYKGLMRVAPGGGEATVLVTEADGAPLRFTNGVDVDQVTGEVYFTDSSMKYQRSQHEMVTRTGDSTGRLMRYDPRTGKVIVLKAGITYPNGLAISVDRTHLVISSTGPCKLLRYWTKGPKTGTIELLTDLPGYPDNVSPDKRGGYWVALHHEKTELPFDVDSHLLALRINADGKIIEEMRGPKGMRPTEVVERTGGRLFVGSVELSYVAVATRK

SEQ ID NO: 61154 - protein, 209 aa, Triticum aestivum
  peptide (1)..(209): Ceres Seq. ID no. 15220301
MRVAPGGGEATVLVTEADGAPLRFTNGVDVDQVTGEVYFTDSSMKYQRSQHEMVTRTGDSTGRLMRYDPRTGKVIVLKAGITYPNGLAISVDRTHLVISSTGPCKLLRYWTKGPKTGTIELLTDLPGYPDNVSPDKRGGYWVALHHEKTELPFDVDSHLLALRINADGKIIEEMRGPKGMRPTEVVERTGGRLFVGSVELSYVAVATRK

SEQ ID NO: 61155 - DNA, 1065 bp, Triticum aestivum
  misc_feature (1)..(1065): Ceres Seq. ID no. 13661928
accattattgttgttctgccagcggcatatacggagggagggagctccaccgtcccctgtttcccaccccctcccctgtcccattcgacaaaacacgccaagcacgcgcaccgaatccatcgcccgagcaagcgaagcagacgccacctgccctgcccagaccgccgcccaccgtctcccaggagctcagaggcgccaccaagaaccgcacggaagagagcggatcgatggcgatggccggcggagccccgccggcgccgctgccggtggtggggcaccagttctgcgcgccctacgtggtgccgctgacggtgaccaagaaggcgctcagcctctccgacggcgacttcgccatcacggacgccaacggcgccgtcgtgctcaaggtcaagggcgccatcttcagcatccggagccgccgcaccatcctcgacggcgccgggatgcccctcctcaccatgcaggaaaaggtgttcagcatgcaccaccgatgggaggttttcagaggggacagcaccaacgcaggtgacctgctcttcaccgtgaagacaacttcgctgatccaactcaagaccgagatggatgtcttcttggcagggaacaccgcgcagcaggtctgcgacttcaagatcaagggcagctacttcgacaggtcctgcgtcttctaccttggcgactccaacaacatggtagctcaaatgagccgtaaactgactgtttccaatgtgctgctggggagggacacgttcagtgtgaccgtgttcccgcacgtcgactacgtgttcatcgcgagccttgttgtgatcctggatgaggttcacagggacaagcgcgacgattgatgagtgagttatatacgctcctcgatcctaagcgttcctggagttctactactgtcgtgtcatctcaagttgatatgttgtcactgtaagtcactggtgttatctgcatttcttgtagcattatgcgtgcatggtgagccatgctgaattgtgatgttgtggaataatgttcatgcaccttacatttgatccctggcctgccagtgtatcattcgtatttact

SEQ ID NO: 61156 - protein, 279 aa, Triticum aestivum
  peptide (1)..(279): Ceres Seq. ID no. 13661929
HYCCSASGIYGGRELHRPLFPTPSPVPFDKTRQARAPNPSPEQAKQTPPALPRPPPTVSQELRGATKNRTEESGSMAMAGGAPPAPLPVVGHQFCAPYVVPLTVTKKALSLSDGDFAITDANGAVVLKVKGAIFSIRSRRTILDGAGMPLLTMQEKVFSMHHRWEVFRGDSTNAGDLLFTVKTTSLIQLKTEMDVFLAGNTAQQVCDFKIKGSYFDRSCVFYLGDSNNMVAQMSRKLTVSNVLLGRDTFSVTVFPHVDYVFIASLVVILDEVHRDKRDD

SEQ ID NO: 61157 - protein, 204 aa, Triticum aestivum
  peptide (1)..(204): Ceres Seq. ID no. 13661930
MAMAGGAPPAPLPVVGHQFCAPYVVPLTVTKKALSLSDGDFAITDANGAVVLKVKGAIFSIRSRRTILDGAGMPLLTMQEKVFSMHHRWEVFRGDSTNAGDLLFTVKTTSLIQLKTEMDVFLAGNTAQQVCDFKIKGSYFDRSCVFYLGDSNNMVAQMSRKLTVSNVLLGRDTFSVTVFPHVDYVFIASLVVILDEVHRDKRDD

SEQ ID NO: 61158 - protein, 202 aa, Triticum aestivum
  peptide (1)..(202): Ceres Seq. ID no. 13661931
MAGGAPPAPLPVVGHQFCAPYVVPLTVTKKALSLSDGDFAITDANGAVVLKVKGAIFSIRSRRTILDGAGMPLLTMQEKVFSMHHRWEVFRGDSTNAGDLLFTVKTTSLIQLKTEMDVFLAGNTAQQVCDFKIKGSYFDRSCVFYLGDSNNMVAQMSRKLTVSNVLLGRDTFSVTVFPHVDYVFIASLVVILDEVHRDKRDD

SEQ ID NO: 61159 - DNA, 1155 bp, Triticum aestivum
  misc_feature (1)..(1155): Ceres Seq. ID no. 14301506
gtcactctcctctcctctgactcgtactctgcacagcttccccccacagaaaacaatcatggttaaaggtccaggactctacaccgaaatcggcaaaaaggccagagatcttctctacaaggactaccaaggagaccagaagctcagcgtcaccacttactcttccaccggcgttgcaatcaccaccactggaacaaacaagggagacttgtttgttggtgatgtaactacccaagtcaagaacaagaacttcactgccgatatcaaagtcgccactgattcttctctgctgaccacctttacctatgatgaggctacccctggattgaaggcaatcgtcagcgccaaggtgcctgatcagaaatctggcaaggttgagctccagtatctgcacgactatgctggtatctgcaccagtgttggtttgacagctagccccattgtcaatttctccggcgtggttggaaacaacgtcttggctcttggtaccgatgtgtccttcaacacccagtctggtgatttcaagcatttcaacgctggtttcagcttcaccaaggacgatctgattgctgcccttactctgaatgacaaaggtgacaaactgaatgcatcgtactaccacattgtgaacccgttgagcaacacagtggttggagctgaggttacccacagcttcacgactcaaaagaacgccattaccgttggtgctcagcatgctcttgacccattgacgacattgaaggcacgcgtgaacaatgatggtgtagctaacgcgctgatccagcaccagtggcgtccaaagtcgttcatcaccgtttctggagaggttaactccagggcgattgagaagggtgccaaggttgggtttgctcttgctctcaagccttgagaaagaatcaagaatccaaatgtgcccttgaggaggggtagcttagtttttttttcatcttctcggtcttctaatcttttggactaatctctctgcctggttttgctttaaaaatctttcatttgttgttttgttttaatcggtgttgggatttgtagaaaataagaaaaaaaaactattaaaaggatcgtcttgaagatgaaccgtacgaatctctttcctaattatttgtctcaatgctctgctaaaacactctgttcaattcg

SEQ ID NO: 61160 - protein, 295 aa, Triticum aestivum
  peptide (1)..(295): Ceres Seq. ID no. 14301507
SLSSPLTRTLHSFPPQKTIMVKGPGLYTEIGKKARDLLYKDYQGDQKLSVTTYSSTGVAITTTGTNKGDLFVGDVTTQVKNKNFTADIKVATDSSLLTTFTYDEATPGLKAIVSAKVPDQKSGKVELQYLHDYAGICTSVGLTASPIVNFSGVVGNNVLALGTDVSFNTQSGDFKHFNAGFSFTKDDLIAALTLNDKGDKLNASYYHIVNPLSNTVVGAEVTHSFTTQKNAITVGAQHALDPLTTLKARVNNDGVANALIQHQWRPKSFITVSGEVNSRAIEKGAKVGFALALKP

SEQ ID NO: 61161 - protein, 276 aa, Triticum aestivum
  peptide (1)..(276): Ceres Seq. ID no. 14301508
MVKGPGLYTEIGKKARDLLYKDYQGDQKLSVTTYSSTGVAITTTGTNKGDLFVGDVTTQVKNKNFTADIKVATDSSLLTTFTYDEATPGLKAIVSAKVPDQKSGKVELQYLHDYAGICTSVGLTASPIVNFSGVVGNNVLALGTDVSFNTQSGDFKHFNAGFSFTKDDLIAALTLNDKGDKLNASYYHIVNPLSNTVVGAEVTHSFTTQKNAITVGAQHALDPLTTLKARVNNDGVANALIQHQWRPKSFITVSGEVNSRAIEKGAKVGFALALKP

SEQ ID NO: 61162 - DNA, 978 bp, Triticum aestivum
  misc_feature (1)..(978): Ceres Seq. ID no. 12627370
agattagataattagggatttgaaaccagcatccctaaaatggagattacggagcggagggacgatgagatcagagacgcaaaagaatccgcaaacattgacaccatcaagtcgcagtatgtcaccgactctttttccgatgaacgctactctcgcgagctcaaggatggtcttcatcctctacggtacaagtttgcgatttggtacacacgtcgaacacctggggtcaggagccagacttcttacgaggataacattaagaagattgttgaattcagcactgttgaagggttttgggccagttactgtcaccttgctcgttcttctctcttgcctaacccaacagaccttcatttcttcaaggatgggattcgccccttgtgggaggatggtgccaactgcaatggaggaaagtggatcatacgtttctccaaagttgtctctgctcgcttctgggaggatctgcttcttgcgttggtaggcgaccagcttgatgatgctgaaaacatttgtggggcagtgctgagtgtccgcatcaatgaggacatcattagtgtatggaatcgcaatgcttctgatcatcaggcagtgatggggttgagagactcaatcaagcgccacttgaagctgcctcatgcttatgtgatggagtacaagcctcacgatgcttctcttcgcgataactcatcctacagaaacacatggagaggataggctcaaagtggactattgtatcacttgaggtgttaaaagattcggaagctctcctgcaacctaggatgatatatggattgaaccttgtttctggtagcgtactgtatcaatggcttacaatctcagcaatgaaaaatcctggctacttctgcaacagtagtttattaagtcgttttatggtttctaaatcttcttgctaccttcaatggtttgtgtcttgtttaaaactctattgtttcatttttcaaaagaaaacttgagctc

SEQ ID NO: 61163 - protein, 224 aa, Triticum aestivum
  peptide (1)..(224): Ceres Seq. ID no. 12627371
MEITERRDDEIRDAKESANIDTIKSQYVTDSFSDERYSRELKDGLHPLRYKFAIWYTRRTPGVRSQTSYEDNIKKIVEFSTVEGFWASYCHLARSSLLPNPTDLHFFKDGIRPLWEDGANCNGGKWIIRFSKVVSARFWEDLLLALVGDQLDDAENICGAVLSVRINEDIISVWNRNASDHQAVMGLRDSIKRHLKLPHAYVMEYKPHDASLRDNSSYRNTWRG

SEQ ID NO: 61164 - protein, 138 aa, Triticum aestivum
  peptide (1)..(138): Ceres Seq. ID no. 12627372
MRSETQKNPQTLTPSSRSMSPTLFPMNATLASSRMVFILYGTSLRFGTHVEHLGSGARLLTRITLRRLLNSALLKGFGPVTVTLLVLLSCLTQQTFISSRMGFAPCGRMVPTAMEESGSYVSPKLSLLASGRICFLRW

SEQ ID NO: 61165 - protein, 120 aa, Triticum aestivum
  peptide (1)..(120): Ceres Seq. ID no. 12627373
MSPTLFPMNATLASSRMVFILYGTSLRFGTHVEHLGSGARLLTRITLRRLLNSALLKGFGPVTVTLLVLLSCLTQQTFISSRMGFAPCGRMVPTAMEESGSYVSPKLSLLASGRICFLRW

SEQ ID NO: 61166 - DNA, 799 bp, Triticum aestivum
  misc_feature (1)..(799): Ceres Seq. ID no. 13664228
acctagaacatcctaatcgaaaaatcagaagaagaagtatctttgttttcgctctcttcttctactttcgatctttgacgattagaaaaggaaagtgatggctgccgttaatgggtaccaaggaaacactccggcggcgtcaaagcaatctgctcctccgactaagactgttgatagccaatctgttctcaaaaggctgcaatctgaactaatgggcttgatgatgggtggtgacccgggaatatcggctttcccagaggaagacaacatattctgttggaaagggacaataacaggaagcaaagatactgtgtttgaaggaactgagtacagactctcactctctttctccaatgactatcctttcaagcctcctaagatcaagttccacactggttgcttccaccccaatgttgatctctacggcaatatctgtttggacattcttcaggataaatggtcgtctgcatacgatgtcaggacaatactactatcgattcagagccttttgggagaaccgaacatcagctcaccattgaacactcaagcagcgcagctctggagcaaccaagaagagtataggaagatggttgagaagctctacaagcctcccagtgcatgatagcttcaggatgtgtcattcctttgctctacaatttgtttctgatcatcaacagttttatctgtagcagtttgtgtcattcatttgctctataatttgtttctgatcttcaacagttttacctgagccaaatattgatattgatgtgagcttttcaaaaattaatcagaatgatcc

SEQ ID NO: 61167 - protein, 174 aa, Triticum aestivum
  peptide (1)..(174): Ceres Seq. ID no. 13664229
MAAVNGYQGNTPAASKQSAPPTKTVDSQSVLKRLQSELMGLMMGGDPGISAFPEEDNIFCWKGTITGSKDTVFEGTEYRLSLSFSNDYPFKPPKIKFHTGCFHPNVDLYGNICLDILQDKWSSAYDVRTILLSIQSLLGEPNISSPLNTQAAQLWSNQEEYRKMVEKLYKPPSA

SEQ ID NO: 61168 - protein, 136 aa, Triticum aestivum
  peptide (1)..(136): Ceres Seq. ID no. 13664230
MGLMMGGDPGISAFPEEDNIFCWKGTITGSKDTVFEGTEYRLSLSFSNDYPFKPPKIKFHTGCFHPNVDLYGNICLDILQDKWSSAYDVRTILLSIQSLLGEPNISSPLNTQAAQLWSNQEEYRKMVEKLYKPPSA

SEQ ID NO: 61169 - protein, 133 aa, Triticum aestivum
  peptide (1)..(133): Ceres Seq. ID no. 13664231
MMGGDPGISAFPEEDNIFCWKGTITGSKDTVFEGTEYRLSLSFSNDYPFKPPKIKFHTGCFHPNVDLYGNICLDILQDKWSSAYDVRTILLSIQSLLGEPNISSPLNTQAAQLWSNQEEYRKMVEKLYKPPSA

SEQ ID NO: 61170 - DNA, 884 bp, Triticum aestivum
  misc_feature (1)..(884): Ceres Seq. ID no. 13661939
cctagaacatcctaatcgaaaagattaagattcactttttattccgatagatcagattcatttcctgaatctgttatataaaattctttctaaagaggaagaaatctcacggttccaacaggaaaaatgggttctgaacagaatgatagcacgagcttcacacaatcatcagagccgaaactttgtgcaaacggatgtggtttctttggttcgccatcaaacatggatctgtgttcgaaatgctaccgagacatatgcgcagaggaagctcaaacagctgttgcaaaagctgccgttgagaaatctttcaagccatcgccatcgcctcctcctcctaccctcttcatagcagagcctgatgtggcgaaaccagagaaagaaaaggcggttgctactgttcttgtggtggccgagccatcttctgcaacaggagaagctacagttcctgaacagaacgaaccaccatctaaacctgcacggccgaaccggtgcctttgttgcaacaagaaggttggtatacttgggtttaagtgcaaatgcgggagcactttctgcggcgaacatcggtaccctgagagacatgattgcagctttgatttcaaagaagctgggcgtggagagattgcaaaagccaatccggttattaaagctgataaacttcaaaggttctgagaaaggctacggtgttggtctctcttttcttttatctcaaattgtatttgaatggaattgggtttctactagtggattgtttccaaaggggggtaacatgatgaatttggttctttaataaactcagtcatctctatttcatgctattcaggtacggattataatctttgtgggtaacttgtaaaatcaatttatcaaagcttcttttggcc

SEQ ID NO: 61171 - protein, 181 aa, Triticum aestivum
  peptide (1)..(181): Ceres Seq. ID no. 15220147
MGSEQNDSTSFTQSSEPKLCANGCGFFGSPSNMDLCSKCYRDICAEEAQTAVAKAAVEKSFKPSPSPPPPTLFIAEPDVAKPEKEKAVATVLVVAEPSSATGEATVPEQNEPPSKPARPNRCLCCNKKVGILGFKCKCGSTFCGEHRYPERHDCSFDFKEAGRGEIAKANPVIKADKLQRF

SEQ ID NO: 61172 - protein, 149 aa, Triticum aestivum
  peptide (1)..(149): Ceres Seq. ID no. 15220148
MDLCSKCYRDICAEEAQTAVAKAAVEKSFKPSPSPPPPTLFIAEPDVAKPEKEKAVATVLVVAEPSSATGEATVPEQNEPPSKPARPNRCLCCNKKVGILGFKCKCGSTFCGEHRYPERHDCSFDFKEAGRGEIAKANPVIKADKLQRF

SEQ ID NO: 61173 - protein, 143 aa, Triticum aestivum
  peptide (1)..(143): Ceres Seq. ID no. 15220149
MWRNQRKKRRLLLFLWWPSHLLQQEKLQFLNRTNHHLNLHGRTGAFVATRRLVYLGLSANAGALSAANIGTLRDMIAALISKKLGVERLQKPIRLLKLINFKGSEKGYGVGLSFLLSQIVFEWNWVSTSGLFPKGGNMMNLVL

SEQ ID NO: 61174 - DNA, 932 bp, Triticum aestivum
  misc_feature (1)..(932): Ceres Seq. ID no. 13661681
aaaaaaaacaaacaatcggcagggttcgcgaaaaaaaggaaactcctccctccctcctcccccgcgccgacccgccgccgtcgacagcgcgccccgacgcgatggcccgcaccaagcacccggccgtcaggaagaccaaggcgccgcccaagaagcagctcgggccccgccccgcgcagcggcggcaggagacagatggcgcgggcacgtcggcgacaccgaggcgagccgggcgggcggcggccccagggggggctcaaggggcaactgggcaacccaagcagaggaaaccacaccggttcaggccaggcacggtggcactgcgggagatcaggaggtatcagaagtcggtcgactttctcatcccgtttgcaccatttgtccgtctgatcaaggaggtcaccgacttcttctgtcctgaaatcagccgctggactccccaagcgctcgtcgcgattcaagaggctgcagagtatcacctcgtcgacgtatttgaaagggcaaatcactgtgccatccatgcaaagcgtgttaccgtcatgcaaaaggacatacagcttgcaaggcgtatcggcgggaggaggctttggtgatacttctggaagacgttttctgcatcataggggggaaagactctggtgatactaatgggagatgttttatgtattgggggtgcaaaggcagtgttcatagtggtccaatatgtttgactgtatcgttagaaagtattgtaggtgtatcttcatttagttagctttgtcttcgaagttgatctgattcgttacatgtttgggatcattcgacttcttcattcaggcattgttccatttgaattgattgtggatatgggattttaaatgacttggaatcggttgtggattttccacattattgaaggagcgaaccagaattgcgcgcaagcgttttcatgc

SEQ ID NO: 61175 - protein, 196 aa, Triticum aestivum
  peptide (1)..(196): Ceres Seq. ID no. 15220130
KKQTIGRVREKKETPPSLLPRADPPPSTARPDAMARTKHPAVRKTKAPPKKQLGPRPAQRRQETDGAGTSATPRRAGRAAAPGGAQGATGQPKQRKPHRFRPGTVALREIRRYQKSVDFLIPFAPFVRLIKEVTDFFCPEISRWTPQALVAIQEAAEYHLVDVFERANHCAIHAKRVTVMQKDIQLARRIGGRRLW

SEQ ID NO: 61176 - protein, 163 aa, Triticum aestivum
  peptide (1)..(163): Ceres Seq. ID no. 15220131
MARTKHPAVRKTKAPPKKQLGPRPAQRRQETDGAGTSATPRRAGRAAAPGGAQGATGQPKQRKPHRFRPGTVALREIRRYQKSVDFLIPFAPFVRLIKEVTDFFCPEISRWTPQALVAIQEAAEYHLVDVFERANHCAIHAKRVTVMQKDIQLARRIGGRRLW

SEQ ID NO: 61177 - protein, 139 aa, Triticum aestivum
  peptide (1)..(139): Ceres Seq. ID no. 15220132
KKTNNRQGSRKKGNSSLPPPPRRPAAVDSAPRRDGPHQAPGRQEDQGAAQEAARAPPRAAAAGDRWRGHVGDTEASRAGGGPRGGSRGNWATQAEETTPVQARHGGTAGDQEVSEVGRLSHPVCTICPSDQGGHRLLLS

SEQ ID NO: 61178 - DNA, 777 bp, Triticum aestivum
  misc_feature (1)..(777): Ceres Seq. ID no. 13661950
aggattgccgtgttgtttgtccagcaattattcagcgtcgtcggtatgtgtgctctaaaatagcagctgtagggcgttgtttcaactcaggcacactaatggccaagattggggaagaggtcacctggacaggcacacttgattgcgtttgcattgagcgaatatcacgtaaaatcagcaaggctggtattggagggccccttgttaatttggacggggaagttgttggcatggacttctacgatccgaggataggaacccctatcgtgatgtgggaccatgttgaacacattctgcaccatatagaaaagagtgacccctccggcgcggctttctggaaaatggctggggatcccagcacgaggctaaataggtggcctgtgcctgcgccatgttggcgtagccgtgaggacgtggagaaggacaagaaatctgaggaagatgagatgaaccttgagcccccgcccctaccccccagggagagtttctcatgggtcttcaatttctttcaacagaagccgggctctgaaccctcatccagtcacataaaccgcagtaacccattcatatacggattcatagatggaaagaaagttttactgtctatttgatacgtggctgcatttcgttaggatgttggctagttttcacgaggatctgcttgttgctagtcttagcaaatattacatgtgttgctccgcttgctctcttgaattatccagtgtgtgcagccttgtgtaatactcgatggtgatgactttagtttatatattgtcc

SEQ ID NO: 61179 - protein, 202 aa, Triticum aestivum
  peptide (1)..(202): Ceres Seq. ID no. 13661951
DCRVVCPAIIQRRRYVCSKIAAVGRCFNSGTLMAKIGEEVTWTGTLDCVCIERISRKISKAGIGGPLVNLDGEVVGMDFYDPRIGTPIVMWDHVEHILHHIEKSDPSGAAFWKMAGDPSTRLNRWPVPAPCWRSREDVEKDKKSEEDEMNLEPPPLPPRESFSWVFNFFQQKPGSEPSSSHINRSNPFIYGFIDGKKVLLSI

SEQ ID NO: 61180 - protein, 170 aa, Triticum aestivum
  peptide (1)..(170): Ceres Seq. ID no. 13661952
MAKIGEEVTWTGTLDCVCIERISRKISKAGIGGPLVNLDGEVVGMDFYDPRIGTPIVMWDHVEHILHHIEKSDPSGAAFWKMAGDPSTRLNRWPVPAPCWRSREDVEKDKKSEEDEMNLEPPPLPPRESFSWVFNFFQQKPGSEPSSSHINRSNPFIYGFIDGKKVLLSI

SEQ ID NO: 61181 - protein, 126 aa, Triticum aestivum
  peptide (1)..(126): Ceres Seq. ID no. 13661953
MDFYDPRIGTPIVMWDHVEHILHHIEKSDPSGAAFWKMAGDPSTRLNRWPVPAPCWRSREDVEKDKKSEEDEMNLEPPPLPPRESFSWVFNFFQQKPGSEPSSSHINRSNPFIYGFIDGKKVLLSI

SEQ ID NO: 61182 - DNA, 718 bp, Triticum aestivum
  misc_feature (1)..(718): Ceres Seq. ID no. 13661954
agcaggaagctctaacatacaatggatacgaggcagagcgtcgcggcggtggtgaagccgtcgttggatggcggtgccccggccacggcgtcgttccgtctccgtaacggcagcctcaactcggttcgcctccgccgggtgttcgacctgttcgacaagaacggcgacggtcagatcacggtcgacgagctggcgcaggcgctggattcgctcgggctcgtcgccgaccgcgagggcctggcctccactgtgggcgcgtacgtccccgagggcgcggcggggcttcggttccaggacttcgagtgcctccaccgtgagctgggtgacgcgctcttcggcgcgctggacgacgtgcccgaggacggcgaggccggcgcgggcggggacgaggaggagatgaaggaggcgttcaaggtgttcgacgtggacggcgacggcttcatctcggcaaccgagctgcaggaggtgctcaagaagctgggcctccccgagggcagcagcctcgccaccgtgcgccagatgatttgcaacgtcgaccgtaacagcgacggccgcgtcgactttggggagttcaagtgcatgatgaaggggatcacggtgttgggcgcgtgaccatcgaaaccaatcgtgtccgatcgcacgctgcaacaaaccgcacatcctctcgttcatgggtggcgatcagaatcggttcccgtcaatcaagtacaccatctcc

SEQ ID NO: 61183 - protein, 196 aa, Triticum aestivum
  peptide (1)..(196): Ceres Seq. ID no. 13661955
MDTRQSVAAVVKPSLDGGAPATASFRLRNGSLNSVRLRRVFDLFDKNGDGQITVDELAQALDSLGLVADREGLASTVGAYVPEGAAGLRFQDFECLHRELGDALFGALDDVPEDGEAGAGGDEEEMKEAFKVFDVDGDGFISATELQEVLKKLGLPEGSSLATVRQMICNVDRNSDGRVDFGEFKCMMKGITVLGA

SEQ ID NO: 61184 - protein, 110 aa, Triticum aestivum
  peptide (1)..(110): Ceres Seq. ID no. 13661956
MAVPRPRRRSVSVTAASTRFASAGCSTCSTRTATVRSRSTSWRRRWIRSGSSPTARAWPPLWARTSPRARRGFGSRTSSASTVSWVTRSSARWTTCPRTARPARAGTRRR

SEQ ID NO: 61185 - DNA, 817 bp, Triticum aestivum
  misc_feature (1)..(817): Ceres Seq. ID no. 13661628
attacctagaacatcctaatcgaaaagtcgaacgataacgatggtgcttccaggatccttttttgcgcttgactggcccgtctcgcgcaattttggccagcaacccggtgacatttgaagttgaactaaaaactgtgtatcctggagcggagccggatccccaaggcgcattgctctcttgcgtctatgattggcgcgccgtgcaggataccacccctatgttccttggctatgcttgttctgcacagttaagccttgagcaacttcctagagcaatccaggccactatcatgggtgtccacattgttgatggctcatggcctcctaaatatggatgccgggtttcttgctccttgtctgctccagatgatcccactcctagggaagtgttgttgcttgattgttcccgttctgatgctgaaaaaaaaaagccctgttggatcagatggctactttggtctggcaaggaatgttgtttcagctgaactacaatcaacactgaaagttgtcatacaagcccagtcgtggaggcatggtggtgcacagggtcatgtcgagttccctgtccaacaatactgccaaacaagcaagggttcatgtgttgtaggcatgtgtaaggtcgaggttgttgttgcttggtccctccttgtcgagaacaagctgaatctcatgctttgagacgtgagatctactatgtaagagtcagctctagcttgcgactcatcttgacccagatattcgtgtactgactattagcttatcttgtgaaacattgttatgctggtggtttgctagcatgttaagcatttctgttcgg

SEQ ID NO: 61186 - protein, 122 aa, Triticum aestivum
  peptide (1)..(122): Ceres Seq. ID no. 15220702
MAHGLLNMDAGFLAPCLLQMIPLLGKCCCLIVPVLMLKKKSPVGSDGYFGLARNVVSAELQSTLKVVIQAQSWRHGGAQGHVEFPVQQYCQTSKGSCVVGMCKVEVVVAWSLLVENKLNLML

SEQ ID NO: 61187 - protein, 115 aa, Triticum aestivum
  peptide (1)..(115): Ceres Seq. ID no. 15220703
MDAGFLAPCLLQMIPLLGKCCCLIVPVLMLKKKSPVGSDGYFGLARNVVSAELQSTLKVVIQAQSWRHGGAQGHVEFPVQQYCQTSKGSCVVGMCKVEVVVAWSLLVENKLNLML

SEQ ID NO: 61188 - protein, 103 aa, Triticum aestivum
  peptide (1)..(103): Ceres Seq. ID no. 15220704
MIPLLGKCCCLIVPVLMLKKKSPVGSDGYFGLARNVVSAELQSTLKVVIQAQSWRHGGAQGHVEFPVQQYCQTSKGSCVVGMCKVEVVVAWSLLVENKLNLML

SEQ ID NO: 61189 - DNA, 902 bp, Triticum aestivum
  misc_feature (1)..(902): Ceres Seq. ID no. 13661833
agatcccctccaccggggcctccttcgacctcctctcctctcccaatccactgcagccggccggccttcccctcccccctccgaccgctagctgctcacccccctccctcctccgaccgctagctgctcgccccactccctccccgtgagaagcttggtccagcaccgagcggcgccgagagctgtccgcgtcgggcgctgttggcatggagagcagcgcggcggcgcggatggatcctgaggcggcgacggagctggcgcggaagggggtcaccctcctgctcctagacgtgccccagcacaccctcctcggcctcgacacccaggtgttctcggtgagccccaggttcagagggatcaagatggtgcccccaggcccacatttcctccactactgctcccccagcagagcaaaaaggttcaacaaccatgaaatcctagctgaggacgtgcgagactgggatatagccagtgaccgggggcaagggcagcgtgcgcagggtgatcgacgaggactactgcggcccgatgggagtcgtgctcttcaactactgagaggcagacttcaccgtgaagccccgcgaccgcgtcatacagattattgtccaggtgattgcgacgcaggaggtcctcggggtggaggagctcgacgccaccgttcggaggtcaccgaggtggaggacgacgccaccgtccggagttcctcaaggtggaggacctcgacgctttgtacatacatctagagaagtggtctggttaggttggtggtgaaacgctagagaaggtaccaaccttttgatgacgattgtgtgtgtcctcgtgatctcttcgagttgagatgttgaatgttgcatccatgaacactgcaagtgttaagatggttatgtgaaatttattttgct

SEQ ID NO: 61190 - protein, 178 aa, Triticum aestivum
  peptide (1)..(178): Ceres Seq. ID no. 13661834
MESSAAARMDPEAATELARKGVTLLLLDVPQHTLLGLDTQVFSVSPRFRGIKMVPPGPHFLHYCSPSRAKRFNNHEILAEDVRDWDIASDRGQGQRAQGDRRGLLRPDGSRALQLLRGRLHREAPRPRHTDYCPGDCDAGGPRGGGARRHRSEVTEVEDDATVRSSSRWRTSTLCTYI

SEQ ID NO: 61191 - protein, 170 aa, Triticum aestivum
  peptide (1)..(170): Ceres Seq. ID no. 13661835
MDPEAATELARKGVTLLLLDVPQHTLLGLDTQVFSVSPRFRGIKMVPPGPHFLHYCSPSRAKRFNNHEILAEDVRDWDIASDRGQGQRAQGDRRGLLRPDGSRALQLLRGRLHREAPRPRHTDYCPGDCDAGGPRGGGARRHRSEVTEVEDDATVRSSSRWRTSTLCTYI

SEQ ID NO: 61192 - protein, 126 aa, Triticum aestivum
  peptide (1)..(126): Ceres Seq. ID no. 13661836
MVPPGPHFLHYCSPSRAKRFNNHEILAEDVRDWDIASDRGQGQRAQGDRRGLLRPDGSRALQLLRGRLHREAPRPRHTDYCPGDCDAGGPRGGGARRHRSEVTEVEDDATVRSSSRWRTSTLCTYI

SEQ ID NO: 61193 - DNA, 681 bp, Triticum aestivum
  misc_feature (1)..(681): Ceres Seq. ID no. 12624445
aacgacgacggaacacgcagctacactcccacactctcaccagctcctcgccgagcctcttgtcctacgacggtgagcatgggcggaggggacgagcatggcgcgtcggctcggctggagagcatcctcacggactcgtcggcaccgcgggcggagcgcgtgtgggcggcgggggcaatcgagctcgggatgctcttgcggctggccgtcccggcggtgatcatgtacatgatcaacttcctcatgtccatgtccacccagatcttctccggccacctcgggagcctggagctcgccgccgcctccctcggaaacacaggcgtccagatgttcgcctatggcctcatggcgctgcagggcgaaagatgcgcggggaaagctctagggaatatttggagccgcgggaaatagccgatcgccgcgtctttttctcccacttatccaaaatctgacaactaatcctgtgtttagtgctgtgatggtcgctaaagcatgcaataattgcacgtcccacgatccgctcggcacgtgcatgcattcacggttcaattaacctgtcattaatgggcgttgatttgaccaaagagtagcagttgacgtttttttattgccacgagcttggatcctgtgtcactcatggtgttcatttctttaatgaatgatgagtggttgatggactgc

SEQ ID NO: 61194 - protein, 149 aa, Triticum aestivum
  peptide (1)..(149): Ceres Seq. ID no. 12624446
RRRNTQLHSHTLTSSSPSLLSYDGEHGRRGRAWRVGSAGEHPHGLVGTAGGARVGGGGNRARDALAAGRPGGDHVHDQLPHVHVHPDLLRPPREPGARRRLPRKHRRPDVRLWPHGAAGRKMRGESSREYLEPREIADRRVFFSHLSKI

SEQ ID NO: 61195 - protein, 136 aa, Triticum aestivum
  peptide (1)..(136): Ceres Seq. ID no. 12624447
NDDGTRSYTPTLSPAPRRASCPTTVSMGGGDEHGASARLESILTDSSAPRAERVWAAGAIELGMLLRLAVPAVIMYMINFLMSMSTQIFSGHLGSLELAAASLGNTGVQMFAYGLMALQGERCAGKALGNIWSRGK

SEQ ID NO: 61196 - protein, 110 aa, Triticum aestivum
  peptide (1)..(110): Ceres Seq. ID no. 12624448
MGGGDEHGASARLESILTDSSAPRAERVWAAGAIELGMLLRLAVPAVIMYMINFLMSMSTQIFSGHLGSLELAAASLGNTGVQMFAYGLMALQGERCAGKALGNIWSRGK

SEQ ID NO: 61197 - DNA, 1020 bp, Triticum aestivum
  misc_feature (1)..(1020): Ceres Seq. ID no. 12624676
agtttttacttttcaggaggagaagaagaaacaaaacccgaaaccagattcgtctctctgcaaaatcgagacgttgtcggaatcgcacttcttcttcttgttcaatccacaatcagtaggtcgaaattcaagaaagatggtggtgtcgccaaagatagctccatcaatgctgtcttcggactttgcaaatctggcggcagaggccaagcggatggttgatttgggcgctgactggcttcacatggacatcatggacgggcattttgtcccgaatctaaccattggtgctcctgtcatcgagagtttgagaaagcacacaagtgcatatcttgattgccacctaatggtgacgaaccccatggattacgtggagcagatgggtaaagctggggcttctggtttcacattccacgttgaggtggccaaagagaactggcaagaacttgtgagtaagattaagtctgctgggatgaggccaggtgtggctctaaagcctggaacacctgttgaagaagtctatcctctggttgaaggggaaactccagtagaaatggtgctagtgatgacggtggagcctggatttggaggccagaagttcatgcccaacatgatggacaaggtcagggcattgaggcagaagtatccaacgctagatattgaggtggacggagggttaggcccatcgactatagaagcagcggctgcagcaggggccaactgtatcgtagctggaagttcggtgtttggagctccggagtcagggaaagtcatttcccttttgcggaccagtgttgagaaagcccaacccaccacctgagtgcactgcccgtttctaataatatatgcacccaccaaaggcaataataattttacgacaactataatttaagagctgaaacatacaaaaagaatcgttcaaacatttccttagtagtttgatcatattgcacttgtgtaatggaatgtttcgtattgtcaagcaaacttggtcatacagtaagaatgtttttgtaaaatggt

SEQ ID NO: 61198 - protein, 271 aa, Triticum aestivum
  peptide (1)..(271): Ceres Seq. ID no. 12624677
VFTFQEEKKKQNPKPDSSLCKIETLSESHFFFLFNPQSVGRNSRKMVVSPKIAPSMLSSDFANLAAEAKRMVDLGADWLHMDIMDGHFVPNLTIGAPVIESLRKHTSAYLDCHLMVTNPMDYVEQMGKAGASGFTFHVEVAKENWQELVSKIKSAGMRPGVALKPGTPVEEVYPLVEGETPVEMVLVMTVEPGFGGQKFMPNMMDKVRALRQKYPTLDIEVDGGLGPSTIEAAAAAGANCIVAGSSVFGAPESGKVISLLRTSVEKAQPTT

SEQ ID NO: 61199 - protein, 226 aa, Triticum aestivum
  peptide (1)..(226): Ceres Seq. ID no. 12624678
MVVSPKIAPSMLSSDFANLAAEAKRMVDLGADWLHMDIMDGHFVPNLTIGAPVIESLRKHTSAYLDCHLMVTNPMDYVEQMGKAGASGFTFHVEVAKENWQELVSKIKSAGMRPGVALKPGTPVEEVYPLVEGETPVEMVLVMTVEPGFGGQKFMPNMMDKVRALRQKYPTLDIEVDGGLGPSTIEAAAAAGANCIVAGSSVFGAPESGKVISLLRTSVEKAQPTT

SEQ ID NO: 61200 - protein, 216 aa, Triticum aestivum
  peptide (1)..(216): Ceres Seq. ID no. 12624679
MLSSDFANLAAEAKRMVDLGADWLHMDIMDGHFVPNLTIGAPVIESLRKHTSAYLDCHLMVTNPMDYVEQMGKAGASGFTFHVEVAKENWQELVSKIKSAGMRPGVALKPGTPVEEVYPLVEGETPVEMVLVMTVEPGFGGQKFMPNMMDKVRALRQKYPTLDIEVDGGLGPSTIEAAAAAGANCIVAGSSVFGAPESGKVISLLRTSVEKAQPTT

SEQ ID NO: 61201 - DNA, 711 bp, Triticum aestivum
  misc_feature (1)..(711): Ceres Seq. ID no. 14301738
agttcatctacagacaaaggcattccaacctcccactagcagaagaatttctccagttccagaaacacaagaaactaccatgacgagtgccaagacacttgctcggctggccaagaagtggcagagggtggcggctatgggaaggaagaggctcacctggtcgccatcaacgtccaaagaagaagccggagagtcgtgcagcacgccgtgctcgacagcggccggcaagggccactgcgtcgtgtacactgccgatggtgtaaggttcgaggtgcctcttacgttcctcggaacgaccatcttcagcgagctcttgaggatatcccaagaggagtttggcttcacaggtgttgacggtggcagaatcactctgccctgcgacgcatcggtgatggagtatgccatgtgcttgctcaggagaagcgcctccacagagatggaggccgcgttcctcaacaccatggtgatgccatgccactatcatgtggcgccacatctgggagttggccagcgattcggtgtatgcagctcctgattaccatctgcagagatacaggaaaatagaacaaggaaaacagtttatgtgtagcattttgatcttgctagcaaagaagcaatcaaggaagatggacctagtaagagatattgttctttcaatgtatgcatatactttgttccgaagataaatgatcgatcgcagttttttaaaat

SEQ ID NO: 61202 - protein, 177 aa, Triticum aestivum
  peptide (1)..(177): Ceres Seq. ID no. 14301739
VHLQTKAFQPPTSRRISPVPETQETTMTSAKTLARLAKKWQRVAAMGRKRLTWSPSTSKEEAGESCSTPCSTAAGKGHCVVYTADGVRFEVPLTFLGTTIFSELLRISQEEFGFTGVDGGRITLPCDASVMEYAMCLLRRSASTEMEAAFLNTMVMPCHYHVAPHLGVGQRFGVCSS

SEQ ID NO: 61203 - protein, 151 aa, Triticum aestivum
  peptide (1)..(151): Ceres Seq. ID no. 14301740
MTSAKTLARLAKKWQRVAAMGRKRLTWSPSTSKEEAGESCSTPCSTAAGKGHCVVYTADGVRFEVPLTFLGTTIFSELLRISQEEFGFTGVDGGRITLPCDASVMEYAMCLLRRSASTEMEAAFLNTMVMPCHYHVAPHLGVGQRFGVCSS

SEQ ID NO: 61204 - protein, 132 aa, Triticum aestivum
  peptide (1)..(132): Ceres Seq. ID no. 14301741
MGRKRLTWSPSTSKEEAGESCSTPCSTAAGKGHCVVYTADGVRFEVPLTFLGTTIFSELLRISQEEFGFTGVDGGRITLPCDASVMEYAMCLLRRSASTEMEAAFLNTMVMPCHYHVAPHLGVGQRFGVCSS

SEQ ID NO: 61205 - DNA, 1127 bp, Triticum aestivum
  misc_feature (1)..(1127): Ceres Seq. ID no. 14301502
aagaaaaaacgaatcgttcctctccacctccctgacgcgagcgaccaaagtccggcggccgacgcggcaacggcggcggagaaggtgcctgttagatcgactttctacattgccttttgagaaaacatagagggatctttctgccctctgctcttacctgaagctagaatcacggagggggtgctctgataggtctatgcaccctgtgtcgatctcctttcaacccttcactgcaacttcagcgggcaatttttcctcaaggaccactaatgtgaggtctcgctgtgattttatcaagttgctgacagttggaagaagtagtggataccgtgccatgaattccggaccaacttctgcttccaggtctgaaacgaccggggaacaggattatgctgtgggagagaatgatggtgtgatcatagtcgaccacgggtcacggcgacaggaatctaatctcatgctaaacgattttgttgcaatgttcagggcaaggactggctacaggattgttgagcctgctcacatggagctcgctgagcctactattaaagaagcatttggaaaatgtgtccagcaaggagcatcccgcattattgtcagcccatatttcctttcacctggacggcactggaaacaagatattccttctttagcagcagaagcctctaaagagcactctaacgtggcctacattgtcactgctcctcttggattgcatgagcttatggtggatattatgaacgaccgcatcaagtactgcctgaggcacgttgcaggcgatgctgatgagtgtgcagtatgtgctgggactggaaagtgccacctctactcctgacggtgatgacatgtgagttgctcgaaagtctaatcaggtcatcctgtttttggctcattggcagcacagattgatggctgaggccaataattccatcttgttaacccatgctccttgttatctgccatgtaatcagaaaacattgtaacaatgatctcggcggttttattcagcttgtagatttagagtgttttcagtagtctgaacaagatatcatgacaagagagtgtaaatttgtcatgcaaatcaaacactgcttgctatgcactaccgcaagaaaaaaactgttacc

SEQ ID NO: 61206 - protein, 212 aa, Triticum aestivum
  peptide (1)..(212): Ceres Seq. ID no. 14301503
MHPVSISFQPFTATSAGNFSSRTTNVRSRCDFIKLLTVGRSSGYRAMNSGPTSASRSETTGEQDYAVGENDGVIIVDHGSRRQESNLMLNDFVAMFRARTGYRIVEPAHMELAEPTIKEAFGKCVQQGASRIIVSPYFLSPGRHWKQDIPSLAAEASKEHSNVAYIVTAPLGLHELMVDIMNDRIKYCLRHVAGDADECAVCAGTGKCHLYS

SEQ ID NO: 61207 - protein, 166 aa, Triticum aestivum
  peptide (1)..(166): Ceres Seq. ID no. 14301504
MNSGPTSASRSETTGEQDYAVGENDGVIIVDHGSRRQESNLMLNDFVAMFRARTGYRIVEPAHMELAEPTIKEAFGKCVQQGASRIIVSPYFLSPGRHWKQDIPSLAAEASKEHSNVAYIVTAPLGLHELMVDIMNDRIKYCLRHVAGDADECAVCAGTGKCHLYS

SEQ ID NO: 61208 - protein, 125 aa, Triticum aestivum
  peptide (1)..(125): Ceres Seq. ID no. 14301505
MLNDFVAMFRARTGYRIVEPAHMELAEPTIKEAFGKCVQQGASRIIVSPYFLSPGRHWKQDIPSLAAEASKEHSNVAYIVTAPLGLHELMVDIMNDRIKYCLRHVAGDADECAVCAGTGKCHLYS

SEQ ID NO: 61209 - DNA, 892 bp, Triticum aestivum
  misc_feature (1)..(892): Ceres Seq. ID no. 14301727
aatcaaaaaaaaaaatcaaccacttcatcatcatcatcgtctcagatttcgaaaaatggcagcgaagatctcccagcttgcgtgtttctcctccaccaaccgccaattccacttccagaaccgatcgtttccaagccttaggttccgtcccgagtcttttgtagttagaagcgttgttgatgggaacagctcggaaacaccagcttctctgagctatgcagctgaggtttcgaaacctttcgttgagaaaacatctacagtggatgaaactactacgggtaaagaggttatcacagagtcggtagaggaacatgttgccacaacacagcctaaaagagcagcgaagattcatgacttctgttttggcattccttatggtggtctggttatgagtggaggattgcttggatttgcgttttcacgaaatcttacaagtttaagtactggggttctctatggtggtggccttctagctcttagtacgttgagcatgaagatttggcgacagggaaagtctagtttcccttatattctaggtcaagcagtgctttcagctgtcgtcttctggaagaacttcacatcttactctatgactaagaagctgtttcctgccgggctatttgctgtcgtcagtgctgccatgttgtgtttctattcgtacgtggtgctctctggaggaaacccacctccaaagaaacttaaaccatctgctactactagtccttcatactgaagaaacttcacataggttagattcaaagatgaagatcttctcttttggtggctcttgtgcgttgcattcctggtgtaattttatacttttgacttttgaggcaacaactgtgacctgttctttccaatgtcgtaattgaaagttttgtttaatggtgac

SEQ ID NO: 61210 - protein, 243 aa, Triticum aestivum
  peptide (1)..(243): Ceres Seq. ID no. 14301728
IKKKNQPLHHHHRLRFRKMAAKISQLACFSSTNRQFHFQNRSFPSLRFRPESFVVRSVVDGNSSETPASLSYAAEVSKPFVEKTSTVDETTTGKEVITESVEEHVATTQPKRAAKIHDFCFGIPYGGLVMSGGLLGFAFSRNLTSLSTGVLYGGGLLALSTLSMKIWRQGKSSFPYILGQAVLSAVVFWKNFTSYSMTKKLFPAGLFAVVSAAMLCFYSYVVLSGGNPPPKKLKPSATTSPSY

SEQ ID NO: 61211 - protein, 225 aa, Triticum aestivum
  peptide (1)..(225): Ceres Seq. ID no. 14301729
MAAKISQLACFSSTNRQFHFQNRSFPSLRFRPESFVVRSVVDGNSSETPASLSYAAEVSKPFVEKTSTVDETTTGKEVITESVEEHVATTQPKRAAKIHDFCFGIPYGGLVMSGGLLGFAFSRNLTSLSTGVLYGGGLLALSTLSMKIWRQGKSSFPYILGQAVLSAVVFWKNFTSYSMTKKLFPAGLFAVVSAAMLCFYSYVVLSGGNPPPKKLKPSATTSPSY

SEQ ID NO: 61212 - DNA, 1467 bp, Triticum aestivum
  misc_feature (1)..(1467): Ceres Seq. ID no. 14302754
atcgcctcatcccgctctccggtaatacacgttctctgcactcctctcgtgcgagaatggctgcaagcattctgtcccacgttgtctccgacctctgcatcggcaagccggcggtgcgtgtgctgccgccgtcgactccaatcgcggcggccctcgccacgctccgcgctggtgccgacccgttcgtcttcgtggacgctgcacccccggacgcgaagaagacggccgtgttgtccgtcgtcaaggtcagcgtcgcggagatcctgtgttacgtctgcggcgacggtggcaacctcagcgaccccgcggccgcgctcggccggcccgtttccgtgctcacggccgtggtgggcgatcacggcgtcactcgccaagtggatccacagacgagcctgctcgacgccatcgacgcgctgctggccaacaactcgcacagcctggtcgtcccgctccacgcccgggcccgaaagaagcaccaccacgtctccgccggctactgcgtgctgacgcagcaagacatcgtccggcacctcttcggctccatctccctcttctccccggtcgccgcgctctccgtgtcctccctcggcctcgtgcgccgggacgacgtgcacgccgtccacgtcgacgacgacgcgctcgacgccatccctctcctgcggaggtccatcgggcaaggcaccgccgtggccgtcgtggcggacgacgacgcgctcgtcggagagatctgcccgggcgtgctcggctcgtgcgacgacgtcgagtccgtgtccgcggccttcgccacgctctccgccggcgacgccatgacgtacatcgactgctacttctcgccgcccgagttcctgctccgctccatcagagccgagctcacgggcaaagggcttcatgccatgtgcgacctcatggatgccgcctacacaacggacgttggagctctgtcgtcgtcatcaacgtcatctgatgaggagtgtttgccattggcgcctgcgagacgcgcgaggaagatgtcgtcgggaagcttccggtggcggtcgacggaggacgtggcggcgtgtcatgctgagagttcgctggtcgccgtcatggcccaagcgcttgcgcaccgagtcgggcatgtttgggtcgtcgatgagctcagcggcgctctagtcggagtcgtcagctgcgccgatgtgcttgctgtgctccgggaccatctccgcccagagtgatatgcagatgatttgtgatcgatcctatagcctgcggatgtgtaagcatagcttagagctcggcgatttcccgtcgtgccgccctgctacgactgttggagacctgctgctgttttttttaggatcggcccagcttttttttagaacatgttggttccagtttttatttttgtttttgattttgagggtgtaaccaagttttatattcatcgtaagccaggaatacatctcggatcatgaggttgaccaagcc

SEQ ID NO: 61213 - protein, 403 aa, Triticum aestivum
  peptide (1)..(403): Ceres Seq. ID no. 14302755
RLIPLSGNTRSLHSSRARMAASILSHVVSDLCIGKPAVRVLPPSTPIAAALATLRAGADPFVFVDAAPPDAKKTAVLSVVKVSVAEILCYVCGDGGNLSDPAAALGRPVSVLTAVVGDHGVTRQVDPQTSLLDAIDALLANNSHSLVVPLHARARKKHHHVSAGYCVLTQQDIVRHLFGSISLFSPVAALSVSSLGLVRRDDVHAVHVDDDALDAIPLLRRSIGQGTAVAVVADDDALVGEICPGVLGSCDDVESVSAAFATLSAGDAMTYIDCYFSPPEFLLRSIRAELTGKGLHAMCDLMDAAYTTDVGALSSSSTSSDEECLPLAPARRARKMSSGSFRWRSTEDVAACHAESSLVAVMAQALAHRVGHVWVVDELSGALVGVVSCADVLAVLRDHLRPE

SEQ ID NO: 61214 - protein, 385 aa, Triticum aestivum
  peptide (1)..(385): Ceres Seq. ID no. 14302756
MAASILSHVVSDLCIGKPAVRVLPPSTPIAAALATLRAGADPFVFVDAAPPDAKKTAVLSVVKVSVAEILCYVCGDGGNLSDPAAALGRPVSVLTAVVGDHGVTRQVDPQTSLLDAIDALLANNSHSLVVPLHARARKKHHHVSAGYCVLTQQDIVRHLFGSISLFSPVAALSVSSLGLVRRDDVHAVHVDDDALDAIPLLRRSIGQGTAVAVVADDDALVGEICPGVLGSCDDVESVSAAFATLSAGDAMTYIDCYFSPPEFLLRSIRAELTGKGLHAMCDLMDAAYTTDVGALSSSSTSSDEECLPLAPARRARKMSSGSFRWRSTEDVAACHAESSLVAVMAQALAHRVGHVWVVDELSGALVGVVSCADVLAVLRDHLRPE

SEQ ID NO: 61215 - DNA, 853 bp, Triticum aestivum
  misc_feature (1)..(853): Ceres Seq. ID no. 13661969
aatggtaagagagagtatgggagaagagtccgaggcttttgccacgacggcgccgttagctccagtgaccggtgagcgaaaagtaaggaacgacttggaggaaacattaccaaaaccatatttggcaagagcactagtagctccagatacagagcatccgaatggatcagaaggtcatgacagcaaaggcatgagtgttatgcaacaacatgttgcttttttcgaccaaaacggcgatggaatcgtctatccttgggagacttatgcgggattccgtgacctcggtttcaacccaatctcttctgttttttgggccatattcataaactttgcgtttagctacgttacacttccgagttggttgccatcaccactattgcctgtttatatcgacaacattcacaaagccaagcatgggagtgattcaagcacctatgataccgaaggaaggtacgtcccggttaatctcgagaacatctttagcaaatatgcgttaacggctccaaataaaataacattaaaagagctttggaacttaaccgagggaaaccgaatggcaatcgatccttttggatggcttgcgaataaagttgaatggctactagtctatcttcttgcaaaggatgaggaagggttcgtgtctaaagaagctgtgagaggtgtctttgatgcaagtttctttgaatactgtgctaaaaagaataaagagaaggccgattctcgcaagcaagactaagcatttaatttgcttatcttttaaatttgtccgtttgtattattatgctctcaatcttaattaggaaaaggacagaaaacaaaaactctatgtggaataaaacgtttgtgttcttgg

SEQ ID NO: 61216 - protein, 244 aa, Triticum aestivum
  peptide (1)..(244): Ceres Seq. ID no. 13661970
MVRESMGEESEAFATTAPLAPVTGERKVRNDLEETLPKPYLARALVAPDTEHPNGSEGHDSKGMSVMQQHVAFFDQNGDGIVYPWETYAGFRDLGFNPISSVFWAIFINFAFSYVTLPSWLPSPLLPVYIDNIHKAKHGSDSSTYDTEGRYVPVNLENIFSKYALTAPNKITLKELWNLTEGNRMAIDPFGWLANKVEWLLVYLLAKDEEGFVSKEAVRGVFDASFFEYCAKKNKEKADSRKQD

SEQ ID NO: 61217 - protein, 239 aa, Triticum aestivum
  peptide (1)..(239): Ceres Seq. ID no. 13661971
MGEESEAFATTAPLAPVTGERKVRNDLEETLPKPYLARALVAPDTEHPNGSEGHDSKGMSVMQQHVAFFDQNGDGIVYPWETYAGFRDLGFNPISSVFWAIFINFAFSYVTLPSWLPSPLLPVYIDNIHKAKHGSDSSTYDTEGRYVPVNLENIFSKYALTAPNKITLKELWNLTEGNRMAIDPFGWLANKVEWLLVYLLAKDEEGFVSKEAVRGVFDASFFEYCAKKNKEKADSRKQD

SEQ ID NO: 61218 - protein, 181 aa, Triticum aestivum
  peptide (1)..(181): Ceres Seq. ID no. 13661972
MSVMQQHVAFFDQNGDGIVYPWETYAGFRDLGFNPISSVFWAIFINFAFSYVTLPSWLPSPLLPVYIDNIHKAKHGSDSSTYDTEGRYVPVNLENIFSKYALTAPNKITLKELWNLTEGNRMAIDPFGWLANKVEWLLVYLLAKDEEGFVSKEAVRGVFDASFFEYCAKKNKEKADSRKQD

SEQ ID NO: 61219 - DNA, 586 bp, Triticum aestivum
  misc_feature (1)..(586): Ceres Seq. ID no. 12623423
cctaccgacaaaagtagtggtgatcgcactgctcggtatggcagccaatgttcctcttggcatctggagggagcacaccacgaagttttcagtgcaatggtttgcggcggtccatgctgcagtgcctttcatagggatgctgaggaagtccatcctgatgccgaagagtgccatggcccttaccatagctgcctcaatattgggtcagacaattggttcaagagctgaacgtatcagattgaagagggcaaaattagcagcagagggccatggccatgaacatgctacccggattgaagctccggtgagcctgaaaactgggagctcaggtgctgtccagctctgggacccgctcggccttagggtcaaaggcggcgtgtctccaaccctggttccgactgttggtgccatgtattgatgagatgatcatgcttcgttgcggcggctgtgataattgtatcaagagtttcagaaattgtttcttgtattcattgttattgtgtcttgtaaaggattactggctacattggattcttctccccacatgagtttgggtgcaatcaataaatttcaccgtgtcctttgg

SEQ ID NO: 61220 - protein, 138 aa, Triticum aestivum
  peptide (1)..(138): Ceres Seq. ID no. 12623424
LPTKVVVIALLGMAANVPLGIWREHTTKFSVQWFAAVHAAVPFIGMLRKSILMPKSAMALTIAASILGQTIGSRAERIRLKRAKLAAEGHGHEHATRIEAPVSLKTGSSGAVQLWDPLGLRVKGGVSPTLVPTVGAMY

SEQ ID NO: 61221 - protein, 126 aa, Triticum aestivum
  peptide (1)..(126): Ceres Seq. ID no. 12623425
MAANVPLGIWREHTTKFSVQWFAAVHAAVPFIGMLRKSILMPKSAMALTIAASILGQTIGSRAERIRLKRAKLAAEGHGHEHATRIEAPVSLKTGSSGAVQLWDPLGLRVKGGVSPTLVPTVGAMY

SEQ ID NO: 61222 - protein, 93 aa, Triticum aestivum
  peptide (1)..(93): Ceres Seq. ID no. 12623426
MLRKSILMPKSAMALTIAASILGQTIGSRAERIRLKRAKLAAEGHGHEHATRIEAPVSLKTGSSGAVQLWDPLGLRVKGGVSPTLVPTVGAMY

SEQ ID NO: 61223 - DNA, 1102 bp, Triticum aestivum
  misc_feature (1)..(1102): Ceres Seq. ID no. 13664173
cctagaacatcctaatcgaaaaaccatttcccccaacacagaacagaattgaacaaagctagcaatcactcataggtggccaccatggacgtggcctcggtgcttctccccttcgtcctggcgctggtggcgatcccgatcttgctcgcgctacacgactggccacgcctcccaccgggcccgtgcccgtggccggtggtgggcaacctgcgccagatcaagcccgtgcggtgccgctgcttccaggagtgggcggagcggtatgggccaatcttctctgtgtggttcggctcctccctcaccgtcgtcgtctccacgccagagctggcaaaggaggtgctcaaggaccacgaccagcagctcgccaaccgcacccgcaaccgctccacccaacgcttcagccgcaacggccaggacctcgtctgggccgactacggcccgcactacatcaaggtgcgcaagctgtgcaatctcgagctcttcacgcagaagcgactcgaggcgctccgccccatccgggaggacgaggtcaccgccatggtctcgtccgtccaccgcgccgccaccggccccggtaatgaaggaaagccactggttgtcaggagtcaccttgccatggtgtctttcaacaatataacaaggctagtttttgggaagcggttcatgwrtdmaasayrdtracagttrgaacgaagaagggcaggagttcaagagtattgtcaacaacggtatcaaaattggtgcatctctctctattgctgaatatgtttggtacttgagatggttgtttccacttaatgaggagctttacaagacccacaatgagagaagggatcagctgaccaagaagatcatagaagagcatgcgaaggccctcaaggagagtggtagcaagcatcatttcgtggatgcactgttgactctcagagaacagtatgacctcagtgatgacacagttttcggacttctatgggtatgatggatgcccctttatatttaattaatatatcttcctacagtacattttgcttttagtgtcataagatgagatgtcgtgctaatttttaatgtggaataaaatatcaatgccttgtcagtgctc

SEQ ID NO: 61224 - protein, 198 aa, Triticum aestivum
  peptide (1)..(198): Ceres Seq. ID no. 15220282
  misc_feature (195)..(195): Xaa is any aa, unknown or other
  misc_feature (196)..(196): Xaa is any aa, unknown or other
  misc_feature (197)..(197): Xaa is any aa, unknown or other
  misc_feature (198)..(198): Xaa is any aa, unknown or other
MDVASVLLPFVLALVAIPILLALHDWPRLPPGPCPWPVVGNLRQIKPVRCRCFQEWAERYGPIFSVWFGSSLTVVVSTPELAKEVLKDHDQQLANRTRNRSTQRFSRNGQDLVWADYGPHYIKVRKLCNLELFTQKRLEALRPIREDEVTAMVSSVHRAATGPGNEGKPLVVRSHLAMVSFNNITRLVFGKRFMXXXX

SEQ ID NO: 61225 - protein, 124 aa, Triticum aestivum
  peptide (1)..(124): Ceres Seq. ID no. 15220283
MGQSSLCGSAPPSPSSSPRQSWQRRCSRTTTSSSPTAPATAPPNASAATARTSSGPTTARTTSRCASCAISSSSRRSDSRRSAPSGRTRSPPWSRPSTAPPPAPVMKESHWLSGVTLPWCLSTI

SEQ ID NO: 61226 - DNA, 625 bp, Triticum aestivum
  misc_feature (1)..(625): Ceres Seq. ID no. 12624483
acacgcccaacagctccacacatcgccacggtcttcttggctcctccgtccacagctagccagcccctccgctccgctccaccaccagcagccaaatggcgaagctgctggcggccggcgtcgcgttcctcctggccctcgccgcagcggcggcgctggccccgtctccggcctcggccttgaagggcgccggcgggctaggcctcggcggcgcggctgcggccgtggttatgcggcggggcgggcggacgtgccggggcacggtgggcgagtgcatggagtacttcggcgtggacggcgagggcgagagcgaggtggcggcgatggccggcaagcggcgggtgctgcaggacgggtccgggtacatcggctacgacgcgctgcggcgggacaacgtgccgtgctcgcagcgcggtgcctcctactacaactgccagcccggagccgaggccaacccctactcccgcggatgcagcgccatcacccagtgcaggggctgatccccttcattaaaccctgcttcattccttcttaccacctgcatgcctcatcaattagtattgctatctatctgtaacgtaatgtaatgtaatgtaattacaagaagaagatcaaacacttcttg

SEQ ID NO: 61227 - protein, 191 aa, Triticum aestivum
  peptide (1)..(191): Ceres Seq. ID no. 12624484
HAQQLHTSPRSSWLLRPQLASPSAPLHHQQPNGEAAGGRRRVPPGPRRSGGAGPVSGLGLEGRRRARPRRRGCGRGYAAGRADVPGHGGRVHGVLRRGRRGRERGGGDGRQAAGAAGRVRVHRLRRAAAGQRAVLAARCLLLQLPARSRGQPLLPRMQRHHPVQGLIPFIKPCFIPSYHLHASSISIAIYL

SEQ ID NO: 61228 - protein, 134 aa, Triticum aestivum
  peptide (1)..(134): Ceres Seq. ID no. 12624485
MAKLLAAGVAFLLALAAAAALAPSPASALKGAGGLGLGGAAAAVVMRRGGRTCRGTVGECMEYFGVDGEGESEVAAMAGKRRVLQDGSGYIGYDALRRDNVPCSQRGASYYNCQPGAEANPYSRGCSAITQCRG

SEQ ID NO: 61229 - DNA, 875 bp, Triticum aestivum
  misc_feature (1)..(875): Ceres Seq. ID no. 12624490
ttcgacgaggacgaacaacagtgcaacaaagaagtactctgcttttggatcaagaactcgagaacagagaggagaatcgatggccacgttcgcgacgtcaacggcggcagtgatgggatcggctcgccctggccgggtggccgggcctcggcggtgcgtggtggcgcgcgcgtccgccatgatggcggcaccggcgccggtggcggccgggaggacgcactacgaggtgctcggtgtgagtgccagggcgagcaggggggagatcaaggaggcgtaccggcgtctggccagggaggtgcacccggacgctgctggtggcggcggcgacgaggggttcatccggcttcacgcggcctacgccacgctggccgaccctgacgagcgcgcgcgctacgaccgggacgtggcctgccgcaccgccgggatgatgatgcggcggccggccgcggccgggccggcgttccggcggaggacgtgggagaccgaccagtgctggtaggaggggcggacacacgacgacacgtggttgctcagttctcccgttcccggccggcggccgtctggttcgatcaggcacggcgtcgaggttgtcgatggtcgccaggaaggaaaccgcgtcgtctgacgtgcgccgtccgatcagtgttggccggtccagatctaacgacgcggatgcgggagagctgtgaactgcgacgcgacgagaggcattttttgaagatctcttgcgttcgaccagcaaatgattagctactgcctgtaaattaatggcctgggaaatgttatagctctctgtggttatagaaggaaatatttaccccctccatgtcatagttttttgtttgccaagtaaggattaaagggttactaacttc

SEQ ID NO: 61230 - protein, 165 aa, Triticum aestivum
  peptide (1)..(165): Ceres Seq. ID no. 12624491
STRTNNSATKKYSAFGSRTREQRGESMATFATSTAAVMGSARPGRVAGPRRCVVARASAMMAAPAPVAAGRTHYEVLGVSARASRGEIKEAYRRLAREVHPDAAGGGGDEGFIRLHAAYATLADPDERARYDRDVACRTAGMMMRRPAAAGPAFRRRTWETDQCW

SEQ ID NO: 61231 - protein, 139 aa, Triticum aestivum
  peptide (1)..(139): Ceres Seq. ID no. 12624492
MATFATSTAAVMGSARPGRVAGPRRCVVARASAMMAAPAPVAAGRTHYEVLGVSARASRGEIKEAYRRLAREVHPDAAGGGGDEGFIRLHAAYATLADPDERARYDRDVACRTAGMMMRRPAAAGPAFRRRTWETDQCW

SEQ ID NO: 61232 - protein, 128 aa, Triticum aestivum
  peptide (1)..(128): Ceres Seq. ID no. 12624493
MGSARPGRVAGPRRCVVARASAMMAAPAPVAAGRTHYEVLGVSARASRGEIKEAYRRLAREVHPDAAGGGGDEGFIRLHAAYATLADPDERARYDRDVACRTAGMMMRRPAAAGPAFRRRTWETDQCW

SEQ ID NO: 61233 - DNA, 990 bp, Triticum aestivum
  misc_feature (1)..(990): Ceres Seq. ID no. 13661987
atatctcaccccccgctccattgatagttcgtctcatcttagcttaatatccatggcagcaaagatggcgaagaacgtggacaagccactcttcacggcgacgttcaacgtccaggccagctccaccgactatgtcaccttcatcaccggcatccgcaacaagctccgcaacccggggcaatcctcccacaaccgccccgtgctaccgccgatcgagcccaacgtcccgccgagcaggtggttccacatcgtgctcaagacatcgccggccaacaccgggctcacactcgccacccgcgccgacaacctctattgggagggcttcaagagcagcgacggcacctggtgggagctcacccccggccttatccccggtgccacctatgtcgggtttggcggcacctaccgcgacctcctcggcgacaccgacaagctgaccaacgttgccctcggccggcagcagatggccgacgcggtgactgcgctccacgggcgcaccaaggccgacaagacctccggcccgaagcagcagcaggcgagggaagcggtgacgacgctgctcctcatggtgcacgaggccacgcggttccagaccgtgtcggggttcgtggctggcctgctgcaccccaagacggtggagaagaagagcgggaagatctccaacgagctaaaggcccaggtgaacgggtggcaggacctgtccgaagcgctgttgaagacggatgcgaagcccccggcgggaaagccgccagcaaagttcacgccgatcgagaagatgggtgtgaggacggcagagcaggcggccgccaccctggggatcctactgttcgtccaggtgcccggtgggatgacagtggctcaggcgctggagctgtttcataagagtggggggaaataggtagttgtgcaggtatatctgcatgggtatcgtataagtcaaataaacatgtcacagagtgactaaatgatataaataaataaacatgtcgc

SEQ ID NO: 61234 - protein, 298 aa, Triticum aestivum
  peptide (1)..(298): Ceres Seq. ID no. 13661988
YLTPRSIDSSSHLSLISMAAKMAKNVDKPLFTATFNVQASSTDYVTFITGIRNKLRNPGQSSHNRPVLPPIEPNVPPSRWFHIVLKTSPANTGLTLATRADNLYWEGFKSSDGTWWELTPGLIPGATYVGFGGTYRDLLGDTDKLTNVALGRQQMADAVTALHGRTKADKTSGPKQQQAREAVTTLLLMVHEATRFQTVSGFVAGLLHPKTVEKKSGKISNELKAQVNGWQDLSEALLKTDAKPPAGKPPAKFTPIEKMGVRTAEQAAATLGILLFVQVPGGMTVAQALELFHKSGGK

SEQ ID NO: 61235 - protein, 281 aa, Triticum aestivum
  peptide (1)..(281): Ceres Seq. ID no. 13661989
MAAKMAKNVDKPLFTATFNVQASSTDYVTFITGIRNKLRNPGQSSHNRPVLPPIEPNVPPSRWFHIVLKTSPANTGLTLATRADNLYWEGFKSSDGTWWELTPGLIPGATYVGFGGTYRDLLGDTDKLTNVALGRQQMADAVTALHGRTKADKTSGPKQQQAREAVTTLLLMVHEATRFQTVSGFVAGLLHPKTVEKKSGKISNELKAQVNGWQDLSEALLKTDAKPPAGKPPAKFTPIEKMGVRTAEQAAATLGILLFVQVPGGMTVAQALELFHKSGGK

SEQ ID NO: 61236 - protein, 277 aa, Triticum aestivum
  peptide (1)..(277): Ceres Seq. ID no. 13661990
MAKNVDKPLFTATFNVQASSTDYVTFITGIRNKLRNPGQSSHNRPVLPPIEPNVPPSRWFHIVLKTSPANTGLTLATRADNLYWEGFKSSDGTWWELTPGLIPGATYVGFGGTYRDLLGDTDKLTNVALGRQQMADAVTALHGRTKADKTSGPKQQQAREAVTTLLLMVHEATRFQTVSGFVAGLLHPKTVEKKSGKISNELKAQVNGWQDLSEALLKTDAKPPAGKPPAKFTPIEKMGVRTAEQAAATLGILLFVQVPGGMTVAQALELFHKSGGK

SEQ ID NO: 61237 - DNA, 712 bp, Triticum aestivum
  misc_feature (1)..(712): Ceres Seq. ID no. 12624501
cagacattgctggccacttgcccaacagcttcttcgtctcgaattcctcctgcaagctagagtagtagcgcacggagacgagatctagagggaacaccggcggcccttggccttgggggagggagatctagggatggtgggggtgagcgccgggacgggggcaatgggctccctcctcgccaagctcaccgcgcttctcagcgacgagtacaagctcctgaagcgcgtccgaaaggagatcgagttcctcaagtgcgagctcgagaggatgcggatcctgttggagaggctggcggacatggaggggaggctcgacggcctggccaggggctggagagacagcgtgcgcgacctcagctacgacatggaagactgcatcgaccgcttcatggaccggcttggcagcggcgacgccaaacccaagttcatgaagaggacggcgcgccggctcgagactctgtgggcgcgccatgacatcgcgacccagatcaaggagctcatggctcgcgtcatggaggaaatgagcggcgtgacagatactgcatttttcctaactcttgcacttgttgttgttgttgttgaggatcttaactcttgcacttgtatgtatttctggattttttttagaaaaggaggatgacccccggcctctgcatctgggagatgcatacggccactttattgattattctggagaaccatacaaagtatt

SEQ ID NO: 61238 - protein, 168 aa, Triticum aestivum
  peptide (1)..(168): Ceres Seq. ID no. 12624502
MVGVSAGTGAMGSLLAKLTALLSDEYKLLKRVRKEIEFLKCELERMRILLERLADMEGRLDGLARGWRDSVRDLSYDMEDCIDRFMDRLGSGDAKPKFMKRTARRLETLWARHDIATQIKELMARVMEEMSGVTDTAFFLTLALVVVVVEDLNSCTCMYFWIFFRKGG

SEQ ID NO: 61239 - protein, 158 aa, Triticum aestivum
  peptide (1)..(158): Ceres Seq. ID no. 12624503
MGSLLAKLTALLSDEYKLLKRVRKEIEFLKCELERMRILLERLADMEGRLDGLARGWRDSVRDLSYDMEDCIDRFMDRLGSGDAKPKFMKRTARRLETLWARHDIATQIKELMARVMEEMSGVTDTAFFLTLALVVVVVEDLNSCTCMYFWIFFRKGG

SEQ ID NO: 61240 - protein, 123 aa, Triticum aestivum
  peptide (1)..(123): Ceres Seq. ID no. 12624504
MRILLERLADMEGRLDGLARGWRDSVRDLSYDMEDCIDRFMDRLGSGDAKPKFMKRTARRLETLWARHDIATQIKELMARVMEEMSGVTDTAFFLTLALVVVVVEDLNSCTCMYFWIFFRKGG

SEQ ID NO: 61241 - DNA, 911 bp, Triticum aestivum
  misc_feature (1)..(911): Ceres Seq. ID no. 12623607
aacaagcgagcgaacacacagcatcgtcgcacgccattgcttagtagccagggaaaaagagaagccgatctgattctgctctcatcacacacaccgccatgccggggagagaagacgaagccttcgctgacgaggagagctcgcagtgcagcagcggctgccagtccggctggaccctgtacctggagcattccgggtcaggccagcagcaacgtcgcacgctgccatacgtgcagcccggcgacgtcctgaggcagatgctgccgccggtggaatactccgacgacgaggaggaggattctatggtctccgacgcgtcctccggcctgccgccgcacctgcgcggcgaagaggaggagctgctgcaagtgcaaggtcagaccagcatgctttcacagcagcgtcggtcggccttcggcggcgaccaatgccactccggctggggtggcagtcgtcacagcgcgagcctctctggctcccgttccttcatctccacgaggtctcgtagttcgggcgatatgaggagcaggaagaagaggagggccgtcgtccaacggcaggatgagccggcgacgcgtcgccatggtgtcttcgacgacgacgacgatctccacgacaccgcgagttcgtccgacgtcattgctcccgcggcagtggtggaagctatgaaggatggtatggacctgcagccaagctgcgccttctcggttcgaagcaccggcatgcagggtctcgcgatgctgcaccataactcatgaagtagctagctagggaacgagaacggccttcttttgtcggccgcatgtataaccagatcgcccatagcctcacacgtcacctagcttgtttgtttccaagttatatgtacgtatgcaaatcgtccgtactcgagacaagaaccaacagttttg

SEQ ID NO: 61242 - protein, 219 aa, Triticum aestivum
  peptide (1)..(219): Ceres Seq. ID no. 12623608
MPGREDEAFADEESSQCSSGCQSGWTLYLEHSGSGQQQRRTLPYVQPGDVLRQMLPPVEYSDDEEEDSMVSDASSGLPPHLRGEEEELLQVQGQTSMLSQQRRSAFGGDQCHSGWGGSRHSASLSGSRSFISTRSRSSGDMRSRKKRRAVVQRQDEPATRRHGVFDDDDDLHDTASSSDVIAPAAVVEAMKDGMDLQPSCAFSVRSTGMQGLAMLHHNS

SEQ ID NO: 61243 - protein, 166 aa, Triticum aestivum
  peptide (1)..(166): Ceres Seq. ID no. 12623609
MLPPVEYSDDEEEDSMVSDASSGLPPHLRGEEEELLQVQGQTSMLSQQRRSAFGGDQCHSGWGGSRHSASLSGSRSFISTRSRSSGDMRSRKKRRAVVQRQDEPATRRHGVFDDDDDLHDTASSSDVIAPAAVVEAMKDGMDLQPSCAFSVRSTGMQGLAMLHHNS

SEQ ID NO: 61244 - protein, 151 aa, Triticum aestivum
  peptide (1)..(151): Ceres Seq. ID no. 12623610
MVSDASSGLPPHLRGEEEELLQVQGQTSMLSQQRRSAFGGDQCHSGWGGSRHSASLSGSRSFISTRSRSSGDMRSRKKRRAVVQRQDEPATRRHGVFDDDDDLHDTASSSDVIAPAAVVEAMKDGMDLQPSCAFSVRSTGMQGLAMLHHNS

SEQ ID NO: 61245 - DNA, 760 bp, Triticum aestivum
  misc_feature (1)..(760): Ceres Seq. ID no. 13661991
atgaaattagaagctttaagttcctctctgttctcaacttgtcaccgaagattacaaacagggtctctcataaatggccgctaggtttcttagtttgagacgagctttgtctgtctacctcactaaccaacaacctcgtgttcctctgtttcaagcaggtaagcttgcgcaatcaaagtcactcttgagcagagattatgcttatgggggattactacagaggcactttagtgaaactgcagcaaccaatggctgctgcaactcttcaaactctgctgcggaacttaccaaagctccctccacctcccctgcaacagcctatgaggagctgattgtgaagtacaagtcccagttgaaaataaacccgaggcatgacttcatgatggtctttacttgcaaggtctgtgagacgaggtcgatgaagatggcgagcagagagtcttacgagaagggagttgtggtggtacgatgcgaaggatgtgataatctacatttgattgcagaccgtcgtggttggtttggagagccggggagcgtggaggagtttcttgctgctcaaggggaagagttcaagaaaggatccatggattctcttagccttacagttgaagacttggctggagagaagatgtccagtgaatagagcaacaagctcttcgttgctttagctattaggacttgaaccctgcagagaaaataaaatattttatatatttttattttaatttttgagacaaattaagatacataatatttggct

SEQ ID NO: 61246 - protein, 189 aa, Triticum aestivum
  peptide (1)..(189): Ceres Seq. ID no. 15220150
MAARFLSLRRALSVYLTNQQPRVPLFQAGKLAQSKSLLSRDYAYGGLLQRHFSETAATNGCCNSSNSAAELTKAPSTSPATAYEELIVKYKSQLKINPRHDFMMVFTCKVCETRSMKMASRESYEKGVVVVRCEGCDNLHLIADRRGWFGEPGSVEEFLAAQGEEFKKGSMDSLSLTVEDLAGEKMSSE

SEQ ID NO: 61247 - DNA, 525 bp, Triticum aestivum
  misc_feature (1)..(525): Ceres Seq. ID no. 13664178
atcactacttcttcatctccattcaaaatttctatcctcagcttctactaggaagcacactcgtgagacatggccgccgcagtttccaccgtcggtgccatcaacagagctccgttgagcttgaacgggtcaggagcaggagctgcttcagtcccagctacgaccttcttgggaaagaaagttgtaaccgcgtcgagattcgcacagaacaacaagaagagcaacggatcattcaaggtggttgccgtgaaagaagacaaacaaaccgatggagacagatggaggggacttgcctacgacatctctgatgatcaacaagacatcaccagaggcaaaggtatggttgactcagtcttccaagctcctatgggaaccggaactcacmrcgccgtccttagctcctatgagtacctcagccaaggtcttaagcagtacaacttggacaacatgatggatgggctttacattgcccctgctttcatggacaagcttgttgttcacatcaccragnacttcttgactttg

SEQ ID NO: 61248 - protein, 152 aa, Triticum aestivum
  peptide (1)..(152): Ceres Seq. ID no. 13664179
  misc_feature (106)..(106): Xaa is any aa, unknown or other
  misc_feature (147)..(147): Xaa is any aa, unknown or other
  misc_feature (148)..(148): Xaa is any aa, unknown or other
MAAAVSTVGAINRAPLSLNGSGAGAASVPATTFLGKKVVTASRFAQNNKKSNGSFKVVAVKEDKQTDGDRWRGLAYDISDDQQDITRGKGMVDSVFQAPMGTGTHXAVLSSYEYLSQGLKQYNLDNMMDGLYIAPAFMDKLVVHITXXFLTL

SEQ ID NO: 61249 - protein, 101 aa, Triticum aestivum
  peptide (1)..(101): Ceres Seq. ID no. 13664180
HYFFISIQNFYPQLLLGSTLVRHGRRSFHRRCHQQSSVELERVRSRSCFSPSYDLLGKESCNRVEIRTEQQEEQRIIQGGCRERRQTNRWRQMEGTCLRHL

SEQ ID NO: 61250 - DNA, 531 bp, Triticum aestivum
  misc_feature (1)..(531): Ceres Seq. ID no. 12784493
acacaactggtcctacaacgcgcgaacacacacaaacccaagcacatagtaacatcacagatcggcatggcgcacttccaggaggtggactactgctcggaggaggtgagggcggtgggcaacccggcccgccgcggctgcggcggcgtgcaggagcacatcgtcagggagacgttcgtgcaggagttcgacaccgccggccgccgccacggccaccacggccgcggctccggccacttcgaggtgcgcgagagcaggctcgaggaggacgtcaacacctgcaccggcgagttccacgagcgcaaggagaacttcgtcgtcagggccgatgactgagcttacacgtaacggagcacactaccatgtgtgtatatgtcagcagcatatgtatgtgtgatgttgcgcacagtcgtatagcgtatgcatgcgtgcgtgcttggcggccatcagcccctatcgcgcgcgcgtgcagcgcttaaataagcgctctaatcgtgaaccagaataaagcttctcgtgattattattccg

SEQ ID NO: 61251 - protein, 111 aa, Triticum aestivum
  peptide (1)..(111): Ceres Seq. ID no. 12784494
TQLVLQRANTHKPKHIVTSQIGMAHFQEVDYCSEEVRAVGNPARRGCGGVQEHIVRETFVQEFDTAGRRHGHHGRGSGHFEVRESRLEEDVNTCTGEFHERKENFVVRADD

SEQ ID NO: 61252 - protein, 109 aa, Triticum aestivum
  peptide (1)..(109): Ceres Seq. ID no. 12784495
TTGPTTREHTQTQAHSNITDRHGALPGGGLLLGGGEGGGQPGPPRLRRRAGAHRQGDVRAGVRHRRPPPRPPRPRLRPLRGAREQARGGRQHLHRRVPRAQGELRRQGR

SEQ ID NO: 61253 - protein, 89 aa, Triticum aestivum
  peptide (1)..(89): Ceres Seq. ID no. 12784496
MAHFQEVDYCSEEVRAVGNPARRGCGGVQEHIVRETFVQEFDTAGRRHGHHGRGSGHFEVRESRLEEDVNTCTGEFHERKENFVVRADD

SEQ ID NO: 61254 - DNA, 1137 bp, Triticum aestivum
  misc_feature (1)..(1137): Ceres Seq. ID no. 13661426
cctttcgatttcttcgcttgtggcgagtcacagcgttccaatttcccagcacttaactcgcccgacctacccaccaaccaccccgcgtcgagactgaccagactgaattgatcgataataaatcagcacgctgcacgcgctgggggtctgagtcagaggaggaagaagatcgaggagcagctgattcgttcgcacaaagcgccgggatcagatccatctctccgcgcgggatgtctgaggtggcggcgatggcggggcaggcgtacatgagacagctctccaagcaccctctccgcaccaaggccatcacctccggggtgctggcgggctgcagcgacgccgtcgcccagaagatctccggcgtcaagaggctccagctcaggaggctcctcctcataatgctctatggatttgcatacgcaggaccattcggtcattttttccacaagcttatggacaagattttcaagggacagaagaaaggaaaagaaactacagccaagaaggtcatagtggagcagctaactgtatcaccatggaacaatatgatgttcatgatgtactacggtctggtagttgaagggaggccattcgggcaagtaaagagcaaggtcaagaaggactttgcaaacatccaattgacagcttggaagttctggccaatagttagctggatcaactatgagtacatgccactccagctccgagttcttttcgccagctccgttgcatcatgctgggcagtgtttctgaacctgaaagcagcaagatccattgccggcgctagtaagaatgcatagaagaaggttggaaggaaggggctagtgctacattgtatttctagctaattaagtatccactagcgattttctcagttcatttttatcgctcagtttgtatttatgtttctatttgaaccccttgagcatcgagaacctagagttaatgtttcaactaagtatgccagtatgtcaatgtgaagagtccctttcttgccaccgggaaaaaaaccctacaaagcaaaaattatcctctacaaggtaccatgtttgttattcctttgggaggaaaatagggactttactgggatctgacgcgtggaaataaatgaacatgctctgaggtttgtagaagctc

SEQ ID NO: 61255 - protein, 189 aa, Triticum aestivum
  peptide (1)..(189): Ceres Seq. ID no. 13661427
MSEVAAMAGQAYMRQLSKHPLRTKAITSGVLAGCSDAVAQKISGVKRLQLRRLLLIMLYGFAYAGPFGHFFHKLMDKIFKGQKKGKETTAKKVIVEQLTVSPWNNMMFMMYYGLVVEGRPFGQVKSKVKKDFANIQLTAWKFWPIVSWINYEYMPLQLRVLFASSVASCWAVFLNLKAARSIAGASKNA

SEQ ID NO: 61256 - protein, 183 aa, Triticum aestivum
  peptide (1)..(183): Ceres Seq. ID no. 13661428
MAGQAYMRQLSKHPLRTKAITSGVLAGCSDAVAQKISGVKRLQLRRLLLIMLYGFAYAGPFGHFFHKLMDKIFKGQKKGKETTAKKVIVEQLTVSPWNNMMFMMYYGLVVEGRPFGQVKSKVKKDFANIQLTAWKFWPIVSWINYEYMPLQLRVLFASSVASCWAVFLNLKAARSIAGASKNA

SEQ ID NO: 61257 - protein, 177 aa, Triticum aestivum
  peptide (1)..(177): Ceres Seq. ID no. 13661429
MRQLSKHPLRTKAITSGVLAGCSDAVAQKISGVKRLQLRRLLLIMLYGFAYAGPFGHFFHKLMDKIFKGQKKGKETTAKKVIVEQLTVSPWNNMMFMMYYGLVVEGRPFGQVKSKVKKDFANIQLTAWKFWPIVSWINYEYMPLQLRVLFASSVASCWAVFLNLKAARSIAGASKNA

SEQ ID NO: 61258 - DNA, 1185 bp, Triticum aestivum
  misc_feature (1)..(1185): Ceres Seq. ID no. 13661430
ctcaagctcaaatcccttaccctcctcgcgtgccctcccttatccccttcaccatggccacctccgccatgacactcgccatggccgcggccacggacgcctccctctttcaccccacgttcctctcccaacacaagctcaccccggcggccgccttcctcccactcattttctctcgcgcgccgctcctccgctccacccgcccccgcgccccccttacgcccctcgtcgcctcctccgacgccgccgaggcgggcctcgactgggccgacgcggaggaagccgaagagacggtgacggaggaggagcccgcggtggcggcctccggtggggatgcggggtacgcagccgagcctcccgaggaggctaaggtgtacgtcgggaacctgccgtatgatgtggacagcgagcggctcgcccagctcttcgaccaggccggcgtcgtcgaggtcgccgaggtcatttacaacagagagtcatgccagagccgtggatttggatttgttaccatgagtactattgaggaagctgacaaagccatcgagacgttcaaccgctacgacatcagcggaaggcttctgaacgtaaacagggcagctcaaaggggctcccgtgttgagagacctcctcgacagtttgcatcttctttcagggcttatgttggtaacctgccatggcaagcggaagactctaggttggtgcaattgttcagcgagcatggggaagtagttaacgctacagttgtgtacgacagagaaactgggcgttcacgaggatttggttttgtaactatggcttcaaaggaagatcttgacagtgctatttcagcgcttgatggacaggagatggatggccgtccactccgagtgaacgttgccgcggagcgaccgcagcgagggttctgatgcagaggagagcgggtgtttcttttggacacacgagaacaacactgctgaaatgttactgcggaagactgaagcatgtcaccacttaaaaatcctgcactggcctcctgatgttgggctatctcctcccatcccatattcttttttcatgcttccgtttgctgttgatgtcatcatgttactttcttgtcaacaccgtaagttcaacttttcaagtaggctactgtaatgatgtcctagtgttctcatgataatcgaagaaggttttgttggtaatgct

SEQ ID NO: 61259 - protein, 300 aa, Triticum aestivum
  peptide (1)..(300): Ceres Seq. ID no. 13661431
QAQIPYPPRVPSLIPFTMATSAMTLAMAAATDASLFHPTFLSQHKLTPAAAFLPLIFSRAPLLRSTRPRAPLTPLVASSDAAEAGLDWADAEEAEETVTEEEPAVAASGGDAGYAAEPPEEAKVYVGNLPYDVDSERLAQLFDQAGVVEVAEVIYNRESCQSRGFGFVTMSTIEEADKAIETFNRYDISGRLLNVNRAAQRGSRVERPPRQFASSFRAYVGNLPWQAEDSRLVQLFSEHGEVVNATVVYDRETGRSRGFGFVTMASKEDLDSAISALDGQEMDGRPLRVNVAAERPQRGF

SEQ ID NO: 61260 - protein, 283 aa, Triticum aestivum
  peptide (1)..(283): Ceres Seq. ID no. 13661432
MATSAMTLAMAAATDASLFHPTFLSQHKLTPAAAFLPLIFSRAPLLRSTRPRAPLTPLVASSDAAEAGLDWADAEEAEETVTEEEPAVAASGGDAGYAAEPPEEAKVYVGNLPYDVDSERLAQLFDQAGVVEVAEVIYNRESCQSRGFGFVTMSTIEEADKAIETFNRYDISGRLLNVNRAAQRGSRVERPPRQFASSFRAYVGNLPWQAEDSRLVQLFSEHGEVVNATVVYDRETGRSRGFGFVTMASKEDLDSAISALDGQEMDGRPLRVNVAAERPQRGF

SEQ ID NO: 61261 - protein, 278 aa, Triticum aestivum
  peptide (1)..(278): Ceres Seq. ID no. 13661433
MTLAMAAATDASLFHPTFLSQHKLTPAAAFLPLIFSRAPLLRSTRPRAPLTPLVASSDAAEAGLDWADAEEAEETVTEEEPAVAASGGDAGYAAEPPEEAKVYVGNLPYDVDSERLAQLFDQAGVVEVAEVIYNRESCQSRGFGFVTMSTIEEADKAIETFNRYDISGRLLNVNRAAQRGSRVERPPRQFASSFRAYVGNLPWQAEDSRLVQLFSEHGEVVNATVVYDRETGRSRGFGFVTMASKEDLDSAISALDGQEMDGRPLRVNVAAERPQRGF

SEQ ID NO: 61262 - DNA, 799 bp, Triticum aestivum
  misc_feature (1)..(799): Ceres Seq. ID no. 12624653
aacgagaaagattgttcctgtctccgacgacaaacgagacctctgctgcgacaccctttgagatagatagatagagagaaaaaatgggtttcttctcttttctcggaagagttctcttcgcttctctattcatcctctccgcctggcaaatgttcaatgactttggaactgacggtggtccagcagctaaagagttggctccaaagcttcatctgaccaaagcacatctctcttccagattaggagttgcattgcctgacattgaggtgaaacaagtggtatgggcaattgttggtctgaaaggacttggaggcttactctttgttgttggcaacgtctttggtgcctatcttctggctgtctacttggtggtcgttagccccatcctatatgatttctacaactttggacctcaggaccgcgagttctctcttctgtttaccgagttcttgcagagcgttgcgcttcttggggcattgctattttttatcggaatgaagaattcgacgactaccagctcctcctcctccgccaagaggaacctgaagaagaggacaccaaagcctaaagctgcttagagttcttctatttacaacagcttctgatgtcttcaagctctaccttcatgttgcttccttacaatttttgcttctttttctactctgtgggattctagagttagccacatttttgtgtttcctatattttactttgggttctaaaagagttttccccttttttatcagagtatactaccctacacttggctgctattcttaagtatctgacaaagctaatt

SEQ ID NO: 61263 - protein, 164 aa, Triticum aestivum
  peptide (1)..(164): Ceres Seq. ID no. 12624654
MGFFSFLGRVLFASLFILSAWQMFNDFGTDGGPAAKELAPKLHLTKAHLSSRLGVALPDIEVKQVVWAIVGLKGLGGLLFVVGNVFGAYLLAVYLVVVSPILYDFYNFGPQDREFSLLFTEFLQSVALLGALLFFIGMKNSTTTSSSSSAKRNLKKRTPKPKAA

SEQ ID NO: 61264 - protein, 142 aa, Triticum aestivum
  peptide (1)..(142): Ceres Seq. ID no. 12624655
MFNDFGTDGGPAAKELAPKLHLTKAHLSSRLGVALPDIEVKQVVWAIVGLKGLGGLLFVVGNVFGAYLLAVYLVVVSPILYDFYNFGPQDREFSLLFTEFLQSVALLGALLFFIGMKNSTTTSSSSSAKRNLKKRTPKPKAA

SEQ ID NO: 61265 - DNA, 715 bp, Triticum aestivum
  misc_feature (1)..(715): Ceres Seq. ID no. 13661894
aggataaggtaaaggaagcaggcaaggcgagacgagagcgtagcagtcagcgtgagcaagagagatggcagcaggaacggcctgggcgggatgccatctcgcccacctcccccaaattcccatctcggtcagcatccccgtgaccggcgctgccgctagcagcaggaggaggaggtgcggcttagcggcggcggcgggggcagcagcagcagcagcgacagacgggcgggtgctgggccggcgccccgtggaggacgtgtacaaggtgcgcgtggtgcgcggcgcggcggcgcaggagcgggtggaggcgctgcgggcgatggagacgtggtcgacgtggcgcacgaggggccgctgccacctggcctgggactggcaggtggaccagctcgtgtacatcgtcgccggcgaggtccgcgtgctccccgccggggccaccaccggcgaggagtacatgcacttcgtggccggcgacctggtccggtaccccaagtggctggaggcggacctccacttcgacgggccctacgaggagcgctaccgcttcctcgcctacggcgacgacaactgaaccgcggcgccccctcctagctagctcctttagtccttctactactagttcactgaagctttcgttcgagttctagccatatagtatttccttttgtttactatatactcctagcctgggacaataaggagtatttcctagtcg

SEQ ID NO: 61266 - protein, 168 aa, Triticum aestivum
  peptide (1)..(168): Ceres Seq. ID no. 13661895
MAAGTAWAGCHLAHLPQIPISVSIPVTGAAASSRRRRCGLAAAAGAAAAAATDGRVLGRRPVEDVYKVRVVRGAAAQERVEALRAMETWSTWRTRGRCHLAWDWQVDQLVYIVAGEVRVLPAGATTGEEYMHFVAGDLVRYPKWLEADLHFDGPYEERYRFLAYGDDN

SEQ ID NO: 61267 - DNA, 807 bp, Triticum aestivum
  misc_feature (1)..(807): Ceres Seq. ID no. 13664337
attcctcttccttcccgagattctctgtaggaaaacgataatccaaacgggataaacttaatcagtcttgtttgctcagattcttagagatcgtgtgattgaaagacccatgactctgttcccgattctaaccgcctcgtttctcttcctcttctgcgttccgttcaccaccgcatctgcagacgacgatttgccgacggcgtacactctcctccaaagctacaacttccccgtcggcattctccccaaaggagtcttgtcctacgatctggacgaatccacggggaagttccacgcctatttcgacaagtcgtgcagcttcgccctccaaggctcttaccaattggattacaaatcgaccatctccggcgtcatatcggagaacaagatcacgaagctcaccggcgtgaaggtgaaagttttattcttgtggctcaacatcgtggaggttatcagggacggagacgagctcgagttctccgtcgggatcacgtcggcgaacttcgcgatcgaggagttttacgagtcgcctcagtgtggatgcgggttcgattgcaacggattgaagtcggagaatttgggaagaaaccctcttgtctcttcggtctgaaggtgcttagcttattcacttgtaattaatttatgtgaatgagggggacttttcttacagaacctgaactctttggaggctttggttctttgtttcaacaattgctttgctttgtatctgttcttaagaagatcgttggattaatcaaccaatgtattgtactcttccaaaagtaataaaacggtgcatacattcgg

SEQ ID NO: 61268 - protein, 166 aa, Triticum aestivum
  peptide (1)..(166): Ceres Seq. ID no. 15220310
MTLFPILTASFLFLFCVPFTTASADDDLPTAYTLLQSYNFPVGILPKGVLSYDLDESTGKFHAYFDKSCSFALQGSYQLDYKSTISGVISENKITKLTGVKVKVLFLWLNIVEVIRDGDELEFSVGITSANFAIEEFYESPQCGCGFDCNGLKSENLGRNPLVSSV

SEQ ID NO: 61269 - DNA, 861 bp, Triticum aestivum
  misc_feature (1)..(861): Ceres Seq. ID no. 13661664
ataaagcaagctagctttcttggtgaacaagccactgctattacgaaccagacccacttgtgaaggccacgtttatttctgcgtgttatacgacgatngaggcagagctgatacgttggccagctggccaggtctgccttattgctctgatactcctccgtgattctcaccctgctaacatcaaccaagaggggaatttattgccagcggaagtgatgatggtagatggttcatatgggagaaaagaacaggaaggcttgttaaaatgcttgcaggggatggagctgttgtgaactgtatacagtctcatccctatgattgtgctgttgcaacgagtggaattgacaatacaataaagttatggacaccggatgcagaaggtacttctatggttgatggaccagaaattgatgtgttaagtgccatagagaacaaccagaagaagttatgccgcaaccgtgaaactttgttgccttttgagtttttggaacgatttggggcgcatgaatttgctgaaggaagcttgcatcctttagagtgtgcgcagacttgatatactattgcttgggttgctgaggaaaagggaggacatttaatccaagatacaagcagccagtgtctaggtaaacatgagattgcaaggttgtgttgcaatcgtagccagtgttttgcacaccttgcttagataatattgcaggggcgctggtattaagttgttgcttgagatgtgaatagacagtaaaggctgtttgttggtgcattcacttgtacagattgtagaaaagcgaagtcttgtaataagtaaatcatctgtacatgcttccataatagagccgtctgctgtgacgtttttctggggcg

SEQ ID NO: 61270 - protein, 95 aa, Triticum aestivum
  peptide (1)..(95): Ceres Seq. ID no. 13661665
MLAGDGAVVNCIQSHPYDCAVATSGIDNTIKLWTPDAEGTSMVDGPEIDVLSAIENNQKKLCRNRETLLPFEFLERFGAHEFAEGSLHPLECAQT

SEQ ID NO: 61271 - protein, 54 aa, Triticum aestivum
  peptide (1)..(54): Ceres Seq. ID no. 13661666
MVDGPEIDVLSAIENNQKKLCRNRETLLPFEFLERFGAHEFAEGSLHPLECAQT

SEQ ID NO: 61272 - DNA, 641 bp, Triticum aestivum
  misc_feature (1)..(641): Ceres Seq. ID no. 13598209
atcctaatcgaaaaatagtcgcgcagcgcaccccctacagccccgtgctctggcatacatacagtgtggtcatagtggtgaactgagaagagctactgcgaacaaggcacgccggagatcgagatgggctgcgacgacaagtgcgggtgcgccgtgccgtgccccggcggcacgggctgcaggtgcacctcggcgaggagcggcgcggcggcgggggagcacacgacgtgcgggtgcggcgagcactgtggatgcaacccgtgcgcgtgcgggcgcgaggggacgccgtccgggcgggcgaacaggagggccaactgctcctgcggcgcggcctgcaactgcgcttcatgcggctcggcgaccgcctgatcgatggccgacgcgtcgacgcgccactagtcgtgagctgatgcacaagtagtagagctagctaccgagttagccataaataagtgccgctgtgccgtgatcagtcatatgtggacgtgtcgtgtgtatttacctacgtactcgcatcagtgtgtaagaacgaataaatagtttatgtgtgctattttctcctttcctaaatgtacttgaagtcttttggcttgttacaagttttacttgttgcaaaataattatagttctacgattttctt

SEQ ID NO: 61273 - protein, 81 aa, Triticum aestivum
  peptide (1)..(81): Ceres Seq. ID no. 15222264
MGCDDKCGCAVPCPGGTGCRCTSARSGAAAGEHTTCGCGEHCGCNPCACGREGTPSGRANRRANCSCGAACNCASCGSATA

SEQ ID NO: 61274 - protein, 52 aa, Triticum aestivum
  peptide (1)..(52): Ceres Seq. ID no. 15222265
MQPVRVRARGDAVRAGEQEGQLLLRRGLQLRFMRLGDRLIDGRRVDAPLVVS

SEQ ID NO: 61275 - DNA, 742 bp, Triticum aestivum
  misc_feature (1)..(742): Ceres Seq. ID no. 14303027
tgtgttagctgtagatgttgaaagtgaagccttgtgcagtgttctttggatcttgtctaagccatgtgctacctttctgtggagatcgacaatgttgatgcccagtgtggtctgcagtggtattcaggaatcagggtgacgcatttatcttgtttgtatactgatgatggtcttttaattttgcagatgtgaaggatattaagtgtgtgattaattttgatttcccgacaactatcgaggattatattcataggataggtcgcactggccgtgccggtgctaccgggatggcattcacgttcttcacacattccaatgcaaaatattcaaggaatctcgttaagatcttgcgcgaagctgggcaggttgtgaatccagcgttagaagctatgtccaagtctgctggttctatgggaggaggaggtaatttccggtcaaggggccgaggtgggtttggtggtggtgggtatggtggtaaccgttctggatcaaattccattccagtacgtagaagatactaagacacaaacatgaaggtcaattctgatgctggaaaagacagagcgatgaagttttatctgtatacattaggcattaaattaaatgcatttttggggaatttctttgaaatccttctactgttagaagatcaaaacaaaagtcattcttgatatttttgtaccggagctcaaatggaaggaactcatgtatcagcgaccttggagattagaatagtcttgtc

SEQ ID NO: 61276 - protein, 77 aa, Triticum aestivum
  peptide (1)..(77): Ceres Seq. ID no. 14303028
MAFTFFTHSNAKYSRNLVKILREAGQVVNPALEAMSKSAGSMGGGGNFRSRGRGGFGGGGYGGNRSGSNSIPVRRRY

SEQ ID NO: 61277 - protein, 46 aa, Triticum aestivum
  peptide (1)..(46): Ceres Seq. ID no. 14303029
MKVNSDAGKDRAMKFYLYTLGIKLNAFLGNFFEILLLLEDQNKSHS

SEQ ID NO: 61278 - protein, 45 aa, Triticum aestivum
  peptide (1)..(45): Ceres Seq. ID no. 14303030
VLAVDVESEALCSVLWILSKPCATFLWRSTMLMPSVVCSGIQESG

SEQ ID NO: 61279 - DNA, 734 bp, Triticum aestivum
  misc_feature (1)..(734): Ceres Seq. ID no. 13661668
aatgatggatgcgatgaaaaagatagataaggataaggtgaaagctgcgctggagaaacggaggaagtcgaaaggcgatgctggtaggaaagtggacgtcatggatgatcatgacctgattgagagggagctggaacatggcgtggagttggctgccgaggacgagaaaaaacacgacagaaggcagagctggccccaccccgcgcaccgggaggatcaccagaacacggctcgcaaggcggagaacaccgaagagggcgagctgtccctggatggccaggaataccgctctcctggccccgacaaccggaagaggaaggacgcgcacgagcacaggagcaatgaccgcagcgccgagagagacatcaagaggccgaggccatgagatgaagtattcattgtggggggtgatcagcggtgacggactgagaactggtgttttgagcgccagtgcgtgatacctagtttttgcatcgcgggaacatacaggtgcttgtttgcctatgttgggagatttgaaatgtactgtactgtaacttgaaaagatgaggagtatgtacatgttcaggttatggaacattcggcagcagtttggtgtcgaggaacgataggaaagaggctgcatggcctgcacccgaaggctatataaataactttttaaatacatggatttgaagcaaatttggattgggacatttatatggatttgaaacaaatttgattggcacatttct

SEQ ID NO: 61280 - protein, 127 aa, Triticum aestivum
  peptide (1)..(127): Ceres Seq. ID no. 13661669
MMDAMKKIDKDKVKAALEKRRKSKGDAGRKVDVMDDHDLIERELEHGVELAAEDEKKHDRRQSWPHPAHREDHQNTARKAENTEEGELSLDGQEYRSPGPDNRKRKDAHEHRSNDRSAERDIKRPRP

SEQ ID NO: 61281 - protein, 126 aa, Triticum aestivum
  peptide (1)..(126): Ceres Seq. ID no. 13661670
MDAMKKIDKDKVKAALEKRRKSKGDAGRKVDVMDDHDLIERELEHGVELAAEDEKKHDRRQSWPHPAHREDHQNTARKAENTEEGELSLDGQEYRSPGPDNRKRKDAHEHRSNDRSAERDIKRPRP

SEQ ID NO: 61282 - protein, 123 aa, Triticum aestivum
  peptide (1)..(123): Ceres Seq. ID no. 13661671
MKKIDKDKVKAALEKRRKSKGDAGRKVDVMDDHDLIERELEHGVELAAEDEKKHDRRQSWPHPAHREDHQNTARKAENTEEGELSLDGQEYRSPGPDNRKRKDAHEHRSNDRSAERDIKRPRP

SEQ ID NO: 61283 - DNA, 1015 bp, Triticum aestivum
  misc_feature (1)..(1015): Ceres Seq. ID no. 13664283
tcgtcccttggtgactgaagagaagagtttaagcaaagaatggcagcacaagcgcttgtgtcttcttcacttacttcctctgttcagactgctagacagatatncggcgcaaaaccagctgtgtccgtatcacagaggaaggtttccttggttgttaaggctgcctcaactccacctgccaagcaaggagcaaacaggcaattgtggtttgcatcatcacagagtctctcttacttggatggcagcttacctggcgactttggattcgatccgcttggtctttcagacccaganngtactggaggcttcatcgagccgagatggctagcctacggagagatcatcaacgggaggttcgctatgttgggtgcacctggagctatagcacctgagattctaggaaaggccggtctgattcctgcagacactgctcttccctggttccaaaccggtgtgattccacctgcagggacatacagctactgggcagacccttacacactctttgttctcgagatggctttgatgggatttgccgagcacaggaggttgcaggactggtacaacccaggatctatgggtaaacaatacttcttgggtctagagaaaggtttcgcgggttcaggtgacccggcttaccccggtggaccattcttcaaccctcttgggtttggaaaagacgagaagtcgatgaaggagttgaaactcaaggaggtcaagaacggtagactggcaatgctcgccatcctaggctattttgtgcagggactagtgaccggtgtggggccttaccagaaccttcttgatcatttggcggatcccgtcaacaacaatgtcttgaccagcctcaagttccactgagatgatcatatatcgtattcatcacatggtgttttatgttggtttcccattctcttgtatcctacaatcttgtttgtttctcttggtaccatcagtttctctgtgttgtaacaccctgtgtaaacatattcgtcttttgtaagaaataatggcc

SEQ ID NO: 61284 - protein, 273 aa, Triticum aestivum
  peptide (1)..(273): Ceres Seq. ID no. 13664284
  misc_feature (22)..(22): Xaa is any aa, unknown or other
  misc_feature (85)..(85): Xaa is any aa, unknown or other
  misc_feature (86)..(86): Xaa is any aa, unknown or other
MAAQALVSSSLTSSVQTARQIXGAKPAVSVSQRKVSLVVKAASTPPAKQGANRQLWFASSQSLSYLDGSLPGDFGFDPLGLSDPXXTGGFIEPRWLAYGEIINGRFAMLGAPGAIAPEILGKAGLIPADTALPWFQTGVIPPAGTYSYWADPYTLFVLEMALMGFAEHRRLQDWYNPGSMGKQYFLGLEKGFAGSGDPAYPGGPFFNPLGFGKDEKSMKELKLKEVKNGRLAMLAILGYFVQGLVTGVGPYQNLLDHLADPVNNNVLTSLKFH

SEQ ID NO: 61285 - protein, 166 aa, Triticum aestivum
  peptide (1)..(166): Ceres Seq. ID no. 13664285
MLGAPGAIAPEILGKAGLIPADTALPWFQTGVIPPAGTYSYWADPYTLFVLEMALMGFAEHRRLQDWYNPGSMGKQYFLGLEKGFAGSGDPAYPGGPFFNPLGFGKDEKSMKELKLKEVKNGRLAMLAILGYFVQGLVTGVGPYQNLLDHLADPVNNNVLTSLKFH

SEQ ID NO: 61286 - DNA, 665 bp, Triticum aestivum
  misc_feature (1)..(665): Ceres Seq. ID no. 12623695
atttagaaatctatgtaattacttttaggcttaaaaagttggagacaatattttggagaaaaaaaaaagcataaatccttctttacggaaagtttttcattagtcaaaattcatcataatgtataaagtatttgattggaaaaagaaatagcttttggtagataaattgtatctgtggctaccaaaacgtatttcctttatgtaatgatgattatatttgttctttttgtttctgattctttctatccggcgaccgcgcagtgcttttgtggctattgacagcagcgtgcataaagacgggacggccacagatagcgagacgagccatcgacctggcggagtcacggttgttgaaagacggttggccggagtactacgacggaaaatcgggaaggtttattggaaaacaggcgaggaagtttcagacatggtccatcgctggttacttggtcgccaagatgatgttggaagatccttctcatcttggaatgatctcattggaagaggacaaacagaccaaacctgtcattaagagatctcattcttggacttgataatgcttgtcaatctttgagaatattcggctaagacttgttagtttctaaattttgttttacaatttatttagtttgtgtttaattatcctatatcttttcacttttccc

SEQ ID NO: 61287 - protein, 34 aa, Triticum aestivum
  peptide (1)..(34): Ceres Seq. ID no. 12623696
MVHRWLLGRQDDVGRSFSSWNDLIGRGQTDQTCH

SEQ ID NO: 61288 - protein, 31 aa, Triticum aestivum
  peptide (1)..(31): Ceres Seq. ID no. 12623697
MMLEDPSHLGMISLEEDKQTKPVIKRSHSWT

SEQ ID NO: 61289 - protein, 30 aa, Triticum aestivum
  peptide (1)..(30): Ceres Seq. ID no. 12623698
MLEDPSHLGMISLEEDKQTKPVIKRSHSWT

SEQ ID NO: 61290 - DNA, 856 bp, Triticum aestivum
  misc_feature (1)..(856): Ceres Seq. ID no. 13662695
cagctgccaccctgcccagttgctgttgcgcagcctccttcctctagtctcccctcttctccccctgttgccatctccaacctaatctttctcttctcgcggtctgcccgacggattccaaaagggctcgctcattcgggggaaaagctgttcgccgtggctcccagtctcatccatttcttgtctcttccaggaatctgtgaaattttgtgcctttaaaggcaatccagggtctggtcctgagctgtcggggctctatgtctaagtgggaacctgtcacatttgaggaatctcttagctttgttaagagagttaaggcccgtgactacttgttatacctgtcactgctcaatgtgctcacccggagtgatcagatccctctggaagcttacaacgagcttttacttcttttccgggatcacggagacctgctagaggagctagggaagttcagacccctcccctctttcccaagcactgtgtacagccacaacacaatctggatgttcatattccttatgccctttctgctcctgagccttctcctcgcgtttgagaagccgttggatagcttccttctccgataacccgtcgcgagctaaagatcagcactacgatgaaaatgaccggacacggaatgcgtgcatggactgctgtcttgtgatatcccctcagagcccattgccttattggtgcttttgtgatcatgttcatccttttgtgatccgcccgcataccggtgcgcggatagtatctctgaatctctcggaaggacagactaaatcgattgttttggcttgttcaagacaaacttcagtgtacaattgacaaactaaatgaaagagtttagttttac

SEQ ID NO: 61291 - protein, 109 aa, Triticum aestivum
  peptide (1)..(109): Ceres Seq. ID no. 13662696
MSKWEPVTFEESLSFVKRVKARDYLLYLSLLNVLTRSDQIPLEAYNELLLLFRDHGDLLEELGKFRPLPSFPSTVYSHNTIWMFIFLMPFLLLSLLLAFEKPLDSFLLR

SEQ ID NO: 61292 - protein, 72 aa, Triticum aestivum
  peptide (1)..(72): Ceres Seq. ID no. 13662697
QLPPCPVAVAQPPSSSLPSSPPVAISNLIFLFSRSARRIPKGLAHSGEKLFAVAPSLIHFLSLPGICEILCL

SEQ ID NO: 61293 - protein, 60 aa, Triticum aestivum
  peptide (1)..(60): Ceres Seq. ID no. 13662698
MDCCLVISPQSPLPYWCFCDHVHPFVIRPHTGARIVSLNLSEGQTKSIVLACSRQTSVYN

SEQ ID NO: 61294 - DNA, 1339 bp, Triticum aestivum
  misc_feature (1)..(1339): Ceres Seq. ID no. 13661504
atcaccagtaaagcagtaagcaattccactcccgccgccacctccctctactccggcgctctctcggacgctccggcatacatacgtacttacaagcggaagcagccagagccagccatgtgccccggggcgccggtcgcggcggcggcgtcggacaagagcgtgtgcgtgatggacgcgtccggcccgctgggccaggcgctcgtgcaccgcctcctccgccggggctacaccgtccacgccgccacctacggccgctcgctcgacgcgctcgcgctgctcgccgccgccggccacgacgaggaccggctcaagctcttccgcgccgaccccttcgactaccactccatcgccgacgccgtccgcggctgctccggcctcttctgcatgttcaacacccacgaggaccaggccggctgcgacgaggtgatggtggaggtggaggtccgggcggcgcagaacgtgctggaggcgtgcgcgcagacggtgaccatggagcgggtggtcttcacctcctccgtcaccgccgtcgtctggaaggacgacgaccacaagcccgtcgacgccttcgacgagcggaactggagcgacctcaacctctgcaggaagcgcaagttgtggcatgcgctggccaagacgctgtcggagaagacggcctgggccttggccatggacagaggggtggacatggtggccatcaacgccggcctgctcaccgggccggggctctcctccgcccacccctgcctcaagggggtccccgagatgtacgagcacggcgtcctcgtcaccgtcgacgccgacttcctcgccgacgcccacgtggccgcctacgagtgccccacggccttcggccgctacctctgcttcaacaacgtcgtgtgccggcccgaggacgccctccagttcgcccagatgctcaccccgtccgctccatgctacccgccgagtgatgagctgaaggtgatcccacaaaggattcagaacaagaagctgaacaacctgatggtggagtttgccagtgccatatacggggacttggattagagaatcactagttcattgatttacatctcaagggcagctagggttgtattctttatgtacctaaatatctgtattctttttcctcctgaaaagggaaatatggttggtcagatgtacaaatctgtacaaggccaagcatgccgcatgtattccaccactcttaccaggatggtaggagcatttgagccagtgcttagcaatgtagtagtaatccttaggtccaacaaaagggaaaataagtccacagttatgttactactgccttgtacagcagcattatatgaatatgatg

SEQ ID NO: 61295 - protein, 348 aa, Triticum aestivum
  peptide (1)..(348): Ceres Seq. ID no. 13661505
ITSKAVSNSTPAATSLYSGALSDAPAYIRTYKRKQPEPAMCPGAPVAAAASDKSVCVMDASGPLGQALVHRLLRRGYTVHAATYGRSLDALALLAAAGHDEDRLKLFRADPFDYHSIADAVRGCSGLFCMFNTHEDQAGCDEVMVEVEVRAAQNVLEACAQTVTMERVVFTSSVTAVVWKDDDHKPVDAFDERNWSDLNLCRKRKLWHALAKTLSEKTAWALAMDRGVDMVAINAGLLTGPGLSSAHPCLKGVPEMYEHGVLVTVDADFLADAHVAAYECPTAFGRYLCFNNVVCRPEDALQFAQMLTPSAPCYPPSDELKVIPQRIQNKKLNNLMVEFASAIYGDLD

SEQ ID NO: 61296 - protein, 309 aa, Triticum aestivum
  peptide (1)..(309): Ceres Seq. ID no. 13661506
MCPGAPVAAAASDKSVCVMDASGPLGQALVHRLLRRGYTVHAATYGRSLDALALLAAAGHDEDRLKLFRADPFDYHSIADAVRGCSGLFCMFNTHEDQAGCDEVMVEVEVRAAQNVLEACAQTVTMERVVFTSSVTAVVWKDDDHKPVDAFDERNWSDLNLCRKRKLWHALAKTLSEKTAWALAMDRGVDMVAINAGLLTGPGLSSAHPCLKGVPEMYEHGVLVTVDADFLADAHVAAYECPTAFGRYLCFNNVVCRPEDALQFAQMLTPSAPCYPPSDELKVIPQRIQNKKLNNLMVEFASAIYGDLD

SEQ ID NO: 61297 - protein, 291 aa, Triticum aestivum
  peptide (1)..(291): Ceres Seq. ID no. 13661507
MDASGPLGQALVHRLLRRGYTVHAATYGRSLDALALLAAAGHDEDRLKLFRADPFDYHSIADAVRGCSGLFCMFNTHEDQAGCDEVMVEVEVRAAQNVLEACAQTVTMERVVFTSSVTAVVWKDDDHKPVDAFDERNWSDLNLCRKRKLWHALAKTLSEKTAWALAMDRGVDMVAINAGLLTGPGLSSAHPCLKGVPEMYEHGVLVTVDADFLADAHVAAYECPTAFGRYLCFNNVVCRPEDALQFAQMLTPSAPCYPPSDELKVIPQRIQNKKLNNLMVEFASAIYGDLD

SEQ ID NO: 61298 - DNA, 994 bp, Triticum aestivum
  misc_feature (1)..(994): Ceres Seq. ID no. 12623816
catgtcccttgccgccgcagcctccccgtcctcgtcccgcttcctgttgccctccacggccgcccgccgccggttcctccaccacctcctcgccgcgcccgcgcccccgaggccgccgcagcttcggcgctgctccccgtaccactggatggcgcaattttgggctgaaggatcactggagaagaacaacgctctggttgaatacctgaaacagtatggtgttgttcgaaccgataaagtggcagaagttatggaaactatcgaccgagccttatttgtaccggagggctttaccccttacaccgacagtcctatgcctattggttacaatgcaacaatatctgctcctcacatgcacgcaacctgcttagaactgttgaaggattatttacagccaggcatgcatgctctggacgttggatcaggcagtggttacttgactgcttgctttgcaatgatggtcggaccagaaggtcgcgcagtggggattgaacacattcctgaactcgttgttgcttctactgaaaatgtcgaacggagtgctgcagcagcactaatgaaggatggttcactttcttttcatgtttcagatggaaggcttggctggccggatgcggcgccatacgatgctattcatgtgggcgcagcggcacctgagatccctcggccactgctggagcagctgaagcctggcgggcggatggtcatacccgttggcacatactctcaggacctgcaggtgattgacaagagcgccgacggatccaccagcgtccgcaacgatgcctctgttcgctacgtccctctgaccagccgctctgctcagctgcaggacagctgagatccttcgctctggatctggaaatgtgtgtgtatatatgtgagtgccgatgatctttgtctaccaatgtggcgtctgatgttttagatggtttggttttgtataatgcttactgctggttgatgttgcttagaatatgtgaatacgtgttgt

SEQ ID NO: 61299 - protein, 279 aa, Triticum aestivum
  peptide (1)..(279): Ceres Seq. ID no. 12623817
MSLAAAASPSSSRFLLPSTAARRRFLHHLLAAPAPPRPPQLRRCSPYHWMAQFWAEGSLEKNNALVEYLKQYGVVRTDKVAEVMETIDRALFVPEGFTPYTDSPMPIGYNATISAPHMHATCLELLKDYLQPGMHALDVGSGSGYLTACFAMMVGPEGRAVGIEHIPELVVASTENVERSAAAALMKDGSLSFHVSDGRLGWPDAAPYDAIHVGAAAPEIPRPLLEQLKPGGRMVIPVGTYSQDLQVIDKSADGSTSVRNDASVRYVPLTSRSAQLQDS

SEQ ID NO: 61300 - protein, 230 aa, Triticum aestivum
  peptide (1)..(230): Ceres Seq. ID no. 12623818
MAQFWAEGSLEKNNALVEYLKQYGVVRTDKVAEVMETIDRALFVPEGFTPYTDSPMPIGYNATISAPHMHATCLELLKDYLQPGMHALDVGSGSGYLTACFAMMVGPEGRAVGIEHIPELVVASTENVERSAAAALMKDGSLSFHVSDGRLGWPDAAPYDAIHVGAAAPEIPRPLLEQLKPGGRMVIPVGTYSQDLQVIDKSADGSTSVRNDASVRYVPLTSRSAQLQDS

SEQ ID NO: 61301 - protein, 196 aa, Triticum aestivum
  peptide (1)..(196): Ceres Seq. ID no. 12623819
METIDRALFVPEGFTPYTDSPMPIGYNATISAPHMHATCLELLKDYLQPGMHALDVGSGSGYLTACFAMMVGPEGRAVGIEHIPELVVASTENVERSAAAALMKDGSLSFHVSDGRLGWPDAAPYDAIHVGAAAPEIPRPLLEQLKPGGRMVIPVGTYSQDLQVIDKSADGSTSVRNDASVRYVPLTSRSAQLQDS

SEQ ID NO: 61302 - DNA, 771 bp, Triticum aestivum
  misc_feature (1)..(771): Ceres Seq. ID no. 13661508
agagccaaccaacagggcgaccaagctcaattagctcagactactcagctaccgcctgtctgctctcaattgctccataccctacatggcgagggttcaccccaacatggtggccgcgccgggcgccgtcgacgaggcgccggccagctccgcggtggacgggccgacgacgctgacggtgtggcgcaagtccctgctgttcgactgcaaggggttcacggtgttcgacgccgagggcaaccttgcctaccgcgtcgacagctacgcctccgagagcggcgacgaggtcgtcctcatggacgcggccggccgccccgccttcaccgtccgccgcaagcggttcaccctgcagggcgagcagtggctcgtcttctccggcgaggagacgcggagtcccgtgtacaccgtcaggcggagcggccgcggcaagacgttggcgcacgtgacggcgtgcgcgggctccggccatgggccgtcttacgaggtggaggggtcgtacgcgcggcggagctgcgtggtgtacgacggcgagcggcgcgcggtggcggagatcaggcccaaggaggtggtcggcacggatgtgttccgcctggcggtgcagcccggcgtgggcgtgccgctcgccatggcagtggtggtggcgctggagcagatgttcgcgaggccgtcgctcctcaggagctggtccacatagattatatatttaattataatttgtttgttcatcggagtacgtctcagtatagccaagcttatagcttttttttgcct

SEQ ID NO: 61303 - protein, 257 aa, Triticum aestivum
  peptide (1)..(257): Ceres Seq. ID no. 13661509
RANQQGDQAQLAQTTQLPPVCSQLLHTLHGEGSPQHGGRAGRRRRGAGQLRGGRADDADGVAQVPAVRLQGVHGVRRRGQPCLPRRQLRLRERRRGRPHGRGRPPRLHRPPQAVHPAGRAVARLLRRGDAESRVHRQAERPRQDVGARDGVRGLRPWAVLRGGGVVRAAELRGVRRRAARGGGDQAQGGGRHGCVPPGGAARRGRAARHGSGGGAGADVREAVAPQELVHIDYIFNYNLFVHRSTSQYSQAYSFFLP

SEQ ID NO: 61304 - protein, 202 aa, Triticum aestivum
  peptide (1)..(202): Ceres Seq. ID no. 13661510
MARVHPNMVAAPGAVDEAPASSAVDGPTTLTVWRKSLLFDCKGFTVFDAEGNLAYRVDSYASESGDEVVLMDAAGRPAFTVRRKRFTLQGEQWLVFSGEETRSPVYTVRRSGRGKTLAHVTACAGSGHGPSYEVEGSYARRSCVVYDGERRAVAEIRPKEVVGTDVFRLAVQPGVGVPLAMAVVVALEQMFARPSLLRSWST

SEQ ID NO: 61305 - protein, 195 aa, Triticum aestivum
  peptide (1)..(195): Ceres Seq. ID no. 13661511
MVAAPGAVDEAPASSAVDGPTTLTVWRKSLLFDCKGFTVFDAEGNLAYRVDSYASESGDEVVLMDAAGRPAFTVRRKRFTLQGEQWLVFSGEETRSPVYTVRRSGRGKTLAHVTACAGSGHGPSYEVEGSYARRSCVVYDGERRAVAEIRPKEVVGTDVFRLAVQPGVGVPLAMAVVVALEQMFARPSLLRSWST

SEQ ID NO: 61306 - DNA, 792 bp, Triticum aestivum
  misc_feature (1)..(792): Ceres Seq. ID no. 13661674
ccccgaaggccgtataatcattcgcgaagaacgggaatggcgtaaaaagaagcccatcatctcgcatgaggaggaggctgatgacaagacctctgtcagaagccagtcagtgaagaggaggaaggtggccagcactggctggtcctacaccggccatgagtacaccagcaagaaggccggtggnnnctcaagaagaaagacaagatggagccatatgcttactggcctttggatcgtaagctgctcaaccgccggtcggatcgcaagcagtccgcccgcaaggggcatggccagtgtcatgaagatggcgaaaaggtttgaggggaagagcgcttcgggtgccctcgcagccaagaggacacaaaaacmcaagcacaagaagaacaagtgagtagacaaggctgtagggaatttttgtaactgtacagcgagggtttagctagcactagctgcgcttgtcgtggcgtatttatgctgctgccgtttctctgggtttttcctgaaggaaaattttgagtgcttctccgggctttttcctgaaggaaaaacttaagtttattgttcgcaagatataattttctgtatcttacttttttttgtactcccagattcagattgactgaaatgtgttgtaattttgattgatggtggaatgtaaaatcttgcaatttgccatctagtgttagtttgtctagccgtatgcctttattgtaatgcaaaacgcttgtgtggatagctgaagatggttctcaaatttggaggtaatagactaatgacagttgatgtagatgc

SEQ ID NO: 61307 - protein, 129 aa, Triticum aestivum
  peptide (1)..(129): Ceres Seq. ID no. 15220128
  misc_feature (61)..(61): Xaa is any aa, unknown or other
  misc_feature (62)..(62): Xaa is any aa, unknown or other
  misc_feature (123)..(123): Xaa is any aa, unknown or other
PEGRIIIREEREWRKKKPIISHEEEADDKTSVRSQSVKRRKVASTGWSYTGHEYTSKKAGXXSRRKTRWSHMLTGLWIVSCSTAGRIASSPPARGMASVMKMAKRFEGKSASGALAAKRTQKXKHKKNK

SEQ ID NO: 61308 - protein, 58 aa, Triticum aestivum
  peptide (1)..(58): Ceres Seq. ID no. 15220129
  misc_feature (52)..(52): Xaa is any aa, unknown or other
MLTGLWIVSCSTAGRIASSPPARGMASVMKMAKRFEGKSASGALAAKRTQKXKHKKNK

SEQ ID NO: 61309 - DNA, 710 bp, Triticum aestivum
  misc_feature (1)..(710): Ceres Seq. ID no. 13661521
ttggaactagagcgaaaaccaaaagatgggtctaagagcactgcctcttcaacataatagtggattcatctccacgaccaaagtcccgatctcaagaacctcgcagagattaagccggaaccctagatgggtcgtggtgtcggccaagcaagagaaagatgaggagaagaagagggaagatgagacttcattgttcaccagactaacagatgcgttggatttcgcacaggttcggtcggagaaagacgccgagcttctctatgaggcccgtgaagccaccaaatctggtggcaagatgagcaaagaacagtatggggcgttgagaagaaaaatcggagggacatacaaggacttctttaaatcctacgttgaagtggatggagaatatgtggaggaaggatgggtggacaaaacatgtaagatatgcaaaaaggacacaaagggtgaggcaagacaagtggacaaggcagggagatatgctcatgtctcctgtcttcaaaacccctccaactcttctggaaatttcttcaccagactcttctcaagatgatcaatctcccatatcgtatacatgactctgtttgtttctgtttttttatagctaagtcattcttgcaattttgtgtatcttatagaaatcgaaattatacacatgccaaaacaaaaattatgtgtattgggatctttagaaacaaagacataacgatatc

SEQ ID NO: 61310 - protein, 174 aa, Triticum aestivum
  peptide (1)..(174): Ceres Seq. ID no. 13661522
MGLRALPLQHNSGFISTTKVPISRTSQRLSRNPRWVVVSAKQEKDEEKKREDETSLFTRLTDALDFAQVRSEKDAELLYEAREATKSGGKMSKEQYGALRRKIGGTYKDFFKSYVEVDGEYVEEGWVDKTCKICKKDTKGEARQVDKAGRYAHVSCLQNPSNSSGNFFTRLFSR

SEQ ID NO: 61311 - DNA, 890 bp, Triticum aestivum
  misc_feature (1)..(890): Ceres Seq. ID no. 12784413
actttaaatacctccgctccccggcccgtagcgtagtagtacgcatcagccctcccttccctggcctcagtagttagccactagccactgaacactaccaggagggatcagaaggctaccatgaggcaaggagggggcggaggcgacggggtgagccccggcaatgtcccggtgtgctactacggcgcgggcgggcgagtctcggccaccctggagcggcgggtgcgcgccgccgaggtgctcctgcggtgcgcggcgtgcggcctggccgtgctcgccgccgccctcctcggcgccgaccgccagtcccgcaccttcttctcctgtgatcaggtgatggcgtacgtgataatcggggcggtggcggtggccatggaggcggcgctgctggggaagaccgggcaggtggagttccagtggatgaagacgtgcgagctataccagcggttctgcacgcaggcggggggcggcgttgcgtgcgccgtcgccgccagcgccaccatggtcgggatcgccctcgtctccgccttcaacctcttccgcctctacggccacggcaagggcagcagcaagtgaagccaaagccctcgctgcgtgcatgcgtgcatgcatggccggcctcttttaggttttaacgacaccgaatccaaatccagtccggggagagaaccgtacgtacgtagcatatgtagctaccgttgctctttttactatagtttgtttgatgttgacacgcatggtgtcagtcagcgttagccataagaagctctgtgggacaaaagctagaccggtttctctgtatatgatgtcaagtgatccacaaggtgtttgtagacagtaatactgctatgtgcgtaataaaagaggaacaagaaagcgatgtagtatcc

SEQ ID NO: 61312 - protein, 151 aa, Triticum aestivum
  peptide (1)..(151): Ceres Seq. ID no. 12784414
MRQGGGGGDGVSPGNVPVCYYGAGGRVSATLERRVRAAEVLLRCAACGLAVLAAALLGADRQSRTFFSCDQVMAYVIIGAVAVAMEAALLGKTGQVEFQWMKTCELYQRFCTQAGGGVACAVAASATMVGIALVSAFNLFRLYGHGKGSSK

SEQ ID NO: 61313 - protein, 79 aa, Triticum aestivum
  peptide (1)..(79): Ceres Seq. ID no. 12784415
MAYVIIGAVAVAMEAALLGKTGQVEFQWMKTCELYQRFCTQAGGGVACAVAASATMVGIALVSAFNLFRLYGHGKGSSK

SEQ ID NO: 61314 - DNA, 871 bp, Triticum aestivum
  misc_feature (1)..(871): Ceres Seq. ID no. 13662094
ctatctagtccaactgctccgccgcagatccgcgattgccagcagcaccatctccgaatcgcctcgctagggtttcctctccagcggcggccggctcgaccgtactccgttcgtgagcaatggctgcgaaagctgggaattctgtgggtggtgttcttccccatccccacgtgattggaaatgcatttgcccaacactactacaaaattctgaatgagtcaccagaggatgtccataagttctaccatgatcaaagtattcttggtcggaagccaaattctgatggtacattgacatctataaccacattgcgtgatatcaataaacactttgtatctacatacctcaagggatgttcgatggagatagacaatgtagattctcagccatcccacgagggcggtgtgctcgttttagttagtgggtccttcactgtccctgatgccatgaagcgtaggtttactcagtcgttcttccttgctccacaaaaaggaggctattttgttctgaatgatgtgcttagatacattccagttgagccagaaacaccacctgtcaaggttacagtgcttccgttgatggattatttctgggtatgatgatatcgccggtgaagtcatgaatcaatctacagaaagtacctccatcagcaatgaagtcatgaatgacagatagtcacgtctcggcagtgcactactagctttcttacagaatgcaagtttatccatctatagattatgtttgcttttgcaacaaatgggtgcgaaaagtttaacatttgcgaatgccttagcattgtacatacattatgacttgttaaaaggggagaaaacatcagacaagtatacaactgaatatatctattatatgc

SEQ ID NO: 61315 - protein, 159 aa, Triticum aestivum
  peptide (1)..(159): Ceres Seq. ID no. 13662095
MAAKAGNSVGGVLPHPHVIGNAFAQHYYKILNESPEDVHKFYHDQSILGRKPNSDGTLTSITTLRDINKHFVSTYLKGCSMEIDNVDSQPSHEGGVLVLVSGSFTVPDAMKRRFTQSFFLAPQKGGYFVLNDVLRYIPVEPETPPVKVTVLPLMDYFWV

SEQ ID NO: 61316 - protein, 79 aa, Triticum aestivum
  peptide (1)..(79): Ceres Seq. ID no. 13662096
MEIDNVDSQPSHEGGVLVLVSGSFTVPDAMKRRFTQSFFLAPQKGGYFVLNDVLRYIPVEPETPPVKVTVLPLMDYFWV

SEQ ID NO: 61317 - DNA, 1038 bp, Triticum aestivum
  misc_feature (1)..(1038): Ceres Seq. ID no. 13598160
acctaaaggcccaaccgcccaagcgacggccatagccgaaaaccctaacccgccgccacgccgccctcccgccacccgcgccggcgccgcttctccccgccgatacaggccaaaaccctcgcgcgggggcatcggaggcggaggagggatggcgtccaacggggacaacaagcggctgttccgcgtgcggcgcacggtgttgcagatgctgagagaccgcgggtacacggtgaaggacgaggaaatcaagctgtccctgtacgagttcgtcgaccgctacggagaccccgtccgccgggacgagatcgtcatccattgcgagaagcagggcgaccccaacgacaaggtcaacgtcttcttcctcgacgagtccaagaccggcctggccgtggtcaggagctgcgtcgagaagatgaagctggggaacgccaccaatggcatactcgtcctgcagaaggcgctgagcggcccggcccggaccgaggtcgcacagagcaagaagtaccacctcgaggtcttccaggaaggggagcttcttgtaaacattactgaacaccatctcgttccgaagcacgagctcctgagtgacgaggagaagaaggagctgctgcagaaatacactgcccacgaaactcagctcccgaggattcagctcacggatccggtagcaagataccacggcatgaagcgtgggcaggtggtgaagatcacccggcagagcgaagtcgccggagaatacgtgacctaccgctacgtcatctgatcctcaccgacgtatcaaggcctgaggttggtctgggatttaaaatggttccttcgtcgccaaacccctcccagtactcgaaagaagcattgctgtgtgtgtgtgtggaggaaccaaggtgctcgctgaagtggctcggtgcccctttgtttgtaacttgctggcaatttggcatgagtgtgttagctagaaaaataggtttctgtgtagatgtgctgtgttccgtgctgctaaataactcttgactgtatacgtgagatgcgttggtctgttcc

SEQ ID NO: 61318 - protein, 253 aa, Triticum aestivum
  peptide (1)..(253): Ceres Seq. ID no. 13598161
PKGPTAQATAIAENPNPPPRRPPATRAGAASPRRYRPKPSRGGIGGGGGMASNGDNKRLFRVRRTVLQMLRDRGYTVKDEEIKLSLYEFVDRYGDPVRRDEIVIHCEKQGDPNDKVNVFFLDESKTGLAVVRSCVEKMKLGNATNGILVLQKALSGPARTEVAQSKKYHLEVFQEGELLVNITEHHLVPKHELLSDEEKKELLQKYTAHETQLPRIQLTDPVARYHGMKRGQVVKITRQSEVAGEYVTYRYVI

SEQ ID NO: 61319 - protein, 204 aa, Triticum aestivum
  peptide (1)..(204): Ceres Seq. ID no. 13598162
MASNGDNKRLFRVRRTVLQMLRDRGYTVKDEEIKLSLYEFVDRYGDPVRRDEIVIHCEKQGDPNDKVNVFFLDESKTGLAVVRSCVEKMKLGNATNGILVLQKALSGPARTEVAQSKKYHLEVFQEGELLVNITEHHLVPKHELLSDEEKKELLQKYTAHETQLPRIQLTDPVARYHGMKRGQVVKITRQSEVAGEYVTYRYVI

SEQ ID NO: 61320 - protein, 185 aa, Triticum aestivum
  peptide (1)..(185): Ceres Seq. ID no. 13598163
MLRDRGYTVKDEEIKLSLYEFVDRYGDPVRRDEIVIHCEKQGDPNDKVNVFFLDESKTGLAVVRSCVEKMKLGNATNGILVLQKALSGPARTEVAQSKKYHLEVFQEGELLVNITEHHLVPKHELLSDEEKKELLQKYTAHETQLPRIQLTDPVARYHGMKRGQVVKITRQSEVAGEYVTYRYVI

SEQ ID NO: 61321 - DNA, 555 bp, Triticum aestivum
  misc_feature (1)..(555): Ceres Seq. ID no. 13661526
aacagccagccagcacaagctcaacgagccacgctagcgtttgagagaacaaaaacagtccaccgacgtacgatggcgccgagcaccttcccgctcgcgctcctggccgtgtccctcgttctcctggtggtcggcggcctcgggccggcggcggaggcacagccgccggggaggtgcgtgccgcagctgaaccggctgctggcgtgccgcgcgtacctggtgcccggcgcggccgaccccagcgccgactgctgcagcgcgctgaactccatctcgcgcgactgcgcgtgcagcaccatgggcatcatcaacagcctcccctcccgctgcaacatcggacaagtcaactgctcggcttgaggcggaacgaagaaacgatgcgagtcacagagtgactaataatgaaggtggtcatttctgccgttgttgcggcatgtctgcctcttcgccgccgtcttagttttcgtttgtccagtctgtcgtgtcctgctgctgctgtcgatctcgacacgttaataaaatggacgatttgaggcacggcctctcactttaacc

SEQ ID NO: 61322 - protein, 119 aa, Triticum aestivum
  peptide (1)..(119): Ceres Seq. ID no. 13661527
NSQPAQAQRATLAFERTKTVHRRTMAPSTFPLALLAVSLVLLVVGGLGPAAEAQPPGRCVPQLNRLLACRAYLVPGAADPSADCCSALNSISRDCACSTMGIINSLPSRCNIGQVNCSA

SEQ ID NO: 61323 - protein, 95 aa, Triticum aestivum
  peptide (1)..(95): Ceres Seq. ID no. 13661528
MAPSTFPLALLAVSLVLLVVGGLGPAAEAQPPGRCVPQLNRLLACRAYLVPGAADPSADCCSALNSISRDCACSTMGIINSLPSRCNIGQVNCSA

SEQ ID NO: 61324 - DNA, 1042 bp, Triticum aestivum
  misc_feature (1)..(1042): Ceres Seq. ID no. 12784416
acgcctcaaagttaatatcgcggcatcgggtcctgcgctgcgcgcctgctgctgctccctcgccctcgcctccgctgccgtcgcgcgagatcaaccccgccgccatggctggagaagctgatgggaagacctaccaggtatcaaggatgccccctgctgctctcaacgagcgcatcctttcttccatgtctcaaaagcacgttgctgctcacccatggcatgacctggagataggtccaggggcccctgcagttttcaactgtgtggttgagattcctagaggcagcaaggttaagtatgagttggacaaagcaactggtcttatcaaggttgatcgtgttctgtactcctcagttgtgtacccacacaactatggcttcattccacgcacactctgtgaggataatgacccgatggatgtccttgtcctgatgcaggaacaagttgttcctggttgcttcctgcgtgcccgtgctattgggcttatgcctatgattgatcagggtgagaaagatgacaagatcatagctgtctgtgctgatgatcctgagtaccgtcacttcagagacatcagtgaacttcccccgcatcgcctacaggaaatccgtcgcttctttgaagactacaagaagaatgaaaacaaggaggttgcagtgaatgatttcctcccagcagaagatgccatcaacgcaatcaagtactcgatggacctctacggttcgtacatcatggagggcttaaggaagtgatctccagttggcggactgcggatgctacgcgatccgccctacggcttatcaatagtacgacaaacatctatgttaacatgatgatcgaaaaccatcagtctgttggggatctatatataccttctgtccatgctgagtcaagcatgggtacattttccttccgtatatgccatgtcaggtccaagtatttgacctcttgctggaaccttttttgtcaaaccgtctcttgacagagcggctgcttaataggaaatcagcgttacgcgaaggcgcgtatgcgtgcctccagtcct

SEQ ID NO: 61325 - protein, 248 aa, Triticum aestivum
  peptide (1)..(248): Ceres Seq. ID no. 12784417
ASKLISRHRVLRCAPAAAPSPSPPLPSREINPAAMAGEADGKTYQVSRMPPAALNERILSSMSQKHVAAHPWHDLEIGPGAPAVFNCVVEIPRGSKVKYELDKATGLIKVDRVLYSSVVYPHNYGFIPRTLCEDNDPMDVLVLMQEQVVPGCFLRARAIGLMPMIDQGEKDDKIIAVCADDPEYRHFRDISELPPHRLQEIRRFFEDYKKNENKEVAVNDFLPAEDAINAIKYSMDLYGSYIMEGLRK

SEQ ID NO: 61326 - protein, 214 aa, Triticum aestivum
  peptide (1)..(214): Ceres Seq. ID no. 12784418
MAGEADGKTYQVSRMPPAALNERILSSMSQKHVAAHPWHDLEIGPGAPAVFNCVVEIPRGSKVKYELDKATGLIKVDRVLYSSVVYPHNYGFIPRTLCEDNDPMDVLVLMQEQVVPGCFLRARAIGLMPMIDQGEKDDKIIAVCADDPEYRHFRDISELPPHRLQEIRRFFEDYKKNENKEVAVNDFLPAEDAINAIKYSMDLYGSYIMEGLRK

SEQ ID NO: 61327 - protein, 200 aa, Triticum aestivum
  peptide (1)..(200): Ceres Seq. ID no. 12784419
MPPAALNERILSSMSQKHVAAHPWHDLEIGPGAPAVFNCVVEIPRGSKVKYELDKATGLIKVDRVLYSSVVYPHNYGFIPRTLCEDNDPMDVLVLMQEQVVPGCFLRARAIGLMPMIDQGEKDDKIIAVCADDPEYRHFRDISELPPHRLQEIRRFFEDYKKNENKEVAVNDFLPAEDAINAIKYSMDLYGSYIMEGLRK

SEQ ID NO: 61328 - DNA, 924 bp, Triticum aestivum
  misc_feature (1)..(924): Ceres Seq. ID no. 13664294
atcatttgctagggttcgaatcagattatctgcaacaacaaaaaaaaatggcgttggctggtcgtatcagatccgggatctccttatccttcttcaagaccttctcctccgcgagatctcactcacgtggagcgccgcttatccccgcgttgagagattatgctacagcttcggctcaggaaactcggaatgttaaggtgcctgtggctttagttggtgaatctgggaactttgcctcgtggctgtatattgcagctgtgaaaatgaactccttggagaagattgagtctgatctctctgagctggttgaggctatgaagacaagtcctactttttcgcagtttactaaggatccctctgttcctagagagacgagactcgctgctattgtggatgtttgtgataaagccaagtttgcagaacccaccaagaacttcctctctttgttagctgagaatgggaagctgaagaatttagacgtgattgtgaagaaattcatgcagctgacaacagcacataggggagacgtcaaggttttggttaccacagtcatgccacttccccctgctgaggagaaggaactgaaggagacactccaagagataatcggagaagggaagaaagtaactgtggaacaaaagattgatccgagtatctatggagggctaatagtagagttccaacaaaaggtgttggacatgtctatcaggacaagggcacagcagatggagaggctcctccgtgaacctgttgacctcagcaacctttgaagacttcccctaaaagaaacgtgtttgtgatgctaccttcaattaacaaataaatatgagaaacaacatgacacttgtgtcgtttttttgaaaatttatcatttcatttaacagttgttgttttgattcgaaataagcttttttgaagccatcg

SEQ ID NO: 61329 - protein, 255 aa, Triticum aestivum
  peptide (1)..(255): Ceres Seq. ID no. 15220742
HLLGFESDYLQQQKKMALAGRIRSGISLSFFKTFSSARSHSRGAPLIPALRDYATASAQETRNVKVPVALVGESGNFASWLYIAAVKMNSLEKIESDLSELVEAMKTSPTFSQFTKDPSVPRETRLAAIVDVCDKAKFAEPTKNFLSLLAENGKLKNLDVIVKKFMQLTTAHRGDVKVLVTTVMPLPPAEEKELKETLQEIIGEGKKVTVEQKIDPSIYGGLIVEFQQKVLDMSIRTRAQQMERLLREPVDLSNL

SEQ ID NO: 61330 - protein, 240 aa, Triticum aestivum
  peptide (1)..(240): Ceres Seq. ID no. 15220743
MALAGRIRSGISLSFFKTFSSARSHSRGAPLIPALRDYATASAQETRNVKVPVALVGESGNFASWLYIAAVKMNSLEKIESDLSELVEAMKTSPTFSQFTKDPSVPRETRLAAIVDVCDKAKFAEPTKNFLSLLAENGKLKNLDVIVKKFMQLTTAHRGDVKVLVTTVMPLPPAEEKELKETLQEIIGEGKKVTVEQKIDPSIYGGLIVEFQQKVLDMSIRTRAQQMERLLREPVDLSNL

SEQ ID NO: 61331 - protein, 168 aa, Triticum aestivum
  peptide (1)..(168): Ceres Seq. ID no. 15220744
MNSLEKIESDLSELVEAMKTSPTFSQFTKDPSVPRETRLAAIVDVCDKAKFAEPTKNFLSLLAENGKLKNLDVIVKKFMQLTTAHRGDVKVLVTTVMPLPPAEEKELKETLQEIIGEGKKVTVEQKIDPSIYGGLIVEFQQKVLDMSIRTRAQQMERLLREPVDLSNL

SEQ ID NO: 61332 - DNA, 656 bp, Triticum aestivum
  misc_feature (1)..(656): Ceres Seq. ID no. 14302392
caaatctcccagtcccttcctcgctcttctctctagctattggatcggtgactctgcttctgttagtttcagctttgagtcgctgctacaatgtcttgcattaagagagttgatagatccgcgtacgttgccatggcaccagaagctccgttcatggctgccggaacgatggccggagccgttgatctgtctttcagctcatcctccaacctcgagatctttgaactcgattttaactccgaagaccacgagatcaaactattaggtcagtgctcaagctcagagaggtttactcgactcgcttggggaagttatggacccgggtccgaggaatctccttatggtctcatcgctggtggcctcgtcgacgggaatatcggtttatggaatccaatcactctgattcggtgagttttctctttctctataaccctaattgttagggtttatatatgaaaaagtgtttccgtaatggacaagtaaagtatttgattttctttttgtttatttcagttctgagtgtaatgaaagtgcgcacgttagacatctttcaaaacataaagggccagtgagttgtaatctctttaacagaatctaatgttgggctaggttcttttcgatgcttacatatatatatatatattctcttgtatgtt

SEQ ID NO: 61333 - protein, 106 aa, Triticum aestivum
  peptide (1)..(106): Ceres Seq. ID no. 14302393
MSCIKRVDRSAYVAMAPEAPFMAAGTMAGAVDLSFSSSSNLEIFELDFNSEDHEIKLLGQCSSSERFTRLAWGSYGPGSEESPYGLIAGGLVDGNIGLWNPITLIR

SEQ ID NO: 61334 - protein, 92 aa, Triticum aestivum
  peptide (1)..(92): Ceres Seq. ID no. 14302394
MAPEAPFMAAGTMAGAVDLSFSSSSNLEIFELDFNSEDHEIKLLGQCSSSERFTRLAWGSYGPGSEESPYGLIAGGLVDGNIGLWNPITLIR

SEQ ID NO: 61335 - protein, 87 aa, Triticum aestivum
  peptide (1)..(87): Ceres Seq. ID no. 14302395
KSPSPFLALLSSYWIGDSASVSFSFESLLQCLALRELIDPRTLPWHQKLRSWLPERWPEPLICLSAHPPTSRSLNSILTPKTTRSNY

SEQ ID NO: 61336 - DNA, 1065 bp, Triticum aestivum
  misc_feature (1)..(1065): Ceres Seq. ID no. 15226909
gagaaacttcgacgtaattattgcaatttagcccttaaattctgcattgctatcagataaagcatcatattttcctttgtacagaattatccttccattttattatctgagctaagaatgggaagcagcgaggagatgccagtggtgctcatcacgggatgctcacaaggaggaatcggcaacgcgctggctcgtgagttctctgcgaaaggttgtcgtgtggtggcgacgagtcgatcgcagagcacgatggctgacttggagaaagatcccaagtttttcgtacaaaagctcgatgttcagtcagaacataacgtgaataaagtcttgtcggaagttatcgataagttcggtcagatcgatgttctggtcaataatgccggagttcaatgcatcggaccactcgcggagattccaattcaggccatggagcacaccttcaacaccaatgtgttcggttccatgaggatgactcaagctgttgtacctcacatggcgtcaaagaagaaaggaaagattgtgaacataggaagtatcagcacaatggcacctggaccatgggcaggggtttacactgcatcaaaagctgctcttcatgctcttacagacacattaaggttggagcttaggccatttgggattgatatgatcaacattgtcccaggaggtattcaatctaacatatccgattcagggatatctagcttcaacaagttacctgagctgaaactatacaagccgttccaagaagctatccgtgaaagggcgtttttgtcgcaaaacgttaagccaatacctgcagagacgtttgcgaaggaggtggtgtcggtggtcctgaaggaacacccaccggcttggtactctacaggaaggttatccactgtcgcggcgatcatgcaccatttgcccatatccgtcaaagattttctcctgactaagagcttcatgaaaagaaactgtttgaatgtatctaagaagtaagaactaaccatgaaacaagctagatacagaagccacatagtaatgggctcttaagcccaacacggtccagaataagttcccagt

SEQ ID NO: 61337 - protein, 287 aa, Triticum aestivum
  peptide (1)..(287): Ceres Seq. ID no. 15226910
MGSSEEMPVVLITGCSQGGIGNALAREFSAKGCRVVATSRSQSTMADLEKDPKFFVQKLDVQSEHNVNKVLSEVIDKFGQIDVLVNNAGVQCIGPLAEIPIQAMEHTFNTNVFGSMRMTQAVVPHMASKKKGKIVNIGSISTMAPGPWAGVYTASKAALHALTDTLRLELRPFGIDMINIVPGGIQSNISDSGISSFNKLPELKLYKPFQEAIRERAFLSQNVKPIPAETFAKEVVSVVLKEHPPAWYSTGRLSTVAAIMHHLPISVKDFLLTKSFMKRNCLNVSKK

SEQ ID NO: 61338 - protein, 281 aa, Triticum aestivum
  peptide (1)..(281): Ceres Seq. ID no. 15226911
MPVVLITGCSQGGIGNALAREFSAKGCRVVATSRSQSTMADLEKDPKFFVQKLDVQSEHNVNKVLSEVIDKFGQIDVLVNNAGVQCIGPLAEIPIQAMEHTFNTNVFGSMRMTQAVVPHMASKKKGKIVNIGSISTMAPGPWAGVYTASKAALHALTDTLRLELRPFGIDMINIVPGGIQSNISDSGISSFNKLPELKLYKPFQEAIRERAFLSQNVKPIPAETFAKEVVSVVLKEHPPAWYSTGRLSTVAAIMHHLPISVKDFLLTKSFMKRNCLNVSKK

SEQ ID NO: 61339 - protein, 243 aa, Triticum aestivum
  peptide (1)..(243): Ceres Seq. ID no. 15226912
MADLEKDPKFFVQKLDVQSEHNVNKVLSEVIDKFGQIDVLVNNAGVQCIGPLAEIPIQAMEHTFNTNVFGSMRMTQAVVPHMASKKKGKIVNIGSISTMAPGPWAGVYTASKAALHALTDTLRLELRPFGIDMINIVPGGIQSNISDSGISSFNKLPELKLYKPFQEAIRERAFLSQNVKPIPAETFAKEVVSVVLKEHPPAWYSTGRLSTVAAIMHHLPISVKDFLLTKSFMKRNCLNVSKK

SEQ ID NO: 61340 - DNA, 904 bp, Triticum aestivum
  misc_feature (1)..(904): Ceres Seq. ID no. 13661265
atcaaaccaaaagtcgctcttctattctcctctcttcaaccacaatacagagaaaaacttcaagatcagaaatggctttccacctgagatcgataagtttgccatcaaggcctcaggccaaccagactgaagtcgagcaagaggtgctgagcctagaggcgagcatctcttcctccaccaccaccatcggcaccatgtgtgccggtctgaggaggctcggagacatctacaatggtgttgaagagattattggcctgccaagcaaccaggctggcaagatgttggattcagagatggaagtctctctcgagctgctagatctctgcagcaccatgcaagagatcttcgtcaagatgaaggccatcatccaagagctacaagtggctctaagaaaaggagatgatgtaactgctcaagccaagatccagtcttatgcccgtttggtgaagacggccaagaaacatttcaagaagagcgcgaagaaggctaatgctgtgtctgcgggttgcaagatggtcatgctattgaccaaggctagagagatttctgtgtctctgctggagtccacagtccatctcctgtcaaaggaaatcggaatgccaaaacagtctcttgtctcaaaggcatttcacaagaagaaggcagttgtctgccaggaggagcaattgcaggagttagagtgtagtattggagatctcgagaatggggtgggacatctgttcaggaaattagtccagatcagagtttctctcttgaacattcttagctcatagatgctccaagtcactctacaccctgtgattggcatccgcctttttgaggactagccggtcttcatacaattttgccatatgtatacagtacaaatgtacagaaacttagagaaagaaaaagtgaagttttg

SEQ ID NO: 61341 - protein, 256 aa, Triticum aestivum
  peptide (1)..(256): Ceres Seq. ID no. 13661266
QTKSRSSILLSSTTIQRKTSRSEMAFHLRSISLPSRPQANQTEVEQEVLSLEASISSSTTTIGTMCAGLRRLGDIYNGVEEIIGLPSNQAGKMLDSEMEVSLELLDLCSTMQEIFVKMKAIIQELQVALRKGDDVTAQAKIQSYARLVKTAKKHFKKSAKKANAVSAGCKMVMLLTKAREISVSLLESTVHLLSKEIGMPKQSLVSKAFHKKKAVVCQEEQLQELECSIGDLENGVGHLFRKLVQIRVSLLNILSS

SEQ ID NO: 61342 - protein, 233 aa, Triticum aestivum
  peptide (1)..(233): Ceres Seq. ID no. 13661267
MAFHLRSISLPSRPQANQTEVEQEVLSLEASISSSTTTIGTMCAGLRRLGDIYNGVEEIIGLPSNQAGKMLDSEMEVSLELLDLCSTMQEIFVKMKAIIQELQVALRKGDDVTAQAKIQSYARLVKTAKKHFKKSAKKANAVSAGCKMVMLLTKAREISVSLLESTVHLLSKEIGMPKQSLVSKAFHKKKAVVCQEEQLQELECSIGDLENGVGHLFRKLVQIRVSLLNILSS

SEQ ID NO: 61343 - protein, 192 aa, Triticum aestivum
  peptide (1)..(192): Ceres Seq. ID no. 13661268
MCAGLRRLGDIYNGVEEIIGLPSNQAGKMLDSEMEVSLELLDLCSTMQEIFVKMKAIIQELQVALRKGDDVTAQAKIQSYARLVKTAKKHFKKSAKKANAVSAGCKMVMLLTKAREISVSLLESTVHLLSKEIGMPKQSLVSKAFHKKKAVVCQEEQLQELECSIGDLENGVGHLFRKLVQIRVSLLNILSS

SEQ ID NO: 61344 - DNA, 823 bp, Triticum aestivum
  misc_feature (1)..(823): Ceres Seq. ID no. 13664333
agacggtgccagagtccacgctccggaagaaaaaggcaccacctttgttcgcccttctcctctccctcgtgacaccactcccagagaaagagagagacagatggcgatgcgggcggtggcggtgctgctgcttctggcggtggcgagcgtgctggcggcgggcgcggcggcgcagtcgacgggcacgccggcgtgcgcgtccaagctgacgggctgcgccggctacatgaacggcacggacgcgcagaagccgccggagacctgctgcggcccgctccgggacgccgtgaagaacgagaagccctgcctctgcgcgctttacgcctcgcccgagatcttcaaggccttcaacatcaacgtcaccgacgcgctccgcctctccaagcgctgcggcgtctccgaggacgtcagcagctgccccagcacctctctgacgaagtctcctccaggttcgagttcttctccatcaggtggcgctccatcaggtggcaagagcgccgggcaccctaccatgtcggccagcttcgcggggctgatgagcctcttcctggtcctgtggtctgcactggcataagaaatcggcgattcggcatgctagacatgttcttctttcggcttatatcccatggtagatgagctgcagctctggtggtagttcttggtggtgtcgccgcgtttgtttttgctgtgtattggttggtgttgccagttcagtagacttgctgtgaataaggatttcggcactctcttcagacctgtgatgaccagagcagagtgggcattgtgtgagacgtatttcggcttcactattttcttttctttt

SEQ ID NO: 61345 - protein, 190 aa, Triticum aestivum
  peptide (1)..(190): Ceres Seq. ID no. 13664334
DGARVHAPEEKGTTFVRPSPLPRDTTPRERERQMAMRAVAVLLLLAVASVLAAGAAAQSTGTPACASKLTGCAGYMNGTDAQKPPETCCGPLRDAVKNEKPCLCALYASPEIFKAFNINVTDALRLSKRCGVSEDVSSCPSTSLTKSPPGSSSSPSGGAPSGGKSAGHPTMSASFAGLMSLFLVLWSALA

SEQ ID NO: 61346 - protein, 157 aa, Triticum aestivum
  peptide (1)..(157): Ceres Seq. ID no. 13664335
MAMRAVAVLLLLAVASVLAAGAAAQSTGTPACASKLTGCAGYMNGTDAQKPPETCCGPLRDAVKNEKPCLCALYASPEIFKAFNINVTDALRLSKRCGVSEDVSSCPSTSLTKSPPGSSSSPSGGAPSGGKSAGHPTMSASFAGLMSLFLVLWSALA

SEQ ID NO: 61347 - protein, 155 aa, Triticum aestivum
  peptide (1)..(155): Ceres Seq. ID no. 13664336
MRAVAVLLLLAVASVLAAGAAAQSTGTPACASKLTGCAGYMNGTDAQKPPETCCGPLRDAVKNEKPCLCALYASPEIFKAFNINVTDALRLSKRCGVSEDVSSCPSTSLTKSPPGSSSSPSGGAPSGGKSAGHPTMSASFAGLMSLFLVLWSALA

SEQ ID NO: 61348 - DNA, 1596 bp, Triticum aestivum
  misc_feature (1)..(1596): Ceres Seq. ID no. 15176851
gcatccttagcctttttctcttcttgcaactatggccacacattcagctcttgccgtctccagaatccccgtcaaaccgaggctgcagtctaagagtgccattcactctttcccagctcaatgttcctccaagaggctagaagtggctgcattctccggcctgcgagtcagcagtaacggtggggaagcatctttctttgatgccatagctgctcaaatcacccccaaggctgtggggacatcctctcctgttagaggagagacagtggcaaaactgaaggtggccatcaatgggtttggaaggattggtaggaacttcctcaggtgttggcacggtcgcaaggactctcctctcgaagttgttgtgcttaatgacagtggtggtgtcaagaacgcatcccacttgctcaagtatgactccatgcttggaaccttcaaggccgatgtgaagatagtcgacaatgaaactatcagcgttgatggcaagttcatcaaagtcgtctcaaacagagatcctcttaagcttccatgggctgagctcggcattgacattgtcatcgagggaacaggagtgtttgttgatgggccaggagcagggaagcacatccaagctggagcctcaaaagtgatcatcacagcaccagctaaaggcgctgatatcccaacctatgttgtgggagtcaatgagcaagactattctcatgacgttgctaacattattagcaatgcatcttgcaccaccaactgtttggctccctttgcgaaagttttggatgaagagtttggaatcgtcaaggggactatgacaacgacacactcttacaccggagaccaaaggctcctagatgcatcacacagggacctaaggcgtgcaagagccgcagcactgaacattgtaccgactagcacaggtgcagcaaaggcggtgtcgttggtgctcccccagctgaagggtaaactcaacggcattgcactccgtgtgccgaccccaaacgtctctgtggttgaccttgttataaacgttgagaagaaaggtttgactgctgaagacgttaacgaggccttcagaaaagcggccgctggaccgctcaagggcgttttagaggtttgcgacacgccacttgtctcttgtgacttcaggtgctctgatgtctcaaccaccattgactcttccctcacaatggtcatgggtgatgatatggtcaaggtggtcgcctggtacgacaacgagtggggttacagccaaagagtagtggatttggctcacctagtggctgccaagtggccgggagaagtagctgctggaagcggagaccctttggaagatttctgtaagacaaacccagccgatgaggaatgcaaagtctatgaagcttgattctaatctttttctctaaactgtttccgagcaatttggtttatcttctagtgacaatttatcgaaatcatataaaccctgcctcttaaactctatcatatatttcgttttctttctttttactattatatcaaaaggcaatgtatgtaatacccattccttttcattgcctcatgtgcgatctcgaggatactataatttcaatgatatgtgcgaac

SEQ ID NO: 61349 - protein, 448 aa, Triticum aestivum
  peptide (1)..(448): Ceres Seq. ID no. 15176852
MATHSALAVSRIPVKPRLQSKSAIHSFPAQCSSKRLEVAAFSGLRVSSNGGEASFFDAIAAQITPKAVGTSSPVRGETVAKLKVAINGFGRIGRNFLRCWHGRKDSPLEVVVLNDSGGVKNASHLLKYDSMLGTFKADVKIVDNETISVDGKFIKVVSNRDPLKLPWAELGIDIVIEGTGVFVDGPGAGKHIQAGASKVIITAPAKGADIPTYVVGVNEQDYSHDVANIISNASCTTNCLAPFAKVLDEEFGIVKGTMTTTHSYTGDQRLLDASHRDLRRARAAALNIVPTSTGAAKAVSLVLPQLKGKLNGIALRVPTPNVSVVDLVINVEKKGLTAEDVNEAFRKAAAGPLKGVLEVCDTPLVSCDFRCSDVSTTIDSSLTMVMGDDMVKVVAWYDNEWGYSQRVVDLAHLVAAKWPGEVAAGSGDPLEDFCKTNPADEECKVYEA

SEQ ID NO: 61350 - protein, 318 aa, Triticum aestivum
  peptide (1)..(318): Ceres Seq. ID no. 15176853
MLGTFKADVKIVDNETISVDGKFIKVVSNRDPLKLPWAELGIDIVIEGTGVFVDGPGAGKHIQAGASKVIITAPAKGADIPTYVVGVNEQDYSHDVANIISNASCTTNCLAPFAKVLDEEFGIVKGTMTTTHSYTGDQRLLDASHRDLRRARAAALNIVPTSTGAAKAVSLVLPQLKGKLNGIALRVPTPNVSVVDLVINVEKKGLTAEDVNEAFRKAAAGPLKGVLEVCDTPLVSCDFRCSDVSTTIDSSLTMVMGDDMVKVVAWYDNEWGYSQRVVDLAHLVAAKWPGEVAAGSGDPLEDFCKTNPADEECKVYEA

SEQ ID NO: 61351 - DNA, 1123 bp, Triticum aestivum
  misc_feature (1)..(1123): Ceres Seq. ID no. 15227147
acgaaatctatcaacccctccaccagttgcaagaaaatcattttcgaagtcttcctcccctgatcctgtgaagccaccccagagagctgcctcgatcgccgcaatgtctgcttctttcgagcggcctagacaaactctgataccaaagtcaattaaagcgagtcctgaggtaaagaaaccacaatctgaagcaagcaaacctaagccagaggaagacgccaaagaaagtacccctgctgcgaaggatgggcaaactgtgactccgacaatacaggaagatgtaaaggaggatcaacccgaagacgaggaagggcttcctacatatccgtatgatcgcttgaggacatcttcaagcaatcctgtcacagacattgatagtaccaggcgtgagacgtatctatcttcggcagagttcagggagaagtttggcatgacaaaggaggcttttgcaaagctaccaaagtggaagcagaataggctcaagatcgctcttcagctcttttaaaatcttatgctgtcaaatatgcagtagttatgtctgcttgttggtgaaagcaaggacggcgagattggttttcaaaggcaaatctcagacatgaagatctctctcgcacacgtcgcaatgttaagaagagacatcggtaagtgtaagcctatctgggtcaaggggaccctcagtaggcgtctgaggggctggagcagtgagttttgagctgcccatgcccccaaattgtgtgttgtccactgacgaattctccatgtcgtgtgccgggtcgctgcattggcggtcctggtcacacaccctaattttttcctttccaaggtcaccggtttggttgtgagcttgcaatgctttttcctcgccctctttgaaacctcaccatttgtttcattctttcatgctgtgtatggtttcctgacaaataattatgttacatatatggtgtaagaagttaggtgatgggatgggtcgggatgaacgccccttatgttggaaaatccaggcgatgtacgggagacgggcgtcttgccctcggaatttgatcttttaagtggtaattagttattcatgcgtgcaaattttgtaatcagatttacagtaagcctctgttctcgtaagtac

SEQ ID NO: 61352 - protein, 167 aa, Triticum aestivum
  peptide (1)..(167): Ceres Seq. ID no. 15227148
RNLSTPPPVARKSFSKSSSPDPVKPPQRAASIAAMSASFERPRQTLIPKSIKASPEVKKPQSEASKPKPEEDAKESTPAAKDGQTVTPTIQEDVKEDQPEDEEGLPTYPYDRLRTSSSNPVTDIDSTRRETYLSSAEFREKFGMTKEAFAKLPKWKQNRLKIALQLF

SEQ ID NO: 61353 - protein, 133 aa, Triticum aestivum
  peptide (1)..(133): Ceres Seq. ID no. 15227149
MSASFERPRQTLIPKSIKASPEVKKPQSEASKPKPEEDAKESTPAAKDGQTVTPTIQEDVKEDQPEDEEGLPTYPYDRLRTSSSNPVTDIDSTRRETYLSSAEFREKFGMTKEAFAKLPKWKQNRLKIALQLF

SEQ ID NO: 61354 - DNA, 647 bp, Triticum aestivum
  misc_feature (1)..(647): Ceres Seq. ID no. 12624098
ctcagttaatgacacgtgtcattcggtccgtggcttgtcactttgcttcctcaatcgtcaagctacaacgtaaagagaccggcgaggccacccacaacttgtgaatctgaaaatggaatcaaaagctttcgtatctgttacgttcttgatcgtaaccctcctcctctgtcgaacaattcaatcaagaagttgcagatcagatgagaaaaccacggagaagacgatgattttaggaggcgttcatgatctccgaggaaaccaaaacagtggagagatcgagaatctcgctcgattcgctattcaacaacataacaaccgaaagaacaaggttcttgagttcaagaagattgtaaaggcaagagaacaggtagttgctggaaccatgtactacttaactcttgaagcaaacgaaggtggccaggccaagaacttcgaagccaaagtttgggtgaagccatggatgaacttcaagcagttacaagagtttaaagaatcttcttcttgaacatttcacttgttcaaaagggtaatctaaatgtttctgctaaattatatgaaataaataaggctgagatagctttgtttcagaccagtgtgtgtaatactaaaccagaagttaatgtaatcaaggaacctgttatggcttt

SEQ ID NO: 61355 - protein, 130 aa, Triticum aestivum
  peptide (1)..(130): Ceres Seq. ID no. 12624099
MESKAFVSVTFLIVTLLLCRTIQSRSCRSDEKTTEKTMILGGVHDLRGNQNSGEIENLARFAIQQHNNRKNKVLEFKKIVKAREQVVAGTMYYLTLEANEGGQAKNFEAKVWVKPWMNFKQLQEFKESSS

SEQ ID NO: 61356 - protein, 93 aa, Triticum aestivum
  peptide (1)..(93): Ceres Seq. ID no. 12624100
MILGGVHDLRGNQNSGEIENLARFAIQQHNNRKNKVLEFKKIVKAREQVVAGTMYYLTLEANEGGQAKNFEAKVWVKPWMNFKQLQEFKESSS

SEQ ID NO: 61357 - DNA, 905 bp, Triticum aestivum
  misc_feature (1)..(905): Ceres Seq. ID no. 13598171
cacaatcaaaacaccgactactcaagggaaatccatggcctctgccgcgctcctcgtcctcctcgccctggccaccatgcaggcgcagaccacgtcgtccgagaaggagacgcacctcaaggtgtactggcacgacgtggtgagcggacaagacccgacatcggtgccggtggcgcgcgcggccacgaccaacacctccaagtcggccttcggcgtcgtcatggtcatggacaactcactcacagaggggccgagcctcgactcatccaggctcatgggccgcgcccagggcacgtacatcgccgccggcaaggaccagctggcgctgctcatgctcatgaacttcgtctttaccgccggaaagtacaacggcagcagcatcgccattgtgggtcgcaacgccgtgtttaccgaggtccgtgagatggctgtcgtcggtggtaccggcgtgttcaggtgggcacgcgggtacgcgcaggccaggacgcataccttagacctcaagaccggcgacgccaccgtcgagtacaacatattcatcaggcactagtctcggccgttgtcaaaatttacttttgaaaacgggtttgctatttcacatctaaatgtgaaatacttatctcacatctaaatctagaacagttgatattgtttgtctttaattttcgtgcaaacatgatcgtctcgcctggcgcacccgttcgcttcacgttgtctgctgcagcggcctgtgtcccggccatgcaagtggtggtgggccgttgttgttcctttttaattcgcgggcttaggctggcagccgttgtttgtctcgattatggactcctgtttacgctttttttactggattgtccacgtatttgttgtctgtataattttttgaagacaatgtgattttagagtgg

SEQ ID NO: 61358 - protein, 182 aa, Triticum aestivum
  peptide (1)..(182): Ceres Seq. ID no. 13598172
TIKTPTTQGKSMASAALLVLLALATMQAQTTSSEKETHLKVYWHDVVSGQDPTSVPVARAATTNTSKSAFGVVMVMDNSLTEGPSLDSSRLMGRAQGTYIAAGKDQLALLMLMNFVFTAGKYNGSSIAIVGRNAVFTEVREMAVVGGTGVFRWARGYAQARTHTLDLKTGDATVEYNIFIRH

SEQ ID NO: 61359 - protein, 171 aa, Triticum aestivum
  peptide (1)..(171): Ceres Seq. ID no. 13598173
MASAALLVLLALATMQAQTTSSEKETHLKVYWHDVVSGQDPTSVPVARAATTNTSKSAFGVVMVMDNSLTEGPSLDSSRLMGRAQGTYIAAGKDQLALLMLMNFVFTAGKYNGSSIAIVGRNAVFTEVREMAVVGGTGVFRWARGYAQARTHTLDLKTGDATVEYNIFIRH

SEQ ID NO: 61360 - protein, 157 aa, Triticum aestivum
  peptide (1)..(157): Ceres Seq. ID no. 13598174
MQAQTTSSEKETHLKVYWHDVVSGQDPTSVPVARAATTNTSKSAFGVVMVMDNSLTEGPSLDSSRLMGRAQGTYIAAGKDQLALLMLMNFVFTAGKYNGSSIAIVGRNAVFTEVREMAVVGGTGVFRWARGYAQARTHTLDLKTGDATVEYNIFIRH

SEQ ID NO: 61361 - DNA, 686 bp, Triticum aestivum
  misc_feature (1)..(686): Ceres Seq. ID no. 12624105
aacaaaacaactgaatctgtttgcttgagttgaagcatcaagagacagaacagcaatggcttcttcttcttccatctccttctcatgcgcaccttcactcttctccatcaaacccatcacctcttcttcttctttcccaaagcagctctcctctcgattcctaggaacccgaaacttaaagattcgaatccgacccaacagactcggaccctccaacggttcaagaaccacctgctggttcaagttcggcaagaacggcgtcgatgctgaaagtgcaggaatctatggtagtcaaacacgcgatgacttcgacaaagacgacgttgaacagtacttcaattacatggggatgcttgcggtagaaggtacatattcaaagatggaagctcttcttaacctaaacattcatccagtcgatatcctattgatgttggcagccacggaaggtgacaaacctaagatcgaggagctgcttagagctggtgctagctactcggtcaaggatgctgatggaagaaccgctatagacagagctaatagtgaagagattcgtgacttgatccttggctactccactcagaaggcttgaatgttcctgagttttttaaagaaatgttgtgctagaacaaactgtctttatgagttccccggatgagtaggttataaaatccatcttcttttgcttc

SEQ ID NO: 61362 - protein, 177 aa, Triticum aestivum
  peptide (1)..(177): Ceres Seq. ID no. 12624106
MASSSSISFSCAPSLFSIKPITSSSSFPKQLSSRFLGTRNLKIRIRPNRLGPSNGSRTTCWFKFGKNGVDAESAGIYGSQTRDDFDKDDVEQYFNYMGMLAVEGTYSKMEALLNLNIHPVDILLMLAATEGDKPKIEELLRAGASYSVKDADGRTAIDRANSEEIRDLILGYSTQKA

SEQ ID NO: 61363 - DNA, 1374 bp, Triticum aestivum
  misc_feature (1)..(1374): Ceres Seq. ID no. 14303656
aaaccgccgtcccccgttcgccgtctccgcgccgcgcgacccttcggcccggccgccctccccgaacccccctccgtctgctgcgccgccgcccgcgaatccgggccatggaggcgctgtggaagcaggcctccaggctcaaggagcaggtcgcccgccagggcgtgtttaagcagtttggggctggtggctatggaaattctgataatgcattcacagacgagtcagaagttaaactacatcagagattggaaaaactttacttatccactcgtgctgccaaacattttcaaagggacgtcgtccggggtgtggagggctacatagtgacaggatctaagcaagtggagatagggaacaaattgtctgatgatagccagaaatatggcattgaaaacacatgcacaagtggtaatactttatccagagctgctacatactatggaaaggcgcgttcactgatagaaaaggaacgcgggaacatgctaaaagcatttggtactcaggtggcagagcctctacgggcaatggtaatgggtgcccctctagaggatgctagacatctagcccagagatatgacagagtaaggcaagaagctgatgctcaggtcgttgaagtttcaaggcgtcaaagcagagtaagagaatcagctgggaatagtgacgtgatatcaaagttggaggcagctgagtataaacttgaagaactgaagtcaaacatggtggggttaggaaaggaagcggtttcagctatggctgctgtagaggggcagcagcaaagattgacattacaacgcctcattgcaatggttgaggcggagagaacttatcatcagaaagtcctggagatccttgaccatttggaagaagaaatggtgtctgagcgccaaaaaatcgaagcacctccaccccctgcagcagaaagttatatgtcaccgccgccaccatcatatgacgaagttaatggcatgtttgcctccacttctgctgatcaggcagttaactctgtcgacttcttcctgggagaggcgctcgattccttcgaggctgagagtgagtttgagcttaacttatcagttggcgacatcgttatcgtccggaagatatcaagcaacggttgggcggaaggtgaatgcaaggggaaagcaggatggttcccacatgcctatgtcgaaagacgcgagcgtgttctggcgagcaaagtcccgcatattttctaggggttttgaggaggaacataggttataggtgtttgatttcaatagttgaacagcgtactttcagacttctacagtattcatgtgtatagattgaattttcgtcccgtgagccagtttttgtgaagataatgtacatctgacatttcagaacacc

SEQ ID NO: 61364 - protein, 405 aa, Triticum aestivum
  peptide (1)..(405): Ceres Seq. ID no. 14303657
TAVPRSPSPRRATLRPGRPPRTPLRLLRRRPRIRAMEALWKQASRLKEQVARQGVFKQFGAGGYGNSDNAFTDESEVKLHQRLEKLYLSTRAAKHFQRDVVRGVEGYIVTGSKQVEIGNKLSDDSQKYGIENTCTSGNTLSRAATYYGKARSLIEKERGNMLKAFGTQVAEPLRAMVMGAPLEDARHLAQRYDRVRQEADAQVVEVSRRQSRVRESAGNSDVISKLEAAEYKLEELKSNMVGLGKEAVSAMAAVEGQQQRLTLQRLIAMVEAERTYHQKVLEILDHLEEEMVSERQKIEAPPPPAAESYMSPPPPSYDEVNGMFASTSADQAVNSVDFFLGEALDSFEAESEFELNLSVGDIVIVRKISSNGWAEGECKGKAGWFPHAYVERRERVLASKVPHIF

SEQ ID NO: 61365 - protein, 370 aa, Triticum aestivum
  peptide (1)..(370): Ceres Seq. ID no. 14303658
MEALWKQASRLKEQVARQGVFKQFGAGGYGNSDNAFTDESEVKLHQRLEKLYLSTRAAKHFQRDVVRGVEGYIVTGSKQVEIGNKLSDDSQKYGIENTCTSGNTLSRAATYYGKARSLIEKERGNMLKAFGTQVAEPLRAMVMGAPLEDARHLAQRYDRVRQEADAQVVEVSRRQSRVRESAGNSDVISKLEAAEYKLEELKSNMVGLGKEAVSAMAAVEGQQQRLTLQRLIAMVEAERTYHQKVLEILDHLEEEMVSERQKIEAPPPPAAESYMSPPPPSYDEVNGMFASTSADQAVNSVDFFLGEALDSFEAESEFELNLSVGDIVIVRKISSNGWAEGECKGKAGWFPHAYVERRERVLASKVPHIF

SEQ ID NO: 61366 - protein, 245 aa, Triticum aestivum
  peptide (1)..(245): Ceres Seq. ID no. 14303659
MLKAFGTQVAEPLRAMVMGAPLEDARHLAQRYDRVRQEADAQVVEVSRRQSRVRESAGNSDVISKLEAAEYKLEELKSNMVGLGKEAVSAMAAVEGQQQRLTLQRLIAMVEAERTYHQKVLEILDHLEEEMVSERQKIEAPPPPAAESYMSPPPPSYDEVNGMFASTSADQAVNSVDFFLGEALDSFEAESEFELNLSVGDIVIVRKISSNGWAEGECKGKAGWFPHAYVERRERVLASKVPHIF

SEQ ID NO: 61367 - DNA, 920 bp, Triticum aestivum
  misc_feature (1)..(920): Ceres Seq. ID no. 13661277
tcatctcaaaccaacaccactctaactcaagcttatcgttcgcatctagcctctgtttgtagtcactccatcgggtgcatctagcctctggtggtagtacattcaaattgaggaagcaaagatagatatgctgctgtcaggcggcttctcctgggtgtaccttgctctgctgttggccttgctcaccttcaactccgtcatggcggtgtaccactccaagggcgacacggccactgtcgccttcgtcgccacctcctacctcgacctggtgctgctcttctgctgcctctggctctacaacacaacggcagcggggtcggcgtggaggaaccggctcaaggcgtcagtgtggactctcaccacgctgctcaccttctccttcgcctacatggtcatgggcacggctggcctcaccctccacgtcgcgttgctcgtgtggttcatcgccgcggcgacggggattggtgccttctccgccttcttcgagcagggcagaatcaacccagctccgggtgaacccatgctgccgccaccggtgtagcccaggctctgaatcactacggggatatgcttttgtgatgcattcagacgcatggagtttgccaggttgtgagcttacgatggagttcaaatactgttgggtcgccctcgtcttgtaaatatatttaccttgaaagcatgcaagagtccttgtagaatcgttgtccttgtcccttctaggggtgcacgcttaggtgtgtatgtgtgtagtgtgcaatgtaaccggcaacgaaataatgaattgcgtggttcagtaacaagcgtgtgatctcctatgtctctgcagtcctttactattttgaatcacacgcaaggcgccaaatttccttggcgccaaatttagtattccatgcggattcgcctttattctgcgataatct

SEQ ID NO: 61368 - protein, 137 aa, Triticum aestivum
  peptide (1)..(137): Ceres Seq. ID no. 13661278
MLLSGGFSWVYLALLLALLTFNSVMAVYHSKGDTATVAFVATSYLDLVLLFCCLWLYNTTAAGSAWRNRLKASVWTLTTLLTFSFAYMVMGTAGLTLHVALLVWFIAAATGIGAFSAFFEQGRINPAPGEPMLPPPV

SEQ ID NO: 61369 - protein, 113 aa, Triticum aestivum
  peptide (1)..(113): Ceres Seq. ID no. 13661279
MAVYHSKGDTATVAFVATSYLDLVLLFCCLWLYNTTAAGSAWRNRLKASVWTLTTLLTFSFAYMVMGTAGLTLHVALLVWFIAAATGIGAFSAFFEQGRINPAPGEPMLPPPV

SEQ ID NO: 61370 - DNA, 754 bp, Triticum aestivum
  misc_feature (1)..(754): Ceres Seq. ID no. 13661351
ctttctcgcttctcataaactcgttggaacaaaaatcaaacaaaccatattacaaaatttgcgacccaaaggaagaaaaaaggtgaattttctgattccgagcagcccggccgatttagttgaggtcatccggggaatccggttcggctccagacggcgtcacgcacccgcgacgcgtcccggcccttgagcgtgcgtccgacgccctcgaccaccgacgccctggcctgacgccgcgccaggtacacgtgcggcggcacccagccgtcggcgtcgtcttgctgctgctcgtcgggctcgggctccagctccaggtcggcgaaccggctcggccacgcgggcacctcgacgggcgccgacgacgccacctgccgcccgtccgcgaacgcccggctgagcccgcccacgcgccgcggcggctcgcccctgggcgccctgtccgtgcgctgaatcccgtcctgatccgcggtggtggttggcgcgtccgacgatggagaataccagacgtccgattcggccaggtccggcaggtcgtcgtagggggacggggcgacggtggcggagccggggcggtggtggaagccgaggaagcgctcggcggcagagaaggccgtctgcttgcgcgccttggccatcgggcgcagtaccggcggctggctccggtcgattggtttggctgagcgcgcgcgcgcggtgggaaagatgggaggtgggaaagacggaggagcaggagagtgttgagggggggtttggc

SEQ ID NO: 61371 - protein, 88 aa, Triticum aestivum
  peptide (1)..(88): Ceres Seq. ID no. 13661352
MENTRRPIRPGPAGRRRGTGRRWRSRGGGGSRGSARRQRRPSACAPWPSGAVPAAGSGRLVWLSARARWERWEVGKTEEQESVEGGFG

SEQ ID NO: 61372 - protein, 62 aa, Triticum aestivum
  peptide (1)..(62): Ceres Seq. ID no. 13661353
FLASHKLVGTKIKQTILQNLRPKGRKKVNFLIPSSPADLVEVIRGIRFGSRRRHAPATRPGP

SEQ ID NO: 61373 - DNA, 595 bp, Triticum aestivum
  misc_feature (1)..(595): Ceres Seq. ID no. 14301686
aatcacaatctcaaacctcaaaccctaaaaaaataaaaaagagctacgtagaaagagacagagagaagaatgggtcgccaaaacgttattgtagtttttggcctcgtgttcttggccgtccttggcctcgccgcagctgcctcctctccgtctccttcagcgtcaccttccaaagctccatctacttccacacctgaggttgaatctccagtgtccgaggacaccattggaaccaccgacgacgatgtagctgcttctcctggtgatgatgacgtagctgtggctggtcctctaggaagtgactcgtcctacggtagcaatggaccttcaggctctgccgattctgctgacagcggcgcggcggctcttggagtttctgcggtcgttgcgggtgttacatccatcgtcggttctttcttgtttttctgaggcgtgtattttcatgagaatatcatttttgagtaaagactatttatatatatggatattgtgatgatcatgttgtaatttgtttctccttggttatgagaaccgatgtccttgaaataagctgaaaataaaactttccttagcaatataaaataaagaattacgg

SEQ ID NO: 61374 - protein, 119 aa, Triticum aestivum
  peptide (1)..(119): Ceres Seq. ID no. 14301687
MGRQNVIVVFGLVFLAVLGLAAAASSPSPSASPSKAPSTSTPEVESPVSEDTIGTTDDDVAASPGDDDVAVAGPLGSDSSYGSNGPSGSADSADSGAAALGVSAVVAGVTSIVGSFLFF

SEQ ID NO: 61375 - protein, 64 aa, Triticum aestivum
  peptide (1)..(64): Ceres Seq. ID no. 14301688
SQSQTSNPKKIKKSYVERDREKNGSPKRYCSFWPRVLGRPWPRRSCLLSVSFSVTFQSSIYFHT

SEQ ID NO: 61376 - DNA, 996 bp, Triticum aestivum
  misc_feature (1)..(996): Ceres Seq. ID no. 13661727
gatcctttctctcatcctcaaacgctgcaagcagcacaccacacaaaatacaaaatggctcaaaccatgctgcttacttcgggagtttctgcgaaccaattcttaaggaacaagaaccctctcgctcagcccaaagttcaccatttcttcctctcgggaaactctcatgttgttctaccatctcgaagaccatcattagtacctcttgccatcttcaaacccaaaaccaaagctgctcccaaaaaggttgagaaggtgaagccaaaggttgaagacggtatcttcggaacatctggtgggataggtttcacgaagcagaacgagctctttgtgggtcgtgttgctatgatcggtttcgctgcatcgttgctgggtgaggcgttaacagggaaaggtatattagcacagttgaatctggagacagggataccgatttacgaagcagaaccattacttctcttcttcatattgttcactctgttgggtgctatcggagctcttggggacagaggaaaattcgtcgacgatcctcccaccggacttgagaaagccgtcattcctcccggcaaaggcgtccgatctgctctcggtcttaaagaacaaggtccattgtttgggttcacgaaggcaaacgagttgttcgtaggaagattggcacagttgggaatagcattttcattgataggagagattataaccgggaaaggagccttggctcaactcaacattgagactggtattccaattcaagatattgaacccctcgtcctcttaaacgttgctttcttcttctttgctgccattaatcctggtaatggaaagttcattactgatgatggtgaagaaaggtaaactctttatgtacttaaaatttgtggtttgtgagcccatcttcatgttgagacaaaaggacatggacagcttaaactgttgtaattcttaaatcctcttgtttttacttgaattttcagattatatatagtttcacaaccacct

SEQ ID NO: 61377 - protein, 283 aa, Triticum aestivum
  peptide (1)..(283): Ceres Seq. ID no. 13661728
DPFSHPQTLQAAHHTKYKMAQTMLLTSGVSANQFLRNKNPLAQPKVHHFFLSGNSHVVLPSRRPSLVPLAIFKPKTKAAPKKVEKVKPKVEDGIFGTSGGIGFTKQNELFVGRVAMIGFAASLLGEALTGKGILAQLNLETGIPIYEAEPLLLFFILFTLLGAIGALGDRGKFVDDPPTGLEKAVIPPGKGVRSALGLKEQGPLFGFTKANELFVGRLAQLGIAFSLIGEIITGKGALAQLNIETGIPIQDIEPLVLLNVAFFFFAAINPGNGKFITDDGEER

SEQ ID NO: 61378 - protein, 265 aa, Triticum aestivum
  peptide (1)..(265): Ceres Seq. ID no. 13661729
MAQTMLLTSGVSANQFLRNKNPLAQPKVHHFFLSGNSHVVLPSRRPSLVPLAIFKPKTKAAPKKVEKVKPKVEDGIFGTSGGIGFTKQNELFVGRVAMIGFAASLLGEALTGKGILAQLNLETGIPIYEAEPLLLFFILFTLLGAIGALGDRGKFVDDPPTGLEKAVIPPGKGVRSALGLKEQGPLFGFTKANELFVGRLAQLGIAFSLIGEIITGKGALAQLNIETGIPIQDIEPLVLLNVAFFFFAAINPGNGKFITDDGEER

SEQ ID NO: 61379 - protein, 261 aa, Triticum aestivum
  peptide (1)..(261): Ceres Seq. ID no. 13661730
MLLTSGVSANQFLRNKNPLAQPKVHHFFLSGNSHVVLPSRRPSLVPLAIFKPKTKAAPKKVEKVKPKVEDGIFGTSGGIGFTKQNELFVGRVAMIGFAASLLGEALTGKGILAQLNLETGIPIYEAEPLLLFFILFTLLGAIGALGDRGKFVDDPPTGLEKAVIPPGKGVRSALGLKEQGPLFGFTKANELFVGRLAQLGIAFSLIGEIITGKGALAQLNIETGIPIQDIEPLVLLNVAFFFFAAINPGNGKFITDDGEER

SEQ ID NO: 61380 - DNA, 1091 bp, Triticum aestivum
  misc_feature (1)..(1091): Ceres Seq. ID no. 14301638
ttggctacacatctttataagtggccggcatgcactccacatagcagccacgactcagtagatggcggcatcggcggcccacgtcgcggccctggccgccatactcctcttcatcccttccctcctcgccactgtcgccgcgcagcagggcaaggccaaggccttctgcatcagccagttcgccatcgccagtcaggcttgctccatcctgccgcccagccccccggaggacgaccatcaccaccaccacgacgacgatgatgatgacgacgacgacgatgacgacgacgacgacgacgacgagcaccatggcggcgacggtgaccgccgcctccgtggacgccatggccacgcggcggtcatcaacatctcgtcccttggcctgatggcggcaaacaacgacagcagcgaagttcacgttgcaagaaacggcaccggtcaccatggcggcaaccacacccgccgcgggcgcgggcgcgggcgccttcgtgctactggacgcggccggcgtgtgcgtgtgcgcgacggtgatgatgacccggaccatgaccacgaccaccaggaggaccccgaccatgatgatgaccatgaggaggactccgaccccgacgacgcccatgacgacgaacctgatgacgatgacgacgacgacgacgacgaccacgagcacaatgacgacgaccacgagcaccaccacgacgaggagcttcgggcgtaccgcgactgctgccggtggctgcaggaggtgcagaaggactgtgtgtgcgaggcgctcctgcggctgcccccgttcctcgtgaaaccacagcacaagtacgtcgtccgggtggggcggacgtgccggatcgtctaccgctgcggcggcgtgtagccaactggccggttcacacgtttggttaactgcactcgttgtccctgcttcctctctacgattacgtgcctgttttgctcttcagtctacgtagatggataattaggtaggcagcacgtatggatcgggtgtaatttttctactaagtattgtcctcaaagtttttcgatgtgcttccattcggatagactaattgataataatactacatgttgtcccg

SEQ ID NO: 61381 - protein, 269 aa, Triticum aestivum
  peptide (1)..(269): Ceres Seq. ID no. 14301639
MAASAAHVAALAAILLFIPSLLATVAAQQGKAKAFCISQFAIASQACSILPPSPPEDDHHHHHDDDDDDDDDDDDDDDDDEHHGGDGDRRLRGRHGHAAVINISSLGLMAANNDSSEVHVARNGTGHHGGNHTRRGRGRGRLRATGRGRRVRVRDGDDDPDHDHDHQEDPDHDDDHEEDSDPDDAHDDEPDDDDDDDDDDHEHNDDDHEHHHDEELRAYRDCCRWLQEVQKDCVCEALLRLPPFLVKPQHKYVVRVGRTCRIVYRCGGV

SEQ ID NO: 61382 - protein, 161 aa, Triticum aestivum
  peptide (1)..(161): Ceres Seq. ID no. 14301640
MAANNDSSEVHVARNGTGHHGGNHTRRGRGRGRLRATGRGRRVRVRDGDDDPDHDHDHQEDPDHDDDHEEDSDPDDAHDDEPDDDDDDDDDDHEHNDDDHEHHHDEELRAYRDCCRWLQEVQKDCVCEALLRLPPFLVKPQHKYVVRVGRTCRIVYRCGGV

SEQ ID NO: 61383 - DNA, 961 bp, Triticum aestivum
  misc_feature (1)..(961): Ceres Seq. ID no. 12784729
actacacgcccacccctcacccttgatcgatcacacatcaaacccctccacacgctcgcccgcgcgcgccacggacgcagcaatggccgccctcaccgcctccatcgccacctccagcgccttcgccgcgaagccgcgcctggcccgcccgccggcgcgcctctccgtctcctgctccgcgtccaacggcgacaacaacaccccctccctctccgcttccatcaagaccttctcggcggccctggcgctctcatccgtcctcctctcctccgccgcgacctccccgccgccggcggccgccgacatcgccggcctgaccccgtgcaaggagtccaaggcgttcgccaagcgggagaagcagtcggtgaagaagctcaactcgtcgctcaagaagtacgcgcccgactcggcgcccgcgctcgccatccaggccaccatcgagaagaccaagcgccggttcgagaactacggcaagttcggcctgctctgcggctccgacggcctgccccacctcatcgtcagcggcgaccagcggcactggggcgagttcatcacccccggcgtgctcttcctctacatcgcggggtggatcgggtgggtcggccgcagctacctcatcgccgtcagcggcgagaagaagcccgccatgcgggagatcatcatcgacgtcgagctcgccgccaggatcatccccaggggcttcatctggcccgtcgccgcctaccgcgagctcatcaacggcgacctcgtcgtcgacgacgccgacatcggctactaagtagctaccatgcgtgcgtggttggctagtcggtcccagatgggcagcggaggattgatgagggcttgtggtgtcgatctgcgtgggcttggtgtaggagctgataggaacatggagaaatggaagctctcttgtatttaagaaactgaacccaatcttgtataactattgtgttctctcttc

SEQ ID NO: 61384 - protein, 268 aa, Triticum aestivum
  peptide (1)..(268): Ceres Seq. ID no. 12784730
TTRPPLTLDRSHIKPLHTLARARHGRSNGRPHRLHRHLQRLRREAAPGPPAGAPLRLLLRVQRRQQHPLPLRFHQDLLGGPGALIRPPLLRRDLPAAGGRRHRRPDPVQGVQGVRQAGEAVGEEAQLVAQEVRARLGARARHPGHHREDQAPVRELRQVRPALRLRRPAPPHRQRRPAALGRVHHPRRALPLHRGVDRVGRPQLPHRRQRREEARHAGDHHRRRARRQDHPQGLHLARRRLPRAHQRRPRRRRRRHRLLSSYHACVVG

SEQ ID NO: 61385 - protein, 258 aa, Triticum aestivum
  peptide (1)..(258): Ceres Seq. ID no. 12784731
LHAHPSPLIDHTSNPSTRSPARATDAAMAALTASIATSSAFAAKPRLARPPARLSVSCSASNGDNNTPSLSASIKTFSAALALSSVLLSSAATSPPPAAADIAGLTPCKESKAFAKREKQSVKKLNSSLKKYAPDSAPALAIQATIEKTKRRFENYGKFGLLCGSDGLPHLIVSGDQRHWGEFITPGVLFLYIAGWIGWVGRSYLIAVSGEKKPAMREIIIDVELAARIIPRGFIWPVAAYRELINGDLVVDDADIGY

SEQ ID NO: 61386 - protein, 231 aa, Triticum aestivum
  peptide (1)..(231): Ceres Seq. ID no. 12784732
MAALTASIATSSAFAAKPRLARPPARLSVSCSASNGDNNTPSLSASIKTFSAALALSSVLLSSAATSPPPAAADIAGLTPCKESKAFAKREKQSVKKLNSSLKKYAPDSAPALAIQATIEKTKRRFENYGKFGLLCGSDGLPHLIVSGDQRHWGEFITPGVLFLYIAGWIGWVGRSYLIAVSGEKKPAMREIIIDVELAARIIPRGFIWPVAAYRELINGDLVVDDADIGY

SEQ ID NO: 61387 - DNA, 981 bp, Triticum aestivum
  misc_feature (1)..(981): Ceres Seq. ID no. 13661434
agaacatcctaatcgaaaaactaccagcaggtccagcgccaccatcgccctacccctacgcccccacagcaacacgagaaaaccaccgcaagcacgcgccccgctccgccccgagacgcgacggtggaatccggcaggcacgggcacgagcaggcgtgcggacacatagcccgagcgcgcgcgatggcagtcggagggcggcgcgcggcggcggcggcgtgcgggcgctggtgcctggtgatcctcgccgtggcctccgcgctcggcgtctccgggcccgcgctctactggcgctacaagaagggcttctcctcccccgcctccggcgctgccgccgtctccgcaccctcctgcccgccctgcacctgcgactgcccgccgccgctctccctccagtccatcgcgccagggctcatgaacttctcaatttcagcttgcggcacaaatgaccctgagcgtaccaaggagatggcgaagcagtttgttgatctcctcaacgaggaactcaagctgcagcaggttgtagctgaggagcacatccatcacatgaatgccacacttgtcgaggcaaaaaggcaggctaccctgtaccagcgagaggcggagaagtgtaacgcggccacagagacttgtgaggaagccagggagaagtctgagggggcaatctcaaaggagaggaaactgacagcactgtgggaacgtcgagctcgcgaattgggttggcaggattctcgagccgcgaccaccgcacgatagcttggcaagcagtttgcttctgcaggtaaaagtatttgcagcaggcggcattttaccacaccgagcaatgttagctgtatgggtccacgtgtaatgtttgccagtgtatgactatgagttgtcccagttgaagtatagttactctagacactgtagattccttataaatgtaactagtatacattgtttaaatatgcaagctttatattgaagacaaaaaaaaaa

SEQ ID NO: 61388 - protein, 190 aa, Triticum aestivum
  peptide (1)..(190): Ceres Seq. ID no. 13661435
MAVGGRRAAAAACGRWCLVILAVASALGVSGPALYWRYKKGFSSPASGAAAVSAPSCPPCTCDCPPPLSLQSIAPGLMNFSISACGTNDPERTKEMAKQFVDLLNEELKLQQVVAEEHIHHMNATLVEAKRQATLYQREAEKCNAATETCEEAREKSEGAISKERKLTALWERRARELGWQDSRAATTAR

SEQ ID NO: 61389 - protein, 148 aa, Triticum aestivum
  peptide (1)..(148): Ceres Seq. ID no. 13661436
NILIEKLPAGPAPPSPYPYAPTATRENHRKHAPRSAPRRDGGIRQARARAGVRTHSPSARDGSRRAARGGGGVRALVPGDPRRGLRARRLRARALLALQEGLLLPRLRRCRRLRTLLPALHLRLPAAALPPVHRARAHELLNFSLRHK

SEQ ID NO: 61390 - protein, 113 aa, Triticum aestivum
  peptide (1)..(113): Ceres Seq. ID no. 13661437
MNFSISACGTNDPERTKEMAKQFVDLLNEELKLQQVVAEEHIHHMNATLVEAKRQATLYQREAEKCNAATETCEEAREKSEGAISKERKLTALWERRARELGWQDSRAATTAR

SEQ ID NO: 61391 - DNA, 922 bp, Triticum aestivum
  misc_feature (1)..(922): Ceres Seq. ID no. 15225738
aaggttcttgatttgtggtacagactagaaagctttatcctgccatgtcagggacctctttcaccggcgcgccggcgtcagatgcccccctggctccgtacccgcggcagcagaactacagcttcaacgggcgcgtcctgcttatggccgccttcctccttttcgggctcaccatcttcttcaccctcatccgcttcttgctgtacgtgttagtggcgcggtctggcggccgccgtcgccgcggcagcttcaccgccggcatcctgcggtccatcaactcgtttggcggaactagcggccggcgtgggctggacgcctccgcgctctccgcgctgccggtcaccgcgtaccggaaggagggcgccgccaccgccggggctgactgcgccgtgtgcctgtcggagctcgccgacggagaaaaggtgcgggagctgcccaactgcgggcactcgttccacgtggagtgcgtcgacgcatggctgcgctccaggacgacctgccctctctgccgcgccgaggctgagctgcccaaggggaacggcaaggcggaggtggcggcgcagtcgtcgtcgtcctccccctcatcctctgccagggagccgccgcaacaggcgttgttcgtgggaggaggaaccttgatcgtgaccgtgcaaggtggcttcccggatacgcaaaggggcgtgcgtgggtcaacatcggggtaggaggtcagtccggatcttcctattcctaaattgcagcgaagtttcgaagaaggctacagcgacagatgcatatactgtaggttagaccgttgttcacggcgtgcacaagttggatacaatcatacaaaacacctctgtttgagcgaaagtcacccatttgtttgtttgtttgttgtatttcgaggagagcatataagaaactcatatgttgttaattc

SEQ ID NO: 61392 - protein, 219 aa, Triticum aestivum
  peptide (1)..(219): Ceres Seq. ID no. 15225739
MSGTSFTGAPASDAPLAPYPRQQNYSFNGRVLLMAAFLLFGLTIFFTLIRFLLYVLVARSGGRRRRGSFTAGILRSINSFGGTSGRRGLDASALSALPVTAYRKEGAATAGADCAVCLSELADGEKVRELPNCGHSFHVECVDAWLRSRTTCPLCRAEAELPKGNGKAEVAAQSSSSSPSSSAREPPQQALFVGGGTLIVTVQGGFPDTQRGVRGSTSG

SEQ ID NO: 61393 - protein, 186 aa, Triticum aestivum
  peptide (1)..(186): Ceres Seq. ID no. 15225740
MAAFLLFGLTIFFTLIRFLLYVLVARSGGRRRRGSFTAGILRSINSFGGTSGRRGLDASALSALPVTAYRKEGAATAGADCAVCLSELADGEKVRELPNCGHSFHVECVDAWLRSRTTCPLCRAEAELPKGNGKAEVAAQSSSSSPSSSAREPPQQALFVGGGTLIVTVQGGFPDTQRGVRGSTSG

SEQ ID NO: 61394 - DNA, 964 bp, Triticum aestivum
  misc_feature (1)..(964): Ceres Seq. ID no. 14301656
atttctttcttgtgatcaatctacctatctatctgcttctgcttcttcttcttcttcttcttaacactgaacgacaatgtggcttgggatctccatctccaagcaaggacaaggacaaggacaaggagcggcggctgtagcagtggtcgccatgctcggcctctgcaccatatccatacccatgtcgatgctgcctctcgccgcacccaccatccaccacgaaggaggcgctcaaggcggaagggggaacccaaacccagccaacgcgctggtggcgctggtgaacgccgaccgggcagccgccaagctacccgccctccgcaccaccaagggcctcggctgcatggcgctgcagtgcatcgcccgctgcctcgccctctcccccgccaccgcctgcgccgccgacggcacgctggcgccgccctgccacccgccggagactgacatcaccgaggtctacgccgccaactgcggggtcgagctgcccacggtcgacgtcgtctccggccgcatcctcggctgcagcagccaaagctccgacggcgtcagcggggacgcgctccacatggccaacgccaccgtggtgcgtggcagggagcacgcgcaggtgggcgccggcgtcgaccgcggcggcttctggtgcctcctcttcagcagcggcagccccaactccagcttccagctggaggccgccggcaggggcatcgcccagcagcacggctgcttcagcgaccccgacgccaccctctcctgcaccacctccgccggccaccaccaaaccagacgactcaccgccggagtcacgtcctttgccttggctgcttccactctgcttttcctcctctagtctagtctagtaatgaataagctagcagagacaccctagaagatactagtattactcggacttgtaactttgctattcaaacagtctgtcagtcagtgatgagtgtgatcatttttc

SEQ ID NO: 61395 - protein, 256 aa, Triticum aestivum
  peptide (1)..(256): Ceres Seq. ID no. 14301657
MWLGISISKQGQGQGQGAAAVAVVAMLGLCTISIPMSMLPLAAPTIHHEGGAQGGRGNPNPANALVALVNADRAAAKLPALRTTKGLGCMALQCIARCLALSPATACAADGTLAPPCHPPETDITEVYAANCGVELPTVDVVSGRILGCSSQSSDGVSGDALHMANATVVRGREHAQVGAGVDRGGFWCLLFSSGSPNSSFQLEAAGRGIAQQHGCFSDPDATLSCTTSAGHHQTRRLTAGVTSFALAASTLLFLL

SEQ ID NO: 61396 - protein, 231 aa, Triticum aestivum
  peptide (1)..(231): Ceres Seq. ID no. 14301658
MLGLCTISIPMSMLPLAAPTIHHEGGAQGGRGNPNPANALVALVNADRAAAKLPALRTTKGLGCMALQCIARCLALSPATACAADGTLAPPCHPPETDITEVYAANCGVELPTVDVVSGRILGCSSQSSDGVSGDALHMANATVVRGREHAQVGAGVDRGGFWCLLFSSGSPNSSFQLEAAGRGIAQQHGCFSDPDATLSCTTSAGHHQTRRLTAGVTSFALAASTLLFLL

SEQ ID NO: 61397 - protein, 221 aa, Triticum aestivum
  peptide (1)..(221): Ceres Seq. ID no. 14301659
MSMLPLAAPTIHHEGGAQGGRGNPNPANALVALVNADRAAAKLPALRTTKGLGCMALQCIARCLALSPATACAADGTLAPPCHPPETDITEVYAANCGVELPTVDVVSGRILGCSSQSSDGVSGDALHMANATVVRGREHAQVGAGVDRGGFWCLLFSSGSPNSSFQLEAAGRGIAQQHGCFSDPDATLSCTTSAGHHQTRRLTAGVTSFALAASTLLFLL

SEQ ID NO: 61398 - DNA, 766 bp, Triticum aestivum
  misc_feature (1)..(766): Ceres Seq. ID no. 13661756
attacgatttagagggagggaggaagaagaatcagatcggagaaaatgacaatgacgacgtcgatgatacagaggctgttcacgcaaggcaccaagntcgtctgcgtcgggcgtaactacgccgctcacgccaaagaactaggcaacgccgttcccaaggaaccagttatattcttaaagccgacgtcatcatacttagagaacggaggaacgattgagattccacatcctctagaatcactccatcatgaggtggagctcgctgtagtgatgggagagaaggctagagatgtacccgaggcaaccgccatggattacattggaggatatgcggttgctcttgatatgactgctagggaactccaagctactgccaaggcatctggtctcccttggactcttgctaaaggacaggatactttcactccaataagctctgttctgccaaaggcgatggtgcatgatcctgataacctagaactttggctgaaggttgatggtgaaacaagacagaagggtttgacaaaagatatgatcttcaaggttccgtacctcatcagctacataagctctataatgactctctacgaaggagatgtcatcttgacaggtacgccagaaggtgttggacctgtaaagataggacagaagataaccgcagggatcactggtctatctgaagttcagttcgatgttgataggcgtctaaagcctttgagttaattgttttgtttgtgtttcatataatactattaataaaaatgtt

SEQ ID NO: 61399 - protein, 225 aa, Triticum aestivum
  peptide (1)..(225): Ceres Seq. ID no. 13661757
  misc_feature (18)..(18): Xaa is any aa, unknown or other
MTMTTSMIQRLFTQGTKXVCVGRNYAAHAKELGNAVPKEPVIFLKPTSSYLENGGTIEIPHPLESLHHEVELAVVMGEKARDVPEATAMDYIGGYAVALDMTARELQATAKASGLPWTLAKGQDTFTPISSVLPKAMVHDPDNLELWLKVDGETRQKGLTKDMIFKVPYLISYISSIMTLYEGDVILTGTPEGVGPVKIGQKITAGITGLSEVQFDVDRRLKPLS

SEQ ID NO: 61400 - protein, 223 aa, Triticum aestivum
  peptide (1)..(223): Ceres Seq. ID no. 13661758
  misc_feature (16)..(16): Xaa is any aa, unknown or other
MTTSMIQRLFTQGTKXVCVGRNYAAHAKELGNAVPKEPVIFLKPTSSYLENGGTIEIPHPLESLHHEVELAVVMGEKARDVPEATAMDYIGGYAVALDMTARELQATAKASGLPWTLAKGQDTFTPISSVLPKAMVHDPDNLELWLKVDGETRQKGLTKDMIFKVPYLISYISSIMTLYEGDVILTGTPEGVGPVKIGQKITAGITGLSEVQFDVDRRLKPLS

SEQ ID NO: 61401 - protein, 219 aa, Triticum aestivum
  peptide (1)..(219): Ceres Seq. ID no. 13661759
  misc_feature (12)..(12): Xaa is any aa, unknown or other
MIQRLFTQGTKXVCVGRNYAAHAKELGNAVPKEPVIFLKPTSSYLENGGTIEIPHPLESLHHEVELAVVMGEKARDVPEATAMDYIGGYAVALDMTARELQATAKASGLPWTLAKGQDTFTPISSVLPKAMVHDPDNLELWLKVDGETRQKGLTKDMIFKVPYLISYISSIMTLYEGDVILTGTPEGVGPVKIGQKITAGITGLSEVQFDVDRRLKPLS

SEQ ID NO: 61402 - DNA, 559 bp, Triticum aestivum
  misc_feature (1)..(559): Ceres Seq. ID no. 12624623
atggctagggaagttcttaccaggtttgcagctgagatttggccattactttgttacctgctgtagctttttgtcagccgtatttagcccctactttcaagtatgcctgaacatatgatgtcaactcccaggttcccagacatagcatccgttcagcttaggatgccaaacctccactttcttcccgtgaacctaggggggaaagaaaatccaggattggtgaagtttgctgatgatgtgtacatgccgactgacgagccgcatggaaccatcgaagcaacgttgagccgtgccaactcaaagctgtaatttcacttgatgcttgtggccaggctcatgatttggtttggtttcttgaagatcacaatcgccaataaacaaagtgatagggggaaagctagcacaaccaccccttgcaaaagggtaaaaggacgtaaactttgcatatgtattcagctaattgacttgtacatggctagctagagttcccccatcgtaaattttactgttgtacaaaaccttcaatgtttcgttgtctccacaatgctataatatagcc

SEQ ID NO: 61403 - protein, 68 aa, Triticum aestivum
  peptide (1)..(68): Ceres Seq. ID no. 12624624
MPEHMMSTPRFPDIASVQLRMPNLHFLPVNLGGKENPGLVKFADDVYMPTDEPHGTIEATLSRANSKL

SEQ ID NO: 61404 - protein, 64 aa, Triticum aestivum
  peptide (1)..(64): Ceres Seq. ID no. 12624625
MMSTPRFPDIASVQLRMPNLHFLPVNLGGKENPGLVKFADDVYMPTDEPHGTIEATLSRANSKL

SEQ ID NO: 61405 - protein, 63 aa, Triticum aestivum
  peptide (1)..(63): Ceres Seq. ID no. 12624626
MSTPRFPDIASVQLRMPNLHFLPVNLGGKENPGLVKFADDVYMPTDEPHGTIEATLSRANSKL

SEQ ID NO: 61406 - DNA, 747 bp, Triticum aestivum
  misc_feature (1)..(747): Ceres Seq. ID no. 13661682
atcgcaactcgcagcagttcaatacttgcacaaccatacacatcacacatcacctgtagatcgaccggtgcacgtaaggcgcgacaatggagtaccaggggcagaccggccacgccaccgacaaggtggaggagtacggccagcccgtggccgggcacggcggcgccaccgacggccccacggggacgcacggcgccgcagccgccgcgggcaccgggcagctccagccgaccagggacgaccacaagaccgacggtgtcctgcgccgctccggcagctccagctccagctcgtctgaggacgacggcgttggcgggaggaggaagaaggggatgaaggagaagatcaaggagaagctccccggcggagcccacaaggacgccaccgggcagcagcacacgccggcggccggcgagtacgccggcaccggcaccggcacccacggcgcggaggccaccggcgagaagaaaggcgtcatggacaagatcaaggagaagcttcccggcggacagcactaagttaagctaggcagctagcgatcgccctgtgctgtgtctgtgttcggtcaaagctcggtatcatgcgtacttctgcatgcgttcgtacggataaataatgggcgccgatcgaggtgccggagtatatatgttgtgtgtgtgacgtatttgtggaccccgtgtacatgtatttgtactgaagtgctaaaaccccatcgtaataaagcgctcgtttatatttgtgttttgt

SEQ ID NO: 61407 - protein, 143 aa, Triticum aestivum
  peptide (1)..(143): Ceres Seq. ID no. 13661683
MEYQGQTGHATDKVEEYGQPVAGHGGATDGPTGTHGAAAAAGTGQLQPTRDDHKTDGVLRRSGSSSSSSSEDDGVGGRRKKGMKEKIKEKLPGGAHKDATGQQHTPAAGEYAGTGTGTHGAEATGEKKGVMDKIKEKLPGGQH

SEQ ID NO: 61408 - protein, 111 aa, Triticum aestivum
  peptide (1)..(111): Ceres Seq. ID no. 13661684
IATRSSSILAQPYTSHITCRSTGARKARQWSTRGRPATPPTRWRSTASPWPGTAAPPTAPRGRTAPQPPRAPGSSSRPGTTTRPTVSCAAPAAPAPARLRTTALAGGGRRG

SEQ ID NO: 61409 - protein, 98 aa, Triticum aestivum
  peptide (1)..(98): Ceres Seq. ID no. 13661685
SQLAAVQYLHNHTHHTSPVDRPVHVRRDNGVPGADRPRHRQGGGVRPARGRARRRHRRPHGDARRRSRRGHRAAPADQGRPQDRRCPAPLRQLQLQLV

SEQ ID NO: 61410 - DNA, 1266 bp, Triticum aestivum
  misc_feature (1)..(1266): Ceres Seq. ID no. 15225256
gtctttcttcacatcctcaaacccaccctaatactcctcaaattatcactctcttagattagggatccaagtcggaaccctaatttgaatcgtcttgatttcgatcagttgtgtgcaaagggaggaaacatggattccgactcaaccgtgccactgagcgagcgcccggagtggtctgacgttgtcccgttgactcaggacgatggtccgaacccggtggttcggatcgcttacaaggaagacttccgcgagacgatggattacttccgggcgatttaccgctccgacgagcgttctgctcgcgcgctgcgactcacggaagaagctctccgcttaaactcgggcaactacaccgtaactgatccttcttcttttgccctagtactactgttcttaaagagttggatttgattagattgtaactttttgaaggtgtggcacttcaggcgcttagtactcgaggagcttaataacgacttgtatgaagagctcaagttcatcgaaagcattgctgaggataactctaagaactaccagttgtggcatcatcgacgatgggttgcagagaaactgggtcctgatgttgcaggaaaggaacttgagtttactcggagggtactatcacttgatgccaagcattatcatgcttggtcacataggcagtgggcgctacaagcattaggaggatgggaaaatgagcttaactactgccacgagctccttgaagctgacgtctttaacaactctgcatggaatcagaggtattacgttataactagatcaccttcgttgggaggcctagaagccatgagagaatctgaagtaagctacacagtcaaagccattttagcaaatcccgggaacgagagctcttggaggtacctgaaagccctttacaaagacgacacagagtcttggattagtgatccaagtgtttcctcagtctgtttgaaagttctctcacgcacggactgcttccatggattcgctctgagcacccttttggatcttctgtgcgatgggttgagaccaaccaacgagcatagagactcggtgaaagctctagctaatgaagaaccagagactaacttggccaatttggtgtgtaccattctgtgtcgtgttgatcctataagagctaactattgggcatggaggaagagcaagattacagtggcaatataaccacacttgagaaagttatttatttttacgttttaatctactgcttttttcatgaaacatgatgcatcaaaacaaatctcg

SEQ ID NO: 61411 - protein, 125 aa, Triticum aestivum
  peptide (1)..(125): Ceres Seq. ID no. 15225257
MRESEVSYTVKAILANPGNESSWRYLKALYKDDTESWISDPSVSSVCLKVLSRTDCFHGFALSTLLDLLCDGLRPTNEHRDSVKALANEEPETNLANLVCTILCRVDPIRANYWAWRKSKITVAI

SEQ ID NO: 61412 - protein, 93 aa, Triticum aestivum
  peptide (1)..(93): Ceres Seq. ID no. 15225258
MDSDSTVPLSERPEWSDVVPLTQDDGPNPVVRIAYKEDFRETMDYFRAIYRSDERSARALRLTEEALRLNSGNYTVTDPSSFALVLLFLKSWI

SEQ ID NO: 61413 - protein, 66 aa, Triticum aestivum
  peptide (1)..(66): Ceres Seq. ID no. 15225259
MKSSSSSKALLRITLRTTSCGIIDDGLQRNWVLMLQERNLSLLGGYYHLMPSIIMLGHIGSGRYKH

SEQ ID NO: 61414 - DNA, 1090 bp, Triticum aestivum
  misc_feature (1)..(1090): Ceres Seq. ID no. 13661438
gtttaagcccatttcggaataatgggccattagattaggcgcacctccttctagaaccctccagaaccttcctcctcccccaaccaaactaaatggtggtttgctaagcgttttctgcaccctagtgttgtggctatctacgatttcatatttttatgggacgaagaccttggggtggaaaattttgatccgaggaggtatattgatataatggtttccgaaggcttagaaatcacgcaacctgcattggatcctgatctatcaacagatattcaccaccgcatcacaatccgcaacaagatgacaaaagtgcataggagagtatatgacaatcgttcaagcatgaactgttctgatgatagtaaaggacctccatgcacagggtgggtcgagggcatggcaccagttttttctcgtgctgcctggaaatgtgtatggcatctaatacagaatgacttgattcatggatggggccttgacatgaagcttggttactgtgctcagggtgatcgagctgagaaggtcggtgtaattgacagtgagtatgtcgtccatcaagggataccatcattaggaggaccatcagataccagcaagttacctcgaagatctttggatttgcggacacacattagaagacagtcgtcggcggagctggaaaagttcaaagaacggtgggaaaaagccgtaagggaagacgatgagtggatggatccttttgacgcttgattactttggaagaaacatctgacatgaagatacaaggcccaccatacatgggtggatgcgtccacattcatcatggcgattggagtcgagatcatgtgggcctcatagcaaaacagttagttatatagccttataggcattttgctgactaacacacccccccctgccatcaagagctataagaacaagtgggaatgtcgtcgcgctaatacacggagaaactgagcaaggacctgtatactaccagtggctgacagacacagtatcttgtaatcttaattcgattctccaatcaccgaggttgtatagtgacaatgcatatatgtatgtgcagttatttttagtaataataagtatttat

SEQ ID NO: 61415 - protein, 172 aa, Triticum aestivum
  peptide (1)..(172): Ceres Seq. ID no. 13661439
MVSEGLEITQPALDPDLSTDIHHRITIRNKMTKVHRRVYDNRSSMNCSDDSKGPPCTGWVEGMAPVFSRAAWKCVWHLIQNDLIHGWGLDMKLGYCAQGDRAEKVGVIDSEYVVHQGIPSLGGPSDTSKLPRRSLDLRTHIRRQSSAELEKFKERWEKAVREDDEWMDPFDA

SEQ ID NO: 61416 - protein, 142 aa, Triticum aestivum
  peptide (1)..(142): Ceres Seq. ID no. 13661440
MTKVHRRVYDNRSSMNCSDDSKGPPCTGWVEGMAPVFSRAAWKCVWHLIQNDLIHGWGLDMKLGYCAQGDRAEKVGVIDSEYVVHQGIPSLGGPSDTSKLPRRSLDLRTHIRRQSSAELEKFKERWEKAVREDDEWMDPFDA

SEQ ID NO: 61417 - protein, 128 aa, Triticum aestivum
  peptide (1)..(128): Ceres Seq. ID no. 13661441
MNCSDDSKGPPCTGWVEGMAPVFSRAAWKCVWHLIQNDLIHGWGLDMKLGYCAQGDRAEKVGVIDSEYVVHQGIPSLGGPSDTSKLPRRSLDLRTHIRRQSSAELEKFKERWEKAVREDDEWMDPFDA

SEQ ID NO: 61418 - DNA, 933 bp, Triticum aestivum
  misc_feature (1)..(933): Ceres Seq. ID no. 13664213
aaacacagacgagaatcctctctcacagtctcttttcgtctcccatacacacactttctctctctatacccattcttcgtcttctacctcggcgacaccactagtagtcactcgcagagagaagtcgtcgaaaggagaacatcaaaaaagattttcggtgagaaggatcgagtgagagattcttcatcggctttagttgtctacacgtctgtgctcatgagccgacggcgactactgttatcggcgacaatactctcgtatttgctccacggaatggctctcgtctctgtcgtagcctccggcgtggaggaggttagagataacgtggatttgaccaaaacgaacgacgttagctacaacctctacgcatcggaagatgctacgtctctctcatgagacgagagtagagccggataggatcggagagaagtgcaagaagtcagacattgtggtgaaccaggcagcgaccgaacctatgcccaacggaatacccggttacaccgtggagatcacgaaccagtgcatgtctggatgcaacatctcgaggatccacgtcagctgcggttggttcagctccgttaagttggttaacccgagggttttcaagcgtattcactatgatgactgtctcgtcaacaacgggaagcctttgccttatggctctacgctctctttccactacgccaacactttcccttaccgtctcgctgtcgcattcgttacctgctcttgagaccggatcttttcctttcttatataggataagatgatagtagaaacatggcgggaggaaaattaagatacaggaagtatgattgatattaatcatattcataccacactcatcctcttttgggttattttcttctctttaggatgttaaatgtttttgagcaacagtgatatatatataaaagaatctatcaacctccc

SEQ ID NO: 61419 - protein, 131 aa, Triticum aestivum
  peptide (1)..(131): Ceres Seq. ID no. 15220292
KHRRESSLTVSFRLPYTHFLSLYPFFVFYLGDTTSSHSQREVVERRTSKKIFGEKDRVRDSSSALVVYTSVLMSRRRLLLSATILSYLLHGMALVSVVASGVEEVRDNVDLTKTNDVSYNLYASEDATSLS

SEQ ID NO: 61420 - protein, 118 aa, Triticum aestivum
  peptide (1)..(118): Ceres Seq. ID no. 15220293
MLRLSHETRVEPDRIGEKCKKSDIVVNQAATEPMPNGIPGYTVEITNQCMSGCNISRIHVSCGWFSSVKLVNPRVFKRIHYDDCLVNNGKPLPYGSTLSFHYANTFPYRLAVAFVTCS

SEQ ID NO: 61421 - protein, 85 aa, Triticum aestivum
  peptide (1)..(85): Ceres Seq. ID no. 15220294
MPNGIPGYTVEITNQCMSGCNISRIHVSCGWFSSVKLVNPRVFKRIHYDDCLVNNGKPLPYGSTLSFHYANTFPYRLAVAFVTCS

SEQ ID NO: 61422 - protein, 59 aa, Triticum aestivum
  peptide (1)..(59): Ceres Seq. ID no. 15220295
MSRRRLLLSATILSYLLHGMALVSVVASGVEEVRDNVDLTKTNDVSYNLYASEDATSLS

SEQ ID NO: 61423 - DNA, 839 bp, Triticum aestivum
  misc_feature (1)..(839): Ceres Seq. ID no. 13661767
atattcattctattcgcgtggttttgacgacgaagaagggaacaacgcataacgaagacgacgatgggtgaagccgtgaaggatggaagaaaagaagtgattcaggcttggtacatggatgatagccaagatgatcagcgacttcctcaccacaaggatcctaaagagtttatctctctcgacaaacttgcagagcttggagtccttagctggagacttgatgctgataactacgaaaccgatgaggagttgaaaaagatccgcgagtctcgtggttactcctacatggacttttgtgaggtatgcccagagaagcttccaaattatgaagagaaagtaaagagcttcttcgaggaacatctccacactgatgaagagatccgttactgcgttgcaggaagtggctactttgatgtgagggatcgcaacgaagcttggatcagagtttgggtgaagaagggaggaatgatagtcttgcctgctggaatttatcatcgcttcaccgtggattctgacaactatatcaaggcaatgcgtcttttcgtgggtgaaccggtgtggacaccatacaatcgtccacacgaccatcttcctgcaaggaaagaatatgttgataacttcgtgaagaaagccattaacgcctctgcttagagagcgcgctctctctcctgcttccaaaaataagagaggttctataataaacttggcctacaataaagagagatcttgaatcgataatatgcatgtggagaatgatggctttggtatgcatgtgttgtatacttattaataacactctgttcgtctttraragcctttttttmwgmaaaaaaaaaaaa

SEQ ID NO: 61424 - protein, 195 aa, Triticum aestivum
  peptide (1)..(195): Ceres Seq. ID no. 15220133
MGEAVKDGRKEVIQAWYMDDSQDDQRLPHHKDPKEFISLDKLAELGVLSWRLDADNYETDEELKKIRESRGYSYMDFCEVCPEKLPNYEEKVKSFFEEHLHTDEEIRYCVAGSGYFDVRDRNEAWIRVWVKKGGMIVLPAGIYHRFTVDSDNYIKAMRLFVGEPVWTPYNRPHDHLPARKEYVDNFVKKAINASA

SEQ ID NO: 61425 - protein, 178 aa, Triticum aestivum
  peptide (1)..(178): Ceres Seq. ID no. 15220134
MDDSQDDQRLPHHKDPKEFISLDKLAELGVLSWRLDADNYETDEELKKIRESRGYSYMDFCEVCPEKLPNYEEKVKSFFEEHLHTDEEIRYCVAGSGYFDVRDRNEAWIRVWVKKGGMIVLPAGIYHRFTVDSDNYIKAMRLFVGEPVWTPYNRPHDHLPARKEYVDNFVKKAINASA

SEQ ID NO: 61426 - protein, 121 aa, Triticum aestivum
  peptide (1)..(121): Ceres Seq. ID no. 15220135
MDFCEVCPEKLPNYEEKVKSFFEEHLHTDEEIRYCVAGSGYFDVRDRNEAWIRVWVKKGGMIVLPAGIYHRFTVDSDNYIKAMRLFVGEPVWTPYNRPHDHLPARKEYVDNFVKKAINASA

SEQ ID NO: 61427 - DNA, 973 bp, Triticum aestivum
  misc_feature (1)..(973): Ceres Seq. ID no. 13661768
gtttaaggtcactaaggtacaagaaaaaaataggaatcataatcacttcaaatctaaaattctcatcaagtctcttatataaacatctccactcctcaaaaatcacaaacaatgcctttaagttttggatcggtccctatcttggccgcggtggccatacaactcctccttatatccagcgtttcttccctcaacattaccaatgagtatctccaccacgcatgcaacaacacccaagggaaatacaagccagggagtgtgttcgaggaaaatctcaacattgccctcaaaaacatatccgcttttaatctgcaaaaaggttttgcccttgactccaatatgaatagaccctacaaaaatatacctcccgataccgccttcgtcatgctccagtgtcgtggcgactcctacgggtctaagtgtcactcatgcctcaccacagccctctctgggcttcgtaagaaatgtccgagaaacaaagcaggaacaatatggtatgaccaatgcactctggatatttctacattcagtgccggtgacagcagaatcctctatgatgattatttatgtataaccaacccaaaggacctgagcggagataagaagatgttcgataagaaaaagaaggatttcaccgataagctaatatctgaagccggcaagttgggaaacaacagcaaggggtcactgtacgctacgggagagacgatgatcgggacaaagaagctttatggaatgatgcaatgtacggacgagttatatgagaatggttgctctgtgtgtctagattggcttgtcttgcaacatccattctgcggcgatggaaaaaacggagttcgatatatgtgtagaagctgtaatgcaaggtttgagctttacccttttcttagaacttaatactgtttgatgggagctcttaatttgctttatgtttgaataagtactatatcaagaaataaaaattgttaacctt

SEQ ID NO: 61428 - protein, 261 aa, Triticum aestivum
  peptide (1)..(261): Ceres Seq. ID no. 15220136
MPLSFGSVPILAAVAIQLLLISSVSSLNITNEYLHHACNNTQGKYKPGSVFEENLNIALKNISAFNLQKGFALDSNMNRPYKNIPPDTAFVMLQCRGDSYGSKCHSCLTTALSGLRKKCPRNKAGTIWYDQCTLDISTFSAGDSRILYDDYLCITNPKDLSGDKKMFDKKKKDFTDKLISEAGKLGNNSKGSLYATGETMIGTKKLYGMMQCTDELYENGCSVCLDWLVLQHPFCGDGKNGVRYMCRSCNARFELYPFLRT

SEQ ID NO: 61429 - protein, 185 aa, Triticum aestivum
  peptide (1)..(185): Ceres Seq. ID no. 15220137
MNRPYKNIPPDTAFVMLQCRGDSYGSKCHSCLTTALSGLRKKCPRNKAGTIWYDQCTLDISTFSAGDSRILYDDYLCITNPKDLSGDKKMFDKKKKDFTDKLISEAGKLGNNSKGSLYATGETMIGTKKLYGMMQCTDELYENGCSVCLDWLVLQHPFCGDGKNGVRYMCRSCNARFELYPFLRT

SEQ ID NO: 61430 - protein, 170 aa, Triticum aestivum
  peptide (1)..(170): Ceres Seq. ID no. 15220138
MLQCRGDSYGSKCHSCLTTALSGLRKKCPRNKAGTIWYDQCTLDISTFSAGDSRILYDDYLCITNPKDLSGDKKMFDKKKKDFTDKLISEAGKLGNNSKGSLYATGETMIGTKKLYGMMQCTDELYENGCSVCLDWLVLQHPFCGDGKNGVRYMCRSCNARFELYPFLRT

SEQ ID NO: 61431 - DNA, 799 bp, Triticum aestivum
  misc_feature (1)..(799): Ceres Seq. ID no. 13661453
ctagaacatcctaatcgaaaaaacacccgactgagtgagagagcgctagcgaccggataaggtttcgcctaccagctgccaacggccagcctcgacgccggcgggggctggtccgaccacgcgcctctccgcctcccgtcgcagcctctctcccccgagtttcccttctgcccaagctgcaccttgctagcaaggatactgcgcactccgatctataatatcagctctctatagcgaccgtcgctgtcgcccacctttcgccctgtaggcaagaacaagacggcatggcttgtgacgagtgccgcggtccgaaccataaacagaaagattgccccacactaccctgtcacaactgtgggggaactcttcacacccgaggcacttgctgttacacggatcctgtttaccgcgttggagaaagatgtcccagatgtggtggttttcaacacggggtacccggcaagcccccctgcccagtccaagaagctcatgctcgcccgcctatgtgcccgcggtgtcaagtgccacatcgtccaagagactgccctcatcgtggagccgaatattccgggtggacaagctccgacagatgcacgcaatgcaatgaaactggtcattttttccccgactgccctaacaaatactagtactagtttctctgtatcttgttattgtagctcgtaagtttgtttgagtatttttcaagactattagcttagtggtttgcccattgttgatgtatattattaagcctgaaagcacttcaattctcagtatcttttaatatatagtattattt

SEQ ID NO: 61432 - protein, 120 aa, Triticum aestivum
  peptide (1)..(120): Ceres Seq. ID no. 13661454
MACDECRGPNHKQKDCPTLPCHNCGGTLHTRGTCCYTDPVYRVGERCPRCGGFQHGVPGKPPCPVQEAHARPPMCPRCQVPHRPRDCPHRGAEYSGWTSSDRCTQCNETGHFFPDCPNKY

SEQ ID NO: 61433 - protein, 64 aa, Triticum aestivum
  peptide (1)..(64): Ceres Seq. ID no. 13661455
MLARLCARGVKCHIVQETALIVEPNIPGGQAPTDARNAMKLVIFSPTALTNTSTSFSVSCYCSS

SEQ ID NO: 61434 - protein, 61 aa, Triticum aestivum
  peptide (1)..(61): Ceres Seq. ID no. 13661456
MSQMWWFSTRGTRQAPLPSPRSSCSPAYVPAVSSATSSKRLPSSWSRIFRVDKLRQMHAMQ

SEQ ID NO: 61435 - DNA, 1013 bp, Triticum aestivum
  misc_feature (1)..(1013): Ceres Seq. ID no. 13661769
accgcaatacaccactcaccccctcacgctctcgctcatcacccccccaacaactaactccaccaccacagtatcaatcagccatgggcgccacggaggattcctcctccggctccgagaccaccacctcgtcctcggtggaggccctggcctcgccgccgtccccgacggccaccaccgcgtcgtcgaagaagaagcggccgcgcaacgacgggcggcacccgacgtaccgcggggtgcgcatgcggagctggggcaagtgggtgtcggagattcgggagccccgcaagaagtcgcgcatctggctcggcaccttcgccaccgcggagatggcggcgcgcgcgcacgacgtggccgccctcgccatcaagggccgtgccgcgcacctcaacttccccgamctcgcccacgagctcccgcgcccggccaccgccgcgcccaaagacgtccaggcgggcgccgcactcgccgcctccgccgacttcccggcctctgccactgcagctgccaatgccggcgccaagaaccccgacggcccggaacacagcggcgcctccgcctctgcctccgcctctgcctctgcctctgcctcgccgccgcctgacaccgctgaggatgcgctgttcgacctccccgacctcctcttcgacctcagacacggccctccgtcctgccagctttcgtgcgcctcctcgtgggacgacgacgtggccttcgccggccctggcgccggcgtgttccgcctggaggagccgctgcagtgggagtactaaagccaggcgccaactcgctcagtcaccggtgccatcaaaccgcgccgccgctgcatgcatgtatggctcgttcgtttccacatcgggccggaaatcatttcgaaaccattggagaaccaaaagaaggaagcaaaaccactggagtactactaaatttaggagtgagaccatgtacaaattggggttagccttgtgttctttatcataaaaaaaaaaaaaaaaaagcttatcgataccgtc

SEQ ID NO: 61436 - protein, 256 aa, Triticum aestivum
  peptide (1)..(256): Ceres Seq. ID no. 15220139
  misc_feature (133)..(133): Xaa is any aa, unknown or other
RNTPLTPSRSRSSPPQQLTPPPQYQSAMGATEDSSSGSETTTSSSVEALASPPSPTATTASSKKKRPRNDGRHPTYRGVRMRSWGKWVSEIREPRKKSRIWLGTFATAEMAARAHDVAALAIKGRAAHLNFPXLAHELPRPATAAPKDVQAGAALAASADFPASATAAANAGAKNPDGPEHSGASASASASASASASPPPDTAEDALFDLPDLLFDLRHGPPSCQLSCASSWDDDVAFAGPGAGVFRLEEPLQWEY

SEQ ID NO: 61437 - protein, 229 aa, Triticum aestivum
  peptide (1)..(229): Ceres Seq. ID no. 15220140
  misc_feature (106)..(106): Xaa is any aa, unknown or other
MGATEDSSSGSETTTSSSVEALASPPSPTATTASSKKKRPRNDGRHPTYRGVRMRSWGKWVSEIREPRKKSRIWLGTFATAEMAARAHDVAALAIKGRAAHLNFPXLAHELPRPATAAPKDVQAGAALAASADFPASATAAANAGAKNPDGPEHSGASASASASASASASPPPDTAEDALFDLPDLLFDLRHGPPSCQLSCASSWDDDVAFAGPGAGVFRLEEPLQWEY

SEQ ID NO: 61438 - protein, 200 aa, Triticum aestivum
  peptide (1)..(200): Ceres Seq. ID no. 15220141
  misc_feature (134)..(134): Xaa is any aa, unknown or other
PQYTTHPLTLSLITPPTTNSTTTVSISHGRHGGFLLRLRDHHLVLGGGPGLAAVPDGHHRVVEEEAAAQRRAAPDVPRGAHAELGQVGVGDSGAPQEVAHLARHLRHRGDGGARARRGRPRHQGPCRAPQLPRXRPRAPAPGHRRAQRRPGGRRTRRLRRLPGLCHCSCQCRRQEPRRPGTQRRLRLCLRLCLCLCLAAA

SEQ ID NO: 61439 - DNA, 1012 bp, Triticum aestivum
  misc_feature (1)..(1012): Ceres Seq. ID no. 13598179
tcgctcgttgtctctcccgtctcaggtcgccatcgaagcaccagtagcaggaactccttaacgccccagcgtgagatcgcgagattgtttgtagcttgatcgaggcagggaagaccggaagaggatgatgcagtcgccgtcgcagcaccagtcctcctactacgccgtgctcggcgtccacccaggcgcgtcctccgccgagatacgcgccgcgtaccaccgcctcgccatgaggtggcacccggataagattgccaatggccgtgtggatccggcgatcgcggaggaagccaagggaaggttccagaagatacacgaggcataccaggtgttgtcggatcagaagcggagggagctctatgacgccgggatgtacgaccccctcgacgacgaccaagaagaggtcgagggcttccatgatttccttcaggagatgctctcgctcatggccaccgttggtagagaggagcccgtatattccctgggcgaactccaatccatgcttgacgggatgatgcaggatttcacctccccccagccgccgccaccaagcagcttcttcagcagcaccagttcgtcgacgcggttcggcgcacccagcggcggagcgcagcagcagcgtcgacccccctcacgcgtacggcctcaggggttcggcagctcggcatgcttcagccagacggctttctccggctgctaagcacctgcgcgatctgcatcgcagttcatgcgtccgtggggatcaccggcgtgaagacgctgagttgcagagactgggagagacagggaacgtcgagcgctctagcgatgcacacggcgggagccggtactgtacatcacccactggatgagcggaataaagaagacggtagatatttctagttgacagcaactcgaaaggatttccattgttagtttttcttagatagatcgtaggtgtacatagatgagaacagaagtgaagacatgatgttttgcactgtggtgtgtatttacttcaaaagcaagcacg

SEQ ID NO: 61440 - protein, 191 aa, Triticum aestivum
  peptide (1)..(191): Ceres Seq. ID no. 13598180
MMQSPSQHQSSYYAVLGVHPGASSAEIRAAYHRLAMRWHPDKIANGRVDPAIAEEAKGRFQKIHEAYQVLSDQKRRELYDAGMYDPLDDDQEEVEGFHDFLQEMLSLMATVGREEPVYSLGELQSMLDGMMQDFTSPQPPPPSSFFSSTSSSTRFGAPSGGAQQQRRPPSRVRPQGFGSSACFSQTAFSGC

SEQ ID NO: 61441 - protein, 190 aa, Triticum aestivum
  peptide (1)..(190): Ceres Seq. ID no. 13598181
MQSPSQHQSSYYAVLGVHPGASSAEIRAAYHRLAMRWHPDKIANGRVDPAIAEEAKGRFQKIHEAYQVLSDQKRRELYDAGMYDPLDDDQEEVEGFHDFLQEMLSLMATVGREEPVYSLGELQSMLDGMMQDFTSPQPPPPSSFFSSTSSSTRFGAPSGGAQQQRRPPSRVRPQGFGSSACFSQTAFSGC

SEQ ID NO: 61442 - protein, 156 aa, Triticum aestivum
  peptide (1)..(156): Ceres Seq. ID no. 13598182
MRWHPDKIANGRVDPAIAEEAKGRFQKIHEAYQVLSDQKRRELYDAGMYDPLDDDQEEVEGFHDFLQEMLSLMATVGREEPVYSLGELQSMLDGMMQDFTSPQPPPPSSFFSSTSSSTRFGAPSGGAQQQRRPPSRVRPQGFGSSACFSQTAFSGC

SEQ ID NO: 61443 - DNA, 1085 bp, Triticum aestivum
  misc_feature (1)..(1085): Ceres Seq. ID no. 13598140
gccaaattatttttgcctgagtcgcactcgcacgcagccttccttcctacctccaccccgcagtagtagcagcagctccatcaccatctcccccctgcttccttcctcggatcggagggggagagcgaccggccgaccaggaggaagcggcggcaggatgagtctcttcggcctcggacggaatcagaagactttccgttccaagaaaagtgctccatcaggcagcaagggggcacagctccgaaagcacatagatgcaaccctcggtagtggaaaccttagggaagctgtgaggctgccttctggagaggatatcaatgaatggcttgctgttaacactgtggacttctttaatcaagttaacctgctgtatggcacactcacagagttctgcacatccgaaagctgcccaacaatgactgcaggcccaaagtatgagtaccgatgggctgatggtgtacagataaagaagcccatagaagtgtcagcaccaaaatacgtggagtacctaatggactggattgaaggccagcttgacaatgaatccttatttcctcagaagcttggcacaccatttccacccaacttcaaggatgttgtaaacacaattttcaagcgcttgtttcgtgtttatgcccacatatatcactcccattttcagaagattgtcagcctcaaggaggaggctcatcttaacacctgcttcaagcacttcattctgtttacgaacgaatttgggctgattgacaagaaagaactggctcccctccaggagctcatcgaatcaatcatcgttccatactgagaaggaaacactgaggctgaaccgaactaaacatggctgctactgagtcttctacaggaatggtcgagcgattgggctatctgcgccaataatttactggcacaaatcttcttgttccatttctttgacataaaaacacaaaaacatgtatattaccagtgatgtatttgtgtgtacatgttcagcagttctcctgtgcaaacgcgattgtactgctataacatgcatgtttgggttcggttgtgatagtaataacattgaaaagggcagttttaagatg

SEQ ID NO: 61444 - protein, 267 aa, Triticum aestivum
  peptide (1)..(267): Ceres Seq. ID no. 13598141
PNYFCLSRTRTQPSFLPPPRSSSSSSITISPLLPSSDRRGRATGRPGGSGGRMSLFGLGRNQKTFRSKKSAPSGSKGAQLRKHIDATLGSGNLREAVRLPSGEDINEWLAVNTVDFFNQVNLLYGTLTEFCTSESCPTMTAGPKYEYRWADGVQIKKPIEVSAPKYVEYLMDWIEGQLDNESLFPQKLGTPFPPNFKDVVNTIFKRLFRVYAHIYHSHFQKIVSLKEEAHLNTCFKHFILFTNEFGLIDKKELAPLQELIESIIVPY

SEQ ID NO: 61445 - protein, 215 aa, Triticum aestivum
  peptide (1)..(215): Ceres Seq. ID no. 13598142
MSLFGLGRNQKTFRSKKSAPSGSKGAQLRKHIDATLGSGNLREAVRLPSGEDINEWLAVNTVDFFNQVNLLYGTLTEFCTSESCPTMTAGPKYEYRWADGVQIKKPIEVSAPKYVEYLMDWIEGQLDNESLFPQKLGTPFPPNFKDVVNTIFKRLFRVYAHIYHSHFQKIVSLKEEAHLNTCFKHFILFTNEFGLIDKKELAPLQELIESIIVPY

SEQ ID NO: 61446 - DNA, 774 bp, Triticum aestivum
  misc_feature (1)..(774): Ceres Seq. ID no. 13661770
agataaggaaagctctggttctgcgcacaagctccaaccaaattccgactcctctgcgcagaccaatcaccaatgcctgggcctccttccaccatgtccctgccgaggccgagcaggtgctaccgctgctgctcgtcgtcgacgccgccgccgccgaagcagcgagccgcggagagcaagcggcggcctatccgcggagcgcggctgctgctgacccggagggcgctggcgggcgctgtggcgacggtgacgttggcggtggcgggccgtgccagggcggcggaggagggcggcgagggggtggtgggcgcgttcaagtcgctgttcgacccgaacgaggagaccaaggccgggaaggtgctgcccaaggcgtacctgaaggcggcgcgggaggtggtgcggacgctccgggagtcgctgggggagggcgacgccgccggcgactcggccagcttccgcaggggcgccgactccgccaagacgtccatccgagagttcctcggcggctggagaggccagcccgccgtcgccaaagaggagtcgtatgtggcgctggagaaggccatcaaatcgctggctgagttctactccaaggcagggcccttcgcctcgcttccgggagatgtcaaaaacaagatcctcgacgacctcaacgccgcagaggcctacctctaggtctctttgcttagcggcattgtattttccggcgtaaattcgttatacttgtgtccttttgttgcgacgttatgatgagtaaataataattgacatggt

SEQ ID NO: 61447 - protein, 200 aa, Triticum aestivum
  peptide (1)..(200): Ceres Seq. ID no. 13661771
MPGPPSTMSLPRPSRCYRCCSSSTPPPPKQRAAESKRRPIRGARLLLTRRALAGAVATVTLAVAGRARAAEEGGEGVVGAFKSLFDPNEETKAGKVLPKAYLKAAREVVRTLRESLGEGDAAGDSASFRRGADSAKTSIREFLGGWRGQPAVAKEESYVALEKAIKSLAEFYSKAGPFASLPGDVKNKILDDLNAAEAYL

SEQ ID NO: 61448 - protein, 193 aa, Triticum aestivum
  peptide (1)..(193): Ceres Seq. ID no. 13661772
MSLPRPSRCYRCCSSSTPPPPKQRAAESKRRPIRGARLLLTRRALAGAVATVTLAVAGRARAAEEGGEGVVGAFKSLFDPNEETKAGKVLPKAYLKAAREVVRTLRESLGEGDAAGDSASFRRGADSAKTSIREFLGGWRGQPAVAKEESYVALEKAIKSLAEFYSKAGPFASLPGDVKNKILDDLNAAEAYL

SEQ ID NO: 61449 - protein, 192 aa, Triticum aestivum
  peptide (1)..(192): Ceres Seq. ID no. 13661773
IRKALVLRTSSNQIPTPLRRPITNAWASFHHVPAEAEQVLPLLLVVDAAAAEAASRGEQAAAYPRSAAAADPEGAGGRCGDGDVGGGGPCQGGGGGRRGGGGRVQVAVRPERGDQGREGAAQGVPEGGAGGGADAPGVAGGGRRRRRLGQLPQGRRLRQDVHPRVPRRLERPARRRQRGVVCGAGEGHQIAG

SEQ ID NO: 61450 - DNA, 971 bp, Triticum aestivum
  misc_feature (1)..(971): Ceres Seq. ID no. 13662063
agtcgtctcccctgtccccctcgtcctcctcccgcaatccaatcacggggacgggtgagcagcgagcgagcgagcgggatggcgacgctgacctcggagctgctgcggccggtgcacgcggcgcaggcgctggacgaggcggcgctgctgcgctacgcggccgcgcacgtcccgggcttccccacgcccgcgccggcgctcgccctcacgcagttcggccacggccagtccaaccccacctactgcatccaggcctccgcgcccggcggggagcccaggcgctacgtgctgcggaagaagcccgccggcgccatcctccagtccgcccacgccgtcgagcgcgagttccaggttctcaaagctttgggtgcctacacggatgttcctgtccctaaggtgttttgcctttgcactgatgccagtgtgatcggaaccccattctacataatggagtatctggaaggagcattatatcttaataacaagttaacgggagtaaccccagagaaacggaggaatatatacttggctgctgcaaaaactttggctgctgtacacaaaattgatacgactgcagttggattgcataagtatggaagaagagacaattattgcaaaagacaagtagaaagatggggaaaacaatatcttcattcaaccggtgaagggaagcctgcacgttatcagaagatgcttgatctgattggttggctgaaagaaaatataccagaagaagattcatcgacaggattgggaactggccttgttcatggtgattatcgtgttgataaccttgtttttcacccaactgaggatcgagtgataggtgtacttgattgggaattatctactttggggaatcagatgtgtgatgttgcttacagctgtatggtatgaaatatgaaactgtattagggaaaatgtgaaataccttcttatacataatattgttggaaattattcacctattt

SEQ ID NO: 61451 - protein, 298 aa, Triticum aestivum
  peptide (1)..(298): Ceres Seq. ID no. 13662064
SRLPCPPRPPPAIQSRGRVSSERASGMATLTSELLRPVHAAQALDEAALLRYAAAHVPGFPTPAPALALTQFGHGQSNPTYCIQASAPGGEPRRYVLRKKPAGAILQSAHAVEREFQVLKALGAYTDVPVPKVFCLCTDASVIGTPFYIMEYLEGALYLNNKLTGVTPEKRRNIYLAAAKTLAAVHKIDTTAVGLHKYGRRDNYCKRQVERWGKQYLHSTGEGKPARYQKMLDLIGWLKENIPEEDSSTGLGTGLVHGDYRVDNLVFHPTEDRVIGVLDWELSTLGNQMCDVAYSCMV

SEQ ID NO: 61452 - protein, 272 aa, Triticum aestivum
  peptide (1)..(272): Ceres Seq. ID no. 13662065
MATLTSELLRPVHAAQALDEAALLRYAAAHVPGFPTPAPALALTQFGHGQSNPTYCIQASAPGGEPRRYVLRKKPAGAILQSAHAVEREFQVLKALGAYTDVPVPKVFCLCTDASVIGTPFYIMEYLEGALYLNNKLTGVTPEKRRNIYLAAAKTLAAVHKIDTTAVGLHKYGRRDNYCKRQVERWGKQYLHSTGEGKPARYQKMLDLIGWLKENIPEEDSSTGLGTGLVHGDYRVDNLVFHPTEDRVIGVLDWELSTLGNQMCDVAYSCMV

SEQ ID NO: 61453 - protein, 149 aa, Triticum aestivum
  peptide (1)..(149): Ceres Seq. ID no. 13662066
MEYLEGALYLNNKLTGVTPEKRRNIYLAAAKTLAAVHKIDTTAVGLHKYGRRDNYCKRQVERWGKQYLHSTGEGKPARYQKMLDLIGWLKENIPEEDSSTGLGTGLVHGDYRVDNLVFHPTEDRVIGVLDWELSTLGNQMCDVAYSCMV

SEQ ID NO: 61454 - DNA, 634 bp, Triticum aestivum
  misc_feature (1)..(634): Ceres Seq. ID no. 12624607
ccgaccctagcgacgcacctcaatggccatggccgcacgcccacgcggctcgccgctcctccgcgccctcgccggcacgagggggccgccgcgggcccgatccatccacgaggggcccgacaccatccacgagctcctggaccgccacctctccaagaagtcccccgccctcgacgacgacgcggcggaggccctggcgcggcggcggctgacgagctcgcggcgggaggcgctggggctgtaccgggacatcctgcgggcgacgcggctgttcgagtggcccgacgagcgcggcgtgccgtggcgcgacacgctgcgcgccaacgcgcgccgcgagttcgaggaggcccgcggcgagcgcgacccggaggtggtcgcgcggctcctcatcggcggccgcgacgcagtcgaccaggccctggagcgcgtcgccgacgcctcgcgccgcatggtccaggccgaggaggccaagcgccgcggcggggcgtagatccccccacacccccaccccgactcgatgcgccccatgcttcctcttcttcttcttcagctgctgctgcttatgtttgttaatttttgttgtaaaatttactatgtacgaaatgagttacttatgaagcatttcttccttgtc

SEQ ID NO: 61455 - protein, 190 aa, Triticum aestivum
  peptide (1)..(190): Ceres Seq. ID no. 12624608
PTLATHLNGHGRTPTRLAAPPRPRRHEGAAAGPIHPRGARHHPRAPGPPPLQEVPRPRRRRGGGPGAAAADELAAGGAGAVPGHPAGDAAVRVARRARRAVARHAARQRAPRVRGGPRRARPGGGRAAPHRRPRRSRPGPGARRRRLAPHGPGRGGQAPRRGVDPPTPPPRLDAPHASSSSSSAAAAYVC

SEQ ID NO: 61456 - protein, 155 aa, Triticum aestivum
  peptide (1)..(155): Ceres Seq. ID no. 12624609
MAMAARPRGSPLLRALAGTRGPPRARSIHEGPDTIHELLDRHLSKKSPALDDDAAEALARRRLTSSRREALGLYRDILRATRLFEWPDERGVPWRDTLRANARREFEEARGERDPEVVARLLIGGRDAVDQALERVADASRRMVQAEEAKRRGGA

SEQ ID NO: 61457 - protein, 153 aa, Triticum aestivum
  peptide (1)..(153): Ceres Seq. ID no. 12624610
MAARPRGSPLLRALAGTRGPPRARSIHEGPDTIHELLDRHLSKKSPALDDDAAEALARRRLTSSRREALGLYRDILRATRLFEWPDERGVPWRDTLRANARREFEEARGERDPEVVARLLIGGRDAVDQALERVADASRRMVQAEEAKRRGGA

SEQ ID NO: 61458 - DNA, 851 bp, Triticum aestivum
  misc_feature (1)..(851): Ceres Seq. ID no. 12624185
acaggcaagcttagtaaccagccatgaagaccatgaagagatgcattattcctagcatcctgctgatgcattcactcgaggccgtcctcctcgtcgccgccggccgcccttccacggccaccggcgccgacgatgtgggcaccattctcctgccgagccaaggcaaaggtgaccatgccatcattttcttttcctagttcacttcagttcagttagctagctggtgcatgaggaaactggtcacagcttgggtcgttaactgaggacttgcaggcgaagcaggagtggtggcggcagcgaagaagaagggggaagaggaagagaggccatggaaatgctgcgactttgctctgtgcaccaggtcattcccaccgctgtgccgctgcatggacaaggtcgagcagtgtgctgcgacctgcgagaaatgcgagccggccacgtcggactcatcccgccgcgtctgcaacgactggtaccatggcttcccggggcccatgtgcacggaggctgttgcaacagcgaagaaggagaaggcggaagaagaagagaggccgtggaaatgctgtgacttggctctgtgcaccaggtcgttcccgccgatgtgccgctgcctggacaaggtcgagcagtgtgccgcaaactgcaagagctgcgatccggccgcgtcggactcgtcccgccgcgtctgcaacgactggtaccatggcttccccggcgccaagtgcaccgccgacggtaactagcatgcgcgttgatcacctgatcaacgccgtccagcctgagctttagtagctgcagcagcctgcagtgtctgtaagcaacaaaataaaatggaaagtcaggcaatcacg

SEQ ID NO: 61459 - protein, 118 aa, Triticum aestivum
  peptide (1)..(118): Ceres Seq. ID no. 12624186
MDKVEQCAATCEKCEPATSDSSRRVCNDWYHGFPGPMCTEAVATAKKEKAEEEERPWKCCDLALCTRSFPPMCRCLDKVEQCAANCKSCDPAASDSSRRVCNDWYHGFPGAKCTADGN

SEQ ID NO: 61460 - protein, 103 aa, Triticum aestivum
  peptide (1)..(103): Ceres Seq. ID no. 12624187
MASRGPCARRLLQQRRRRRRKKKRGRGNAVTWLCAPGRSRRCAAAWTRSSSVPQTARAAIRPRRTRPAASATTGTMASPAPSAPPTVTSMRVDHLINAVQPEL

SEQ ID NO: 61461 - protein, 82 aa, Triticum aestivum
  peptide (1)..(82): Ceres Seq. ID no. 12624188
MCTEAVATAKKEKAEEEERPWKCCDLALCTRSFPPMCRCLDKVEQCAANCKSCDPAASDSSRRVCNDWYHGFPGAKCTADGN

SEQ ID NO: 61462 - DNA, 1080 bp, Triticum aestivum
  misc_feature (1)..(1080): Ceres Seq. ID no. 13661672
agaacatcctaatcgaaaaaaccagacacagagcttgagagagagagagagaagatggcgtacaacgcgtgtttcctacatcagagcgcactagcctcctcctccgtcgcaagatcatcaccttcctcatcatcccagcgctacgtgtcactctctaaactagtctgcaaagcacaacagactcaagaagacgatacctccaccgtctctcgccgtctcgctctcgcacttctcgtcggcgccgctgcggttggttccaaagtgtctcccgccgatgctgcctacggtgaagctgcaaatgtgtttgggaagccaaagacaaacacagacttcactgcgtacaatggagatggattccaagtgcaggtgccagctaagtggaacccaagcagagaggtagagtatccaggacaagtccttaggtacgaagacaactttgacgctactagcaatctcaatgtcatggtcactcctaccgacaagaagtccatcactgattacggttctcctgaagagttcctctctcaggtcaactatcttctcgggaaacaagcgtacttcggtgagactgcctctgagggaggctttgacaacaatgcagtggcaacagcaaacattctggagacaaacattcaggacgttggtgggaaaccatactattacttgtcggtgttgacaagaacagccgatggagatgaaggtggtaagcatcagctgatcacagccaccgtgaatggagggaagctttatatctgcaaagcacaagctggagacaagaggtggttcaagggagccaataaatttgtggagaaagcagccatttctttcagtgttgcttgattaaaaaagctgcacaacagaagaactatatgctctgcttgttgttatcttcatttgtctcttgtaaagaatggaaaaatgaaacttagcttctgagaactatcaagatggtgatgttacctttgcggctttttcaaaattatattcggtagatctttgctcattagtataatggttgctcaaactaaagacactgactcaagaaaaagctatagactaattctaaatccttgaaaacct

SEQ ID NO: 61463 - protein, 261 aa, Triticum aestivum
  peptide (1)..(261): Ceres Seq. ID no. 13661673
MAYNACFLHQSALASSSVARSSPSSSSQRYVSLSKLVCKAQQTQEDDTSTVSRRLALALLVGAAAVGSKVSPADAAYGEAANVFGKPKTNTDFTAYNGDGFQVQVPAKWNPSREVEYPGQVLRYEDNFDATSNLNVMVTPTDKKSITDYGSPEEFLSQVNYLLGKQAYFGETASEGGFDNNAVATANILETNIQDVGGKPYYYLSVLTRTADGDEGGKHQLITATVNGGKLYICKAQAGDKRWFKGANKFVEKAAISFSVA

SEQ ID NO: 61464 - DNA, 869 bp, Triticum aestivum
  misc_feature (1)..(869): Ceres Seq. ID no. 13661512
atcgaaaaaccacaaaagctctgtttctcatatctcctctctgttttcatcagatatctaaagacagcgtttgatttcaacagctatggtgagaatcttccttctctacaatctcttaaactcttttctcctctctttagtaccaaagaagctacgaagtctcttccctctctcttggttcgacaaaactccccacaagarctcatccatgttaccatctccctcaccatcctctgctccaacgagaaaaacagatccctccgagctgaaacgcgttttccagaccttcgacaagaacggagacggccgaatcaccaaaaccgagctcaacgactcgctagagaatcttggaatctacataccagacaaagacctcactcagatgatccacaacatcgacgccaacggcgatgggtgcgtggacatagacgagttcgagtccctgtacagctccatcgtcgatgagcatcgcaaggatggagaaacagaggaagatgacatgaaagacgcgtttaacgtgtttgaccaggacggagatggtttcatcactgtggaggagttgaagtctgtgatgggttccttgggactcaagcaaggtaaaacattggaaggctgcaagaagatgattatgcaagtggatggtgatggagatggtagagtcaattacaaagagtttcttcagatgatgagaggtggtggttttagctgcagtaataactgatctttatttaggatttaacgtaagagtgtgtgtgtttatttgtttaacttgtttgttttcctttttatgtgtaaatattttttttttttgatgatgcatcaagtgtgtaattttttttttcctttttaggatttctctaaggttatgt

SEQ ID NO: 61465 - protein, 211 aa, Triticum aestivum
  peptide (1)..(211): Ceres Seq. ID no. 15220107
  misc_feature (39)..(39): Xaa is any aa, unknown or other
MVRIFLLYNLLNSFLLSLVPKKLRSLFPLSWFDKTPHKXSSMLPSPSPSSAPTRKTDPSELKRVFQTFDKNGDGRITKTELNDSLENLGIYIPDKDLTQMIHNIDANGDGCVDIDEFESLYSSIVDEHRKDGETEEDDMKDAFNVFDQDGDGFITVEELKSVMGSLGLKQGKTLEGCKKMIMQVDGDGDGRVNYKEFLQMMRGGGFSCSNN

SEQ ID NO: 61466 - protein, 170 aa, Triticum aestivum
  peptide (1)..(170): Ceres Seq. ID no. 15220108
MLPSPSPSSAPTRKTDPSELKRVFQTFDKNGDGRITKTELNDSLENLGIYIPDKDLTQMIHNIDANGDGCVDIDEFESLYSSIVDEHRKDGETEEDDMKDAFNVFDQDGDGFITVEELKSVMGSLGLKQGKTLEGCKKMIMQVDGDGDGRVNYKEFLQMMRGGGFSCSNN

SEQ ID NO: 61467 - protein, 154 aa, Triticum aestivum
  peptide (1)..(154): Ceres Seq. ID no. 15220109
  misc_feature (67)..(67): Xaa is any aa, unknown or other
IEKPQKLCFSYLLSVFIRYLKTAFDFNSYGENLPSLQSLKLFSPLFSTKEATKSLPSLLVRQNSPQXLIHVTISLTILCSNEKNRSLRAETRFPDLRQERRRPNHQNRAQRLARESWNLHTRQRPHSDDPQHRRQRRWVRGHRRVRVPVQLHRR

SEQ ID NO: 61468 - DNA, 1060 bp, Triticum aestivum
  misc_feature (1)..(1060): Ceres Seq. ID no. 13661778
actagcttccagcgcacacttgtcaccttcctccccgcaacgcatccagctaccccgtctcactcccgacccatcccaccagcaccaggacagacacggacaggacgatggagtcacccatggcggcccggaggctcctgcaggaggcggcgggcctgtccacgccgggcgcccggatcatcgccgacgacagggacatcgtcatcatcctcgcctcgctgctctgcgcgctcatcaccgtcctcggcatcggcctcgtcgcccgctggtgcgcgtgcggcggcgcggaagccagggcgcgcgccgccgccaaccngggcgtcaagaagtcggtgctccgcgccatccccaccgtcgcctacgtctccgccgacgccggcaagggcaagggcaaggaggcagaggaggccgccgcggcgccggagtgcgccatctgcctcgccgagttcgaggacggcgaggccatgcgcgtgctgccccagtgcggccacgccttccacgccgcctgcgtcgacaagtggctgcgcggccactcttcttgcccctcctgccgccggatcctcgccgtccagctgccggctgcccagcggtgccagcgctgcggcgcgcgccccgacccagccgtggcgacctggaagcctccggcccagtacggcgagatgccgcccttcttgccgtagcggctcgcgcgcgcgctcgatctccacagatctgggcgagagctagaagacgactagtagcagaggaaccagtcaaccaatcgatgagccttctgtttggtcaaatatctcggctgcttctcttaattaccttcctttgtttatctcatcatcagtagcagttcttcttaccgccgagctggaaatgcatagcatttctgaatttaggaccctggtatgcaggtgggtggtgatcaaggtgttgccactacatcttagcagctttgtacatttgtaaatagtaactataattactcctaaggagtaatcggcatcatcgattaggcttatctgaaactgtgaatacctttgctttccatgaatccatttggtcaattctg

SEQ ID NO: 61469 - protein, 278 aa, Triticum aestivum
  peptide (1)..(278): Ceres Seq. ID no. 13661779
  misc_feature (105)..(105): Xaa is any aa, unknown or other
LASSAHLSPSSPQRIQLPRLTPDPSHQHQDRHGQDDGVTHGGPEAPAGGGGPVHAGRPDHRRRQGHRHHPRLAALRAHHRPRHRPRRPLVRVRRRGSQGARRRQXGRQEVGAPRHPHRRLRLRRRRQGQGQGGRGGRRGAGVRHLPRRVRGRRGHARAAPVRPRLPRRLRRQVAARPLFLPLLPPDPRRPAAGCPAVPALRRAPRPSRGDLEASGPVRRDAALLAVAARARARSPQIWARARRRLVAEEPVNQSMSLLFGQISRLLLLITFLCLSHHQ

SEQ ID NO: 61470 - protein, 241 aa, Triticum aestivum
  peptide (1)..(241): Ceres Seq. ID no. 13661780
  misc_feature (106)..(106): Xaa is any aa, unknown or other
TSFQRTLVTFLPATHPATPSHSRPIPPAPGQTRTGRWSHPWRPGGSCRRRRACPRRAPGSSPTTGTSSSSSPRCSARSSPSSASASSPAGARAAARKPGRAPPPTXASRSRCSAPSPPSPTSPPTPARARARRQRRPPRRRSAPSASPSSRTARPCACCPSAATPSTPPASTSGCAATLLAPPAAGSSPSSCRLPSGASAAARAPTQPWRPGSLRPSTARCRPSCRSGSRARSISTDLGES

SEQ ID NO: 61471 - protein, 190 aa, Triticum aestivum
  peptide (1)..(190): Ceres Seq. ID no. 13661781
  misc_feature (70)..(70): Xaa is any aa, unknown or other
MESPMAARRLLQEAAGLSTPGARIIADDRDIVIILASLLCALITVLGIGLVARWCACGGAEARARAAANXGVKKSVLRAIPTVAYVSADAGKGKGKEAEEAAAAPECAICLAEFEDGEAMRVLPQCGHAFHAACVDKWLRGHSSCPSCRRILAVQLPAAQRCQRCGARPDPAVATWKPPAQYGEMPPFLP

SEQ ID NO: 61472 - DNA, 678 bp, Triticum aestivum
  misc_feature (1)..(678): Ceres Seq. ID no. 13598194
gtttttgagaggcttctggaaatccgtggtgtagtaagcggctaggcggtagccaccgatgcctgcgacgccggcggccagccccgggtgcgctgggctgccggcgcaacctccgacgagctcactccccggatttgaaggcccccctagccggctgggcgttcggaggccggcatgggtcgtccgcaccgagtctaatgttaggagagaaagaccaaaacgacctgatcctccatgcaccatctgcaaaggcactgggacaataaattgccgcaactgtttcggtagaggaagaataaatcatgtcgatctcgccgtgctccccaagggagaatggccgcaatggtgccaaatatgcgggggtagcggcctagattactgccaccggtgccatggaacaggtgaatatcgagaacccatgggctttcacttcacagtcaataggaaatgagtgtcgcacaggcagtgttggaaggccggccaagtcaaatggtcaggaaaaaaaaatgtcccattgaggccataggattaacatttgaatgagctgtgtgaagttactgtgaaaactttgatcttatgctaatgctgcagaattttcttgccagcaaagaaacattagatgtagattatgatcagaggctaagggtcttcagttttatcaaccggctaaatttgtgt

SEQ ID NO: 61473 - protein, 130 aa, Triticum aestivum
  peptide (1)..(130): Ceres Seq. ID no. 13598195
MPATPAASPGCAGLPAQPPTSSLPGFEGPPSRLGVRRPAWVVRTESNVRRERPKRPDPPCTICKGTGTINCRNCFGRGRINHVDLAVLPKGEWPQWCQICGGSGLDYCHRCHGTGEYREPMGFHFTVNRK

SEQ ID NO: 61474 - DNA, 1017 bp, Triticum aestivum
  misc_feature (1)..(1017): Ceres Seq. ID no. 13661548
gtcaacaattcatcgttgagacacgactcgaggcaccaaaacgccacacttcttctcgaaacatccatccagcctcgtcgccggcgacctcacccgccgccgcagccgccgccgaagatgccggtcagggtggtcgacaccgccaccccttcctcgcagtcctcatcaggacaagaggcaaatgctgtgcagccgtctcctcctagctgctcactcttaactgctggaagatgttttgcaggaactcagaatgtttcaagtttacaaaaagatgaagcatggaaagtcaatgttcgtatccatggttgtgatattgaacagggttatttatgtggaacaatggaggcacttaatgttcccttagccgacacacctgtggtgacattctgggagggggagatagtagatgctaaaaattataccttttttactggcaagtgggaggcatcagcagaggatgatgtaagacactggtccaagttcccatcatttacccctcttctgagtcagattgaggcagatggtggcaagtctgtggaccttagcaactatccttatatatttatgagatggaaagagcagtactttgttaatgtgggagtggactgcgggttgaccatagctggtttctattacgtctgcttttcttgtagcgatggatccattagtggcttttattacgacccaaacagcagtccatttcagaagcttgaattgaagtgcaccaacgagaaacaatctgggttcaccttttcttcgtatgagctgcagtgacatgcatgacgctattaattgaagtggcagagattaacgggcgaacttcctgtgcttgccaatatgaacatatactgtgtgtgtattgaacccgtagttcctgatgttcctttgaaatagttgagatgttatgtatgtatggttgtgccagaccaaacaattatgtaacttatccttttgcaatctcagtattctgggaaaaaagtatcaatttgtttattttatcgaaagttcgcctgtgtt

SEQ ID NO: 61475 - protein, 257 aa, Triticum aestivum
  peptide (1)..(257): Ceres Seq. ID no. 15220115
VNNSSLRHDSRHQNATLLLETSIQPRRRRPHPPPQPPPKMPVRVVDTATPSSQSSSGQEANAVQPSPPSCSLLTAGRCFAGTQNVSSLQKDEAWKVNVRIHGCDIEQGYLCGTMEALNVPLADTPVVTFWEGEIVDAKNYTFFTGKWEASAEDDVRHWSKFPSFTPLLSQIEADGGKSVDLSNYPYIFMRWKEQYFVNVGVDCGLTIAGFYYVCFSCSDGSISGFYYDPNSSPFQKLELKCTNEKQSGFTFSSYELQ

SEQ ID NO: 61476 - protein, 218 aa, Triticum aestivum
  peptide (1)..(218): Ceres Seq. ID no. 15220116
MPVRVVDTATPSSQSSSGQEANAVQPSPPSCSLLTAGRCFAGTQNVSSLQKDEAWKVNVRIHGCDIEQGYLCGTMEALNVPLADTPVVTFWEGEIVDAKNYTFFTGKWEASAEDDVRHWSKFPSFTPLLSQIEADGGKSVDLSNYPYIFMRWKEQYFVNVGVDCGLTIAGFYYVCFSCSDGSISGFYYDPNSSPFQKLELKCTNEKQSGFTFSSYELQ

SEQ ID NO: 61477 - protein, 144 aa, Triticum aestivum
  peptide (1)..(144): Ceres Seq. ID no. 15220117
MEALNVPLADTPVVTFWEGEIVDAKNYTFFTGKWEASAEDDVRHWSKFPSFTPLLSQIEADGGKSVDLSNYPYIFMRWKEQYFVNVGVDCGLTIAGFYYVCFSCSDGSISGFYYDPNSSPFQKLELKCTNEKQSGFTFSSYELQ

SEQ ID NO: 61478 - DNA, 701 bp, Triticum aestivum
  misc_feature (1)..(701): Ceres Seq. ID no. 13661786
acctagaacatcctaatcgaaaaacacaacacacaatccaagttaaagaaaccgttacaaaaagaaaagaaaaactacgttgtttcttgaaaatggagattcttaagttcgctgtcatttttgtactttgctccatctcgtcgtctaacgccgcaactacaccgccgagcggcggagcaggagatgctcactcaatgccatgtatacaaaaactgatgccgtgtcagccgtatcttcgctcagtcactccgccgcctccagcgtcgtgttgtatgccgctgaaggagatcgtcgagaccgacgtgaactgtctttgctccgtcttcaacaacgtagatatgcttaaatcgcttaaccttactaaagaaaacgctcttgttctccccaaagcttgtggcgccaacgctgatgtgtcgcagtgcaaagccagcaccggtactacgacgccttcgacgtcaccaggaactactaaaactcctccggcagctcccgctgaaagcggatctacgggaggttcagcttcttcaacggccaaaccatcagactcggctccggccatcattttttctggaattagcttcgcctccgctttcgtggcattggcaacaatctttttctgatatcctactaattagtcacgtctttattcagcttagttggtttaaaatgttggaaactactattatcagacaatattcggt

SEQ ID NO: 61479 - protein, 205 aa, Triticum aestivum
  peptide (1)..(205): Ceres Seq. ID no. 13661787
LEHPNRKTQHTIQVKETVTKRKEKLRCFLKMEILKFAVIFVLCSISSSNAATTPPSGGAGDAHSMPCIQKLMPCQPYLRSVTPPPPASCCMPLKEIVETDVNCLCSVFNNVDMLKSLNLTKENALVLPKACGANADVSQCKASTGTTTPSTSPGTTKTPPAAPAESGSTGGSASSTAKPSDSAPAIIFSGISFASAFVALATIFF

SEQ ID NO: 61480 - protein, 175 aa, Triticum aestivum
  peptide (1)..(175): Ceres Seq. ID no. 13661788
MEILKFAVIFVLCSISSSNAATTPPSGGAGDAHSMPCIQKLMPCQPYLRSVTPPPPASCCMPLKEIVETDVNCLCSVFNNVDMLKSLNLTKENALVLPKACGANADVSQCKASTGTTTPSTSPGTTKTPPAAPAESGSTGGSASSTAKPSDSAPAIIFSGISFASAFVALATIFF

SEQ ID NO: 61481 - protein, 141 aa, Triticum aestivum
  peptide (1)..(141): Ceres Seq. ID no. 13661789
MPCIQKLMPCQPYLRSVTPPPPASCCMPLKEIVETDVNCLCSVFNNVDMLKSLNLTKENALVLPKACGANADVSQCKASTGTTTPSTSPGTTKTPPAAPAESGSTGGSASSTAKPSDSAPAIIFSGISFASAFVALATIFF

SEQ ID NO: 61482 - DNA, 864 bp, Triticum aestivum
  misc_feature (1)..(864): Ceres Seq. ID no. 13661890
acatctctcccatccatcaaaccgccgcaaccttctctgaccgagcagctgcgagctccagcccaagttccaagctagaatcgcggcgatggcacggtcggagctggtcatggcgttgctggtggtggtcctcgccggcggctgctgcgcgtcggcgggcgccgtggcgtacctctccaagctgcctgtgatcctcgacgtcaccgcatcccccagtcccggccaagttcttcacgccggcgaggacgtgatcacggtgacttgggccctgaacgcgagccagccggccggcaaggacgccgactacaagaacgtgaaggtgagcctctgctacgcgccggtgagccagaaggagcgcgagtggcgcaagacccacgacgacctcaagaaggacaagacctgccagttcaaggtcacccagcaggcctaccccggcaccggcaaggtcgagtaccgcgtcgccctcgacatccccaccgccacctactatgtgcgtgcctacgcgctcgacgcctccggcacgcaggtcgcctacggccagaccgcgcccgccgccgccttcaacatcgtcagcatcaccggcgtcaccacctccatcaaggtcgccgccggcgtcttctccgccttctccgtcgcgtcgctcgccttcttcttcttcattgagaaacgcaagaagaacaactaaactcggaagtcggaaccgtggcaaagtgttcgtcttcgtccgtgcgcaatttcttcctgtccttcgcaacctacgcataattgtacggaaaaatgtactgtactgtactatatgtaagagattgtttgatgttccctttttcttatccggagactctcgtatataattggttatgttgt

SEQ ID NO: 61483 - protein, 198 aa, Triticum aestivum
  peptide (1)..(198): Ceres Seq. ID no. 13661891
MARSELVMALLVVVLAGGCCASAGAVAYLSKLPVILDVTASPSPGQVLHAGEDVITVTWALNASQPAGKDADYKNVKVSLCYAPVSQKEREWRKTHDDLKKDKTCQFKVTQQAYPGTGKVEYRVALDIPTATYYVRAYALDASGTQVAYGQTAPAAAFNIVSITGVTTSIKVAAGVFSAFSVASLAFFFFIEKRKKNN

SEQ ID NO: 61484 - protein, 191 aa, Triticum aestivum
  peptide (1)..(191): Ceres Seq. ID no. 13661892
MALLVVVLAGGCCASAGAVAYLSKLPVILDVTASPSPGQVLHAGEDVITVTWALNASQPAGKDADYKNVKVSLCYAPVSQKEREWRKTHDDLKKDKTCQFKVTQQAYPGTGKVEYRVALDIPTATYYVRAYALDASGTQVAYGQTAPAAAFNIVSITGVTTSIKVAAGVFSAFSVASLAFFFFIEKRKKNN

SEQ ID NO: 61485 - protein, 120 aa, Triticum aestivum
  peptide (1)..(120): Ceres Seq. ID no. 13661893
MCVPTRSTPPARRSPTARPRPPPPSTSSASPASPPPSRSPPASSPPSPSRRSPSSSSLRNARRTTKLGSRNRGKVFVFVRAQFLPVLRNLRIIVRKNVLYCTICKRLFDVPFFLSGDSRI

SEQ ID NO: 61486 - DNA, 955 bp, Triticum aestivum
  misc_feature (1)..(955): Ceres Seq. ID no. 13664295
gttcactagcttcgaagtttctttcgaatagttaaaaaaaacaaacaatggcgacggttcagttcttcaaccaattcccctgccaaacccgagtccaaagcccatcaaactcaaaacccctctccaagccaccgtcttcgctggtgccaatgagcgcgctcactcgccgtccgtcgttttcccccggagaaatcgccgtttctcgttctgatttcagagtcagagtcatcgatgcggaagacgagttggatccggagacgagtgagggaggaggatctgctctattgatggcggaggaagcaatcgaatctgtggaggaaacggaggctctcaagagatcgctggtggattcgttgtacggcacagaccgagggttgagcgcatcgagcgagacgagagccgagatcggagatctaatcacacagctcgagtccaagaaccctacaccagctcccaccgatgctctcttccttctcaacggcaaatggatccagattaagttcgaggaaggtgtgatcggcactcctcagctaacggattcgattgagatcccggagtatgttgagtttcttggtcagaagattgatcttactccgatcagagggttgcttacatcggtacaagacacggctacgtctgtggctagaaccatatcgagccagccaccgttgaaattctctttgcctggggacagtgctcagtcgtggctgctcacgacttatctggacaaggacattaggatctctagaggagatggtggaagcgtctttgtgcttatcaaagaaggaagccctctgttgaacccttgaactctttaatgccaagtacaaactaagtgtttaatatattgttgttgtagtgttaatcgtttgtatgtattaactcggatggtatggagttaagtaataatgttgtagctgctataaaaatacaaaaaaaaaaatatacaaatgtt

SEQ ID NO: 61487 - protein, 253 aa, Triticum aestivum
  peptide (1)..(253): Ceres Seq. ID no. 13664296
MATVQFFNQFPCQTRVQSPSNSKPLSKPPSSLVPMSALTRRPSFSPGEIAVSRSDFRVRVIDAEDELDPETSEGGGSALLMAEEAIESVEETEALKRSLVDSLYGTDRGLSASSETRAEIGDLITQLESKNPTPAPTDALFLLNGKWIQIKFEEGVIGTPQLTDSIEIPEYVEFLGQKIDLTPIRGLLTSVQDTATSVARTISSQPPLKFSLPGDSAQSWLLTTYLDKDIRISRGDGGSVFVLIKEGSPLLNP

SEQ ID NO: 61488 - protein, 219 aa, Triticum aestivum
  peptide (1)..(219): Ceres Seq. ID no. 13664297
MSALTRRPSFSPGEIAVSRSDFRVRVIDAEDELDPETSEGGGSALLMAEEAIESVEETEALKRSLVDSLYGTDRGLSASSETRAEIGDLITQLESKNPTPAPTDALFLLNGKWIQIKFEEGVIGTPQLTDSIEIPEYVEFLGQKIDLTPIRGLLTSVQDTATSVARTISSQPPLKFSLPGDSAQSWLLTTYLDKDIRISRGDGGSVFVLIKEGSPLLNP

SEQ ID NO: 61489 - protein, 173 aa, Triticum aestivum
  peptide (1)..(173): Ceres Seq. ID no. 13664298
MAEEAIESVEETEALKRSLVDSLYGTDRGLSASSETRAEIGDLITQLESKNPTPAPTDALFLLNGKWIQIKFEEGVIGTPQLTDSIEIPEYVEFLGQKIDLTPIRGLLTSVQDTATSVARTISSQPPLKFSLPGDSAQSWLLTTYLDKDIRISRGDGGSVFVLIKEGSPLLNP

SEQ ID NO: 61490 - DNA, 920 bp, Triticum aestivum
  misc_feature (1)..(920): Ceres Seq. ID no. 13664149
gctcctccgcggtgacgggcgctctagnnntagtggatccmccgggytgcaggaattmgcaygagamcaktrcctagawcatcactaatcgaaaaacaccacttgatatcaacaaaccaactccatagacgccaaagaaaaactcatggctaagctcattttcttcttagccgtgcaaatcctcctcctcgctgtcgtttcttccaccggagacgacggagaaaactttgccagaaccatagatcggaagcttctcgggctccacaagaaagagaagctaacccatttcaaagtctattggcacgacatcttaagtggtccaaacccaacctccatcatgattcaaccaccagttacaaacacttcctacttcggagccatctccatgatcgataacgccttgacggcgagagttccgatgaactcaactgtcttgggccaagctcaaggcttctacgcgggagcggcccaaaaggagttgggttttctaatggctatgaactttgcttttaagacagggaagtacaatggaagcaccattacgattcttggtcggaatacggcgttgtcggaggttagagaaatgccaattgttggaggaagtgggcttttccgatttgctagaggctatgttgaggctcggacaaagtggattaatctcaagaacggcgatgctactgttgagtatagctgttatgttttgcattattgatgtttttgtcgtaattatatatttaatttgacgaggtaataataaagcagatttttaaaatttaagttttctttttgcatttggcttatggtgtgtggtggatttgtggttgtaggtttgtcgtttaataatatttgatatatagttttatttaaaaaaaaaaaaaaaaaagcttatcgataccgtcgacctcgaggkksgscccggt

SEQ ID NO: 61491 - protein, 188 aa, Triticum aestivum
  peptide (1)..(188): Ceres Seq. ID no. 15220733
MAKLIFFLAVQILLLAVVSSTGDDGENFARTIDRKLLGLHKKEKLTHFKVYWHDILSGPNPTSIMIQPPVTNTSYFGAISMIDNALTARVPMNSTVLGQAQGFYAGAAQKELGFLMAMNFAFKTGKYNGSTITILGRNTALSEVREMPIVGGSGLFRFARGYVEARTKWINLKNGDATVEYSCYVLHY

SEQ ID NO: 61492 - protein, 124 aa, Triticum aestivum
  peptide (1)..(124): Ceres Seq. ID no. 15220734
MIQPPVTNTSYFGAISMIDNALTARVPMNSTVLGQAQGFYAGAAQKELGFLMAMNFAFKTGKYNGSTITILGRNTALSEVREMPIVGGSGLFRFARGYVEARTKWINLKNGDATVEYSCYVLHY

SEQ ID NO: 61493 - protein, 108 aa, Triticum aestivum
  peptide (1)..(108): Ceres Seq. ID no. 15220735
MIDNALTARVPMNSTVLGQAQGFYAGAAQKELGFLMAMNFAFKTGKYNGSTITILGRNTALSEVREMPIVGGSGLFRFARGYVEARTKWINLKNGDATVEYSCYVLHY

SEQ ID NO: 61494 - DNA, 639 bp, Triticum aestivum
  misc_feature (1)..(639): Ceres Seq. ID no. 14302329
atattatcaacaccgaatctcaaacacaaacacacacatctttcttcaaaaaaaaacttttgcttctcccaagaatctgaatctgcttcacttttgttcaaccatgatgaacatagacgatacgacatctccaatggcccacccgatcgttccatctcaacctccttccgaccaaacccaacaagatccaagttcgcccaatgaagcttcttctgttaccgacaagaaagatgatcaagcttttcccgaagagaaaccgaagcagaatcaagaagaagagagagtggacacagggagagagaagctaaagaagcaccggagagacgtcgccggaagagtttggatacctgacatatggggacaagaagagcttcttaaggactggatcgactgttcaacgtttgatacgtgtctagtccctgccggaatctcgtcggcacgtgcagctctcgtagacgaagctaggcgagctgcttcggcttctggtgggttacatagtcgttgcttgatctcccgctgaatttttatataatatcatatataaatgtggttcttgttcctcaataatatatgtaagccattattgatatattgttgatatagagtctttttcattttcccaataattatattggccct

SEQ ID NO: 61495 - protein, 172 aa, Triticum aestivum
  peptide (1)..(172): Ceres Seq. ID no. 14302330
YYQHRISNTNTHIFLQKKTFASPKNLNLLHFCSTMMNIDDTTSPMAHPIVPSQPPSDQTQQDPSSPNEASSVTDKKDDQAFPEEKPKQNQEEERVDTGREKLKKHRRDVAGRVWIPDIWGQEELLKDWIDCSTFDTCLVPAGISSARAALVDEARRAASASGGLHSRCLISR

SEQ ID NO: 61496 - protein, 138 aa, Triticum aestivum
  peptide (1)..(138): Ceres Seq. ID no. 14302331
MMNIDDTTSPMAHPIVPSQPPSDQTQQDPSSPNEASSVTDKKDDQAFPEEKPKQNQEEERVDTGREKLKKHRRDVAGRVWIPDIWGQEELLKDWIDCSTFDTCLVPAGISSARAALVDEARRAASASGGLHSRCLISR

SEQ ID NO: 61497 - protein, 137 aa, Triticum aestivum
  peptide (1)..(137): Ceres Seq. ID no. 14302332
MNIDDTTSPMAHPIVPSQPPSDQTQQDPSSPNEASSVTDKKDDQAFPEEKPKQNQEEERVDTGREKLKKHRRDVAGRVWIPDIWGQEELLKDWIDCSTFDTCLVPAGISSARAALVDEARRAASASGGLHSRCLISR

SEQ ID NO: 61498 - DNA, 747 bp, Triticum aestivum
  misc_feature (1)..(747): Ceres Seq. ID no. 13598188
acgagaccattacctagaacatcctaatcgaaaaatagccactacctgcttccacttctgattcagaaactcttaggcattccacattctcaaccccgaaccctaagagcagagcgaaaatgacaaccaccttcgcgaccgtcgcaggactcggtggcgcattactgtcatccacctcatctcgtttcacctcagggtttgtgaaatccccagtgattgctaggaatcccttgaggcaagctgtggcaatgggaaatgggaggattacatgctttgagaggaattggctgcgggcagattacagtgtgattgggtttgggttgattggttggctagcaccctcaagcataccggctatcaacggtaaaagtctgactggcctcttctttgagagcattggtgctgagcttgctcactttcccagccctcctgcccttacttcgtccttttggttatggctggttacgtggcaccttggcttgttcattgtcctcacttttgggcaaattggattcaagggaaggactgaagactacttttgaattctaaacctatggtctctgtttttacctttttttttctcttccttgtgtgcccccactgccccagtgccttgcaatctatgatgactctatgctacctttttccttcttactaggagaaatctatgtaatatcgccttcataatgttgtatattattattgttgtacttgctcctcatcaatgtcccaacttcttctagtcgt

SEQ ID NO: 61499 - protein, 140 aa, Triticum aestivum
  peptide (1)..(140): Ceres Seq. ID no. 13598189
MTTTFATVAGLGGALLSSTSSRFTSGFVKSPVIARNPLRQAVAMGNGRITCFERNWLRADYSVIGFGLIGWLAPSSIPAINGKSLTGLFFESIGAELAHFPSPPALTSSFWLWLVTWHLGLFIVLTFGQIGFKGRTEDYF

SEQ ID NO: 61500 - protein, 97 aa, Triticum aestivum
  peptide (1)..(97): Ceres Seq. ID no. 13598190
MGNGRITCFERNWLRADYSVIGFGLIGWLAPSSIPAINGKSLTGLFFESIGAELAHFPSPPALTSSFWLWLVTWHLGLFIVLTFGQIGFKGRTEDYF

SEQ ID NO: 61501 - DNA, 829 bp, Triticum aestivum
  misc_feature (1)..(829): Ceres Seq. ID no. 14301870
ataacttcaagacacttcactaaataatctataataaaatgaagatgataattcacatttttttcatcctctccctagtttcatcaacctcttttgcctctgttcaagacttctgtgtagctgatccaaagggtcctcaaagcccatcaggatactcttgcaagaaccctgaccaagtcaccgaaaatgactttgcattctccggcctcgccaaagctggaaacacttcgaacctcattaaagccgcagtgacgccagcctttgcccctgctttcgcaggcaccaatggtcttggagtctcaatggctcgtcttgacttagccggtggtggtgtcattcctcttcacacacatcctggtgcgtctgaggttcttgtagtcatacaaggaaccatctgcgccgggtttatttcctctgctaacaaagtttacttgaagactctccagagaggtgattctatggtgtttcctcaaggacttcttcattttcagcttaactctgggaaaggccctgctttggcttttgttgccttcggaagctcatccccaggacttcagattctaccttttgctctgtttgctaatgatttgccttcagagctcgttgaagccaccacctttcttagtgatgaagaagttaagaagcttaagggtgtgcttggaggaactgattaagcttatctttcgttttttttctaagttttgtgtgtgtgtttatgcgctttttattcaagttcgtttagcattttattgcgtgtaattgttctaagtgtttcattttcattgtctctaaggcttaaattttaattaagtaataagcattgcattgc

SEQ ID NO: 61502 - protein, 211 aa, Triticum aestivum
  peptide (1)..(211): Ceres Seq. ID no. 14301871
MKMIIHIFFILSLVSSTSFASVQDFCVADPKGPQSPSGYSCKNPDQVTENDFAFSGLAKAGNTSNLIKAAVTPAFAPAFAGTNGLGVSMARLDLAGGGVIPLHTHPGASEVLVVIQGTICAGFISSANKVYLKTLQRGDSMVFPQGLLHFQLNSGKGPALAFVAFGSSSPGLQILPFALFANDLPSELVEATTFLSDEEVKKLKGVLGGTD

SEQ ID NO: 61503 - protein, 209 aa, Triticum aestivum
  peptide (1)..(209): Ceres Seq. ID no. 14301872
MIIHIFFILSLVSSTSFASVQDFCVADPKGPQSPSGYSCKNPDQVTENDFAFSGLAKAGNTSNLIKAAVTPAFAPAFAGTNGLGVSMARLDLAGGGVIPLHTHPGASEVLVVIQGTICAGFISSANKVYLKTLQRGDSMVFPQGLLHFQLNSGKGPALAFVAFGSSSPGLQILPFALFANDLPSELVEATTFLSDEEVKKLKGVLGGTD

SEQ ID NO: 61504 - protein, 123 aa, Triticum aestivum
  peptide (1)..(123): Ceres Seq. ID no. 14301873
MARLDLAGGGVIPLHTHPGASEVLVVIQGTICAGFISSANKVYLKTLQRGDSMVFPQGLLHFQLNSGKGPALAFVAFGSSSPGLQILPFALFANDLPSELVEATTFLSDEEVKKLKGVLGGTD

SEQ ID NO: 61505 - DNA, 809 bp, Triticum aestivum
  misc_feature (1)..(809): Ceres Seq. ID no. 12623521
cacgaatagaagatgccactcttccccactccactccgagccctattctccccctccaccgccgcctcctccaccgccgccgccccgccgccccgtcgaccgccgctcgcgggggctctcctcttcctcagcctaggagccgtagccggttgcgccctctccactcgccgtgtccccttcctccgggcgataagttctgctagaatggaatctacttccacgaccgtgccttccattgttgtatttgtgacagttccaaatcgggaagcaggcaaaaagctatcagcaagcattatcagtgagaaacttgctgcttgtgtgaacatagtgcctggaatcgaatctgtttactggtgggagggaaaggtgcaaactgatgctgaagagctgctcatcatcaagaccagagaatctcttctaaatgccttgactgaacatgtcaaagctaaccatgagtacgacgttcctgaagtcattgcgctgcccatcagcggaggcaacctcaagtacttggagtggctcaagaacagcaccagggagaattaatctggccagagctgcttcccatggaccgcatctgtgagtagagtacctagtggtgtggagtgtctgttctggtttgggacattgtgcttgtgcagaaagactttagtggcctctgtgcgtctatggcgtggctgcgacgaatcggtcgatctgtactgtctcctagggtcaaataaactttcagaagcgtgtagcgccaagtcgactgcacaaattcctcttgtcgcgctcgtggattatctcatcaccatgttccttcagtt

SEQ ID NO: 61506 - protein, 177 aa, Triticum aestivum
  peptide (1)..(177): Ceres Seq. ID no. 12623522
MPLFPTPLRALFSPSTAASSTAAAPPPRRPPLAGALLFLSLGAVAGCALSTRRVPFLRAISSARMESTSTTVPSIVVFVTVPNREAGKKLSASIISEKLAACVNIVPGIESVYWWEGKVQTDAEELLIIKTRESLLNALTEHVKANHEYDVPEVIALPISGGNLKYLEWLKNSTREN

SEQ ID NO: 61507 - protein, 113 aa, Triticum aestivum
  peptide (1)..(113): Ceres Seq. ID no. 12623523
MESTSTTVPSIVVFVTVPNREAGKKLSASIISEKLAACVNIVPGIESVYWWEGKVQTDAEELLIIKTRESLLNALTEHVKANHEYDVPEVIALPISGGNLKYLEWLKNSTREN

SEQ ID NO: 61508 - DNA, 1062 bp, Triticum aestivum
  misc_feature (1)..(1062): Ceres Seq. ID no. 13598678
catcacaacacaaacaggagtagtactactactccagtctccggcgagtacataccctacaggtccaacaaggttcatagacgacctgtagcgccaatatggctggcgtctccagcaatgccattgcctttgtggcactcctctccgtgctcttcacgggcgtccgttctgcggtcaactacgacaccgccgtagctagatcctacaactccggctggctccccgccaaggccacctggtacggggcgcccaacggcgccggccccgacgacaacggtggtgcttgcggcttcaagaacgtgaaccagtacccaatctcctccatgggggcatgcggtaacgagcctattttcgccggcggcgagggctgtggcatgtgctacgagattaagtgcgactactccaacaacccttcctgctccggccagccgaggaggatcgtcatcaccgacatgaactactaccccgtggccaggtaccacctcgacctcagtggcaccgcattcggctccatggccaggtacggcctcaacgaccggctccgccacgccggcatcatcgacatgcagttcaggagggtgccctgcaacttcccgggtatgaaggtgaccttccacgtccagcgtgtctccaaccccaactatctcgcggtgctcgtggagtacgcgaacgtggacgggaccgtggtgcggatggagctcatgcagaccatcaacggccgcccgacgggctactatcaggatatgcgccgctcgtggggctccatctggcggatggacaccaaccgcccgctgcaggggccattcgccatccgcatcaccagcgataccggaaagacgctggtggccaacaatgccatcccggcttattggcagccggaccatgcctactggtccaacctccagttctattgattggcttacgtgcgtacttctccgatcgatgccgagttaatcattttggtgtcatcagcatgatccctatttgtgaggatctaatggttttaagttattgccaggcactatctactttcaagcgttaacaagcgtgttaactgtcgcc

SEQ ID NO: 61509 - protein, 271 aa, Triticum aestivum
  peptide (1)..(271): Ceres Seq. ID no. 13598679
MAGVSSNAIAFVALLSVLFTGVRSAVNYDTAVARSYNSGWLPAKATWYGAPNGAGPDDNGGACGFKNVNQYPISSMGACGNEPIFAGGEGCGMCYEIKCDYSNNPSCSGQPRRIVITDMNYYPVARYHLDLSGTAFGSMARYGLNDRLRHAGIIDMQFRRVPCNFPGMKVTFHVQRVSNPNYLAVLVEYANVDGTVVRMELMQTINGRPTGYYQDMRRSWGSIWRMDTNRPLQGPFAIRITSDTGKTLVANNAIPAYWQPDHAYWSNLQFY

SEQ ID NO: 61510 - protein, 196 aa, Triticum aestivum
  peptide (1)..(196): Ceres Seq. ID no. 13598680
MGACGNEPIFAGGEGCGMCYEIKCDYSNNPSCSGQPRRIVITDMNYYPVARYHLDLSGTAFGSMARYGLNDRLRHAGIIDMQFRRVPCNFPGMKVTFHVQRVSNPNYLAVLVEYANVDGTVVRMELMQTINGRPTGYYQDMRRSWGSIWRMDTNRPLQGPFAIRITSDTGKTLVANNAIPAYWQPDHAYWSNLQFY

SEQ ID NO: 61511 - protein, 179 aa, Triticum aestivum
  peptide (1)..(179): Ceres Seq. ID no. 13598681
MCYEIKCDYSNNPSCSGQPRRIVITDMNYYPVARYHLDLSGTAFGSMARYGLNDRLRHAGIIDMQFRRVPCNFPGMKVTFHVQRVSNPNYLAVLVEYANVDGTVVRMELMQTINGRPTGYYQDMRRSWGSIWRMDTNRPLQGPFAIRITSDTGKTLVANNAIPAYWQPDHAYWSNLQFY

SEQ ID NO: 61512 - DNA, 734 bp, Triticum aestivum
  misc_feature (1)..(734): Ceres Seq. ID no. 15225568
ctttataaatcattctcccctcaaccaacccctcttgtagtctccgctcatccaccctcccttttctgttctcgacttgtgcagcgcagttgcataaagaaatggcgacttttcaaatctcttccactagcatgaccaccaaggcggttcttagaagccagccgaccaacaagctcatcgctaacaagagccagcaagtctcagttggatccgtcaagaaagtctcgagatcctttggcttgaaatgctcagccaattctggtgccactatgtcagctgtatacaaggtcaagctcataggacccgaaggcgaagaacacgagttcgaggttcaggacgaccagttcatattggacgcagctgaagaggcaggagttgacttgccttactcttgcagagccggagcctgttccacctgcgccggtcagatcgtgaaaggccaagttgaccagtctgaaggttcgtttcttgaggatgatcacttggagaaaggttttgtcttgacatgtgtggcttacccgcagtcggactgtgtgatccatacccacaaggaaactgaactcttctaagtcacggtggtagtgatgcccaattgtcatttgagttattgttattattgttatcagtttccttctacgaatttgggtgtgtttaattgtatgcttttgtatggaaacgtctcaggatatgccttttagtgttcatcagtcttcaccgggttgcaactggttaat

SEQ ID NO: 61513 - protein, 155 aa, Triticum aestivum
  peptide (1)..(155): Ceres Seq. ID no. 15225569
MATFQISSTSMTTKAVLRSQPTNKLIANKSQQVSVGSVKKVSRSFGLKCSANSGATMSAVYKVKLIGPEGEEHEFEVQDDQFILDAAEEAGVDLPYSCRAGACSTCAGQIVKGQVDQSEGSFLEDDHLEKGFVLTCVAYPQSDCVIHTHKETELF

SEQ ID NO: 61514 - protein, 145 aa, Triticum aestivum
  peptide (1)..(145): Ceres Seq. ID no. 15225570
MTTKAVLRSQPTNKLIANKSQQVSVGSVKKVSRSFGLKCSANSGATMSAVYKVKLIGPEGEEHEFEVQDDQFILDAAEEAGVDLPYSCRAGACSTCAGQIVKGQVDQSEGSFLEDDHLEKGFVLTCVAYPQSDCVIHTHKETELF

SEQ ID NO: 61515 - protein, 99 aa, Triticum aestivum
  peptide (1)..(99): Ceres Seq. ID no. 15225571
MSAVYKVKLIGPEGEEHEFEVQDDQFILDAAEEAGVDLPYSCRAGACSTCAGQIVKGQVDQSEGSFLEDDHLEKGFVLTCVAYPQSDCVIHTHKETELF

SEQ ID NO: 61516 - DNA, 911 bp, Triticum aestivum
  misc_feature (1)..(911): Ceres Seq. ID no. 13661323
aaaacttcacctgtacacatagttatatagatatttactccggccatgattctgaaggtcctcacgctgggcgcgctcctcggctgccttgcctatggtaccaatggctgggagccagtgtgcggcgagaaggctggccgcatggagtgccccgacaacaagtgctgcagcaaggatgggcagtgtggcctaggccccgacttctgcggcgagggttgccaaagcggcgcctgctgcgtgagcttgcgctgtggctcgcagaacgacggcaagacgtgccccaacaaccagtgttgtggccaagacggggtatgcgggttcggcaacgagtactgcggctctggctgccagagcggcgcgtgctcgcagggcatgcaatgcggcagccacaggccatgccccgggaacttgtgctgcagccacgcaggttggtgcggtcttggccctcccttctgcgggactgggtgccagagcggagcctgttgcagctcggaccttaagccgtgcggcaacaggggctgtggccgagtgtgcgacaacaatctgtgttgcggcagggatggctactgcggtgacggcaagccctactgcggtggcggctgccagggcggtccatgctcctgcgccgctgccggcggcggtttcagctccactctactacggggactaggtgagtcatgatgagctcagcgtcgcctgcaatgttgcgccatggatggaagcactagatttgcaacgacgccaaataatatatggtagtaccagtttacattatcattactgccaaggtgtcggcgttttgatttcccacttttagttctctctccttgcaccatgtgaggttataatgggatcatatttataagtcgccagaattttatttttagtgtaaagtcacttttattgtgtgt

SEQ ID NO: 61517 - protein, 211 aa, Triticum aestivum
  peptide (1)..(211): Ceres Seq. ID no. 13661324
MILKVLTLGALLGCLAYGTNGWEPVCGEKAGRMECPDNKCCSKDGQCGLGPDFCGEGCQSGACCVSLRCGSQNDGKTCPNNQCCGQDGVCGFGNEYCGSGCQSGACSQGMQCGSHRPCPGNLCCSHAGWCGLGPPFCGTGCQSGACCSSDLKPCGNRGCGRVCDNNLCCGRDGYCGDGKPYCGGGCQGGPCSCAAAGGGFSSTLLRGLGES

SEQ ID NO: 61518 - protein, 179 aa, Triticum aestivum
  peptide (1)..(179): Ceres Seq. ID no. 13661325
MECPDNKCCSKDGQCGLGPDFCGEGCQSGACCVSLRCGSQNDGKTCPNNQCCGQDGVCGFGNEYCGSGCQSGACSQGMQCGSHRPCPGNLCCSHAGWCGLGPPFCGTGCQSGACCSSDLKPCGNRGCGRVCDNNLCCGRDGYCGDGKPYCGGGCQGGPCSCAAAGGGFSSTLLRGLGES

SEQ ID NO: 61519 - protein, 165 aa, Triticum aestivum
  peptide (1)..(165): Ceres Seq. ID no. 13661326
NFTCTHSYIDIYSGHDSEGPHAGRAPRLPCLWYQWLGASVRREGWPHGVPRQQVLQQGWAVWPRPRLLRRGLPKRRLLRELALWLAERRQDVPQQPVLWPRRGMRVRQRVLRLWLPERRVLAGHAMRQPQAMPRELVLQPRRLVRSWPSLLRDWVPERSLLQLGP

SEQ ID NO: 61520 - DNA, 1368 bp, Triticum aestivum
  misc_feature (1)..(1368): Ceres Seq. ID no. 14313354
atctctctctttactctgacgtgtttaccttcttcagtttctctccttcatctccggcgactttcgaggaagcgaagcttaagatttagggaactatggacagcttctggcaattgggcgatgagctccgaggtcagtcacgagcctcagaggatcacaaatggtccactgtcgcaaccaagctcgctgagcagactaggatgaaaggggaaaggatgaacaacctcgatctctccaagccctactctgagttcaggccaaccgacaagtttagtttccaggacaacaacaaccttaatttcaacatgttgaacctggacggcaagtatgtgcaaggcatgggcaaagctccgatgcagagcaatgtttacaacaacgtgaacaatgttttccagaagaacgacttcaagagtggaggcaacatgaaggttaacaagtacagtggcaatgttgttgctaacaaggagctgagcaacaacaacaacaagcacagcaataatgataatgtgaatatgaatgttgacaagaggtttaagactttgcctgcatcggagacgcttccgaggaatgaagttcttggcggctacatctttgtttgcaacaatgataccatgcaggaggacttgaaacgccacctatttggtttacctccaaggtacagggactctgtccgggcgataacacctgggttacctctgtttctttacaattacaccactcaccagctccatggtatctttgaggcaacaacttttggaggtactaatattgatgcgactgcctgggaagacaaaaagtgcaaaggagagtcaagatttccggctcaggtgaggatcagagtgaggaaaatatgcaaagccttggaagaggattccttcaggcctgttcttcaccactatgatggcccaaaattccgccttgagctctctgttcctgagacattggatctgctagatctgtgcgaacaagctggttctgcataagccgatcaaccctgcaatgccacgttgctaggggaagtgatctgaaatctatctatatatatgcatattaccataagagcgtaagcttttgggagttagataagagtcgaattcaaatgtatggtttactaagaagtgaggagttgtgtgcgtcttgaggcaagcaaaagggtgaagaagctctgccgaataagcgactacccttgttcttgttgtgtctaatgtgtgagtgtctgtgctttgtgagagatttgaaacaaacaatttatgtagagagaaagtgagactaaataacagagccaaaccaatggtatgagctactgtttgtgtttgctttgtgcaagggaaaaacaaatgttttaaatagcaagtttaacttttaagc

SEQ ID NO: 61521 - protein, 295 aa, Triticum aestivum
  peptide (1)..(295): Ceres Seq. ID no. 14313355
MDSFWQLGDELRGQSRASEDHKWSTVATKLAEQTRMKGERMNNLDLSKPYSEFRPTDKFSFQDNNNLNFNMLNLDGKYVQGMGKAPMQSNVYNNVNNVFQKNDFKSGGNMKVNKYSGNVVANKELSNNNNKHSNNDNVNMNVDKRFKTLPASETLPRNEVLGGYIFVCNNDTMQEDLKRHLFGLPPRYRDSVRAITPGLPLFLYNYTTHQLHGIFEATTFGGTNIDATAWEDKKCKGESRFPAQVRIRVRKICKALEEDSFRPVLHHYDGPKFRLELSVPETLDLLDLCEQAGSA

SEQ ID NO: 61522 - protein, 260 aa, Triticum aestivum
  peptide (1)..(260): Ceres Seq. ID no. 14313356
MKGERMNNLDLSKPYSEFRPTDKFSFQDNNNLNFNMLNLDGKYVQGMGKAPMQSNVYNNVNNVFQKNDFKSGGNMKVNKYSGNVVANKELSNNNNKHSNNDNVNMNVDKRFKTLPASETLPRNEVLGGYIFVCNNDTMQEDLKRHLFGLPPRYRDSVRAITPGLPLFLYNYTTHQLHGIFEATTFGGTNIDATAWEDKKCKGESRFPAQVRIRVRKICKALEEDSFRPVLHHYDGPKFRLELSVPETLDLLDLCEQAGSA

SEQ ID NO: 61523 - protein, 255 aa, Triticum aestivum
  peptide (1)..(255): Ceres Seq. ID no. 14313357
MNNLDLSKPYSEFRPTDKFSFQDNNNLNFNMLNLDGKYVQGMGKAPMQSNVYNNVNNVFQKNDFKSGGNMKVNKYSGNVVANKELSNNNNKHSNNDNVNMNVDKRFKTLPASETLPRNEVLGGYIFVCNNDTMQEDLKRHLFGLPPRYRDSVRAITPGLPLFLYNYTTHQLHGIFEATTFGGTNIDATAWEDKKCKGESRFPAQVRIRVRKICKALEEDSFRPVLHHYDGPKFRLELSVPETLDLLDLCEQAGSA

SEQ ID NO: 61524 - DNA, 594 bp, Triticum aestivum
  misc_feature (1)..(594): Ceres Seq. ID no. 12624601
atctgcacaccgctgaatgctgatcagctgacatcgagttcttgaagacacaccactattcgctagaatacgatgggggatctgcagatcgtgctgtccggggggacgatcgaggcgcagcacgtggagatgaaggtgcccctctactcctacgggtgcgagaagaagatcaagaaggcgctgtcgaatctgaaagggattcactcggttcaggtggattaccaccagcagcaggtgatggtgtgggggatctgcacccggaacgacgtgctggccgccgtccggcggaagcggcgagcggcgcggttctggggcgcggaccacccggatctgggcgaggacgctaggctgggggacgcccagaagcactacctgcgggcgttcgccgcgtacaggagtaggaagtcgtggaagaagctcttccccatgatccggctgtaacagcagcagaccgcgagcgtgatgttttgtcgcaatgcttgctgcatgcgtggccgcgtgtgtgttgcactgcaggaatgtccaggagttgctagtagtttggtacagtagcgcatgatgttacatatcgaataaatgtgctctgttcttgtc

SEQ ID NO: 61525 - protein, 122 aa, Triticum aestivum
  peptide (1)..(122): Ceres Seq. ID no. 12624602
MGDLQIVLSGGTIEAQHVEMKVPLYSYGCEKKIKKALSNLKGIHSVQVDYHQQQVMVWGICTRNDVLAAVRRKRRAARFWGADHPDLGEDARLGDAQKHYLRAFAAYRSRKSWKKLFPMIRL

SEQ ID NO: 61526 - protein, 103 aa, Triticum aestivum
  peptide (1)..(103): Ceres Seq. ID no. 12624603
MKVPLYSYGCEKKIKKALSNLKGIHSVQVDYHQQQVMVWGICTRNDVLAAVRRKRRAARFWGADHPDLGEDARLGDAQKHYLRAFAAYRSRKSWKKLFPMIRL

SEQ ID NO: 61527 - protein, 67 aa, Triticum aestivum
  peptide (1)..(67): Ceres Seq. ID no. 12624604
MVWGICTRNDVLAAVRRKRRAARFWGADHPDLGEDARLGDAQKHYLRAFAAYRSRKSWKKLFPMIRL

SEQ ID NO: 61528 - DNA, 604 bp, Triticum aestivum
  misc_feature (1)..(604): Ceres Seq. ID no. 14301855
gagagatgagcgggaacgaggttgagaaggccaaggctgccgccggcggcggcgtaggggagtacgggacgttccatggtccgcccagctacccgcccccgcgcccgcccgtcgggcacccgcagcccgccccgccgcccggcctccacggccatcgcgagcccaactcgcgccaccgcggcggctaccaggccgggaacgctcaagatcacgaagcaggtgcgcgtggacatagacctgaccgccttccatgctgcggtattggcatgggctggtttctattcataatcggtttctttcttggtgccatcccctggtatgtcggagcatttctgttgtggtattctagagtggattacagggagaaaccaggatatgtggcatgcacaatagcggctgtccttgctacaattgccgtcatcatcggggcaaccgctggagctcacgtttattgatgtcagtctacattgtgtcactgtacatattgtacatttcatggatgaagaaagatgtcatgtcgcgtcttctgcactgtatttgattattaactttgaaatattcaatgtatgacgaggagaaccaagtccttgttatggtcacaaat

SEQ ID NO: 61529 - protein, 150 aa, Triticum aestivum
  peptide (1)..(150): Ceres Seq. ID no. 14301856
EMSGNEVEKAKAAAGGGVGEYGTFHGPPSYPPPRPPVGHPQPAPPPGLHGHREPNSRHRGGYQAGNAQDHEAGARGHRPDRLPCCGIGMGWFLFIIGFFLGAIPWYVGAFLLWYSRVDYREKPGYVACTIAAVLATIAVIIGATAGAHVY

SEQ ID NO: 61530 - protein, 149 aa, Triticum aestivum
  peptide (1)..(149): Ceres Seq. ID no. 14301857
MSGNEVEKAKAAAGGGVGEYGTFHGPPSYPPPRPPVGHPQPAPPPGLHGHREPNSRHRGGYQAGNAQDHEAGARGHRPDRLPCCGIGMGWFLFIIGFFLGAIPWYVGAFLLWYSRVDYREKPGYVACTIAAVLATIAVIIGATAGAHVY

SEQ ID NO: 61531 - DNA, 763 bp, Triticum aestivum
  misc_feature (1)..(763): Ceres Seq. ID no. 13598124
gggatttgctaggcttgcgcaaaagtacaaaaatgttacaagaaattcagagaaggggaaaaagacgaggggaaaatcagcattctgacagcgacttgatcggaccgatcggcacgcgtggcacaccttctttccacacctcccggctgaagctgctgtagaatcctcaaaccaatcaaccaccatccatcaccaaagagcagagcaaggaaatctgtggacgttctgcccgtccaccaaatcccttcagcgcgccgcctccctcgctcgcgaggactctgcggatctctctcagcggcagcaagcagagcggagagagcaatccgccatggccatggtcgcctccacctccatcgcccaccacaagccgcgtttgtcggtgctgtgcaggaagaaggaccgggacagggagctggagcgggagaaggagcacaagtaccccttcaaggtcgtcgagatcacgccgccaccgcgatgcctcggcgtccgctgcttccccacgaacatccactgcggggagagcgtgacgatcgaagggcaggcgtacaccgtgtcggcggtgacgcaccggtaccagctgcgcaaggggcggtacgagccgagcgagaagcgcctcgacgtcctctccaccggcagatacatcctcaacctctacctcgacagcctcctcgacaagtcctagactctctatgctctactctacactactagtacaaatttatttattctactacttcagcaaatttatttatgcctctactgc

SEQ ID NO: 61532 - protein, 117 aa, Triticum aestivum
  peptide (1)..(117): Ceres Seq. ID no. 13598125
MAMVASTSIAHHKPRLSVLCRKKDRDRELEREKEHKYPFKVVEITPPPRCLGVRCFPTNIHCGESVTIEGQAYTVSAVTHRYQLRKGRYEPSEKRLDVLSTGRYILNLYLDSLLDKS

SEQ ID NO: 61533 - protein, 115 aa, Triticum aestivum
  peptide (1)..(115): Ceres Seq. ID no. 13598126
MVASTSIAHHKPRLSVLCRKKDRDRELEREKEHKYPFKVVEITPPPRCLGVRCFPTNIHCGESVTIEGQAYTVSAVTHRYQLRKGRYEPSEKRLDVLSTGRYILNLYLDSLLDKS

SEQ ID NO: 61534 - protein, 78 aa, Triticum aestivum
  peptide (1)..(78): Ceres Seq. ID no. 13598127
MPRRPLLPHEHPLRGERDDRRAGVHRVGGDAPVPAAQGAVRAEREAPRRPLHRQIHPQPLPRQPPRQVLDSLCSTLHY

SEQ ID NO: 61535 - DNA, 785 bp, Triticum aestivum
  misc_feature (1)..(785): Ceres Seq. ID no. 12783998
acaccacaccatcttcatcccccctcacatcccacacctccacacgttcgaaccaccaccaccagaagcagcacccatggcacccaaggcggcagagaagaagctggcgccggccacggcagagaagacgacggcggggaagaagcccaaggcggagaagcgggcgccggcgaccaaggaggccggcggcgagggcaagacgaggggccggaagaagggcagcaaggccaagaagggcgtggagacgtacaagatctacatcttcaaggtgctcaagcaggtgcacccggacgtcggcatctcctccaaggccatgtccatcatgaactccttcatcaacgacatcttcgagaagctcgccggggagtccgccaagctggcgaggtacaacaagaagcccaccatcacgtcccgggagatccagacctccgtccgcctcgtcctccccggggagctcgccaagcacgccgtctccgagggcaccaaggccgtcaccaagttcacatcatcctaggctggcttcgtcgtcgtcgtttcatgagttgatggcggcaggcatcgtgtatgtagttggcagtagtatgatgttacaacctttgtaagaattgtgctgcttgcttgtgggactgaagaaacagtgatgttgctgtttaaatcaatgttcgtgtgtgcttgcgtgtcgcttcagagttcagactgactcctcttgatgccatttgtttatgtcagcaagtttctaccgtgatagtttatctagtaattttaatttgctgtcattttatctg

SEQ ID NO: 61536 - protein, 181 aa, Triticum aestivum
  peptide (1)..(181): Ceres Seq. ID no. 12783999
TPHHLHPPSHPTPPHVRTTTTRSSTHGTQGGREEAGAGHGREDDGGEEAQGGEAGAGDQGGRRRGQDEGPEEGQQGQEGRGDVQDLHLQGAQAGAPGRRHLLQGHVHHELLHQRHLREARRGVRQAGEVQQEAHHHVPGDPDLRPPRPPRGARQARRLRGHQGRHQVHIILGWLRRRRFMS

SEQ ID NO: 61537 - protein, 170 aa, Triticum aestivum
  peptide (1)..(170): Ceres Seq. ID no. 12784000
HHTIFIPPHIPHLHTFEPPPPEAAPMAPKAAEKKLAPATAEKTTAGKKPKAEKRAPATKEAGGEGKTRGRKKGSKAKKGVETYKIYIFKVLKQVHPDVGISSKAMSIMNSFINDIFEKLAGESAKLARYNKKPTITSREIQTSVRLVLPGELAKHAVSEGTKAVTKFTSS

SEQ ID NO: 61538 - protein, 145 aa, Triticum aestivum
  peptide (1)..(145): Ceres Seq. ID no. 12784001
MAPKAAEKKLAPATAEKTTAGKKPKAEKRAPATKEAGGEGKTRGRKKGSKAKKGVETYKIYIFKVLKQVHPDVGISSKAMSIMNSFINDIFEKLAGESAKLARYNKKPTITSREIQTSVRLVLPGELAKHAVSEGTKAVTKFTSS

SEQ ID NO: 61539 - DNA, 1203 bp, Triticum aestivum
  misc_feature (1)..(1203): Ceres Seq. ID no. 13662054
aatattcttctctgttttgtattcgtctgaggtgttttatcttcttcttcttcttcttagacgaagcagtgaaaggattcggattctctgtcaatttttcgagaagagaagtttctaacagtattgggatagagatagatagatagatgagttcatctctacctatgaggctcctcgtgcctctcacacttcccttgattcctcctccttcttcggattctctagctccgtctccgctcagatcgaaaaaccctaactttattctccgatcctcttcttctagtacctcctgttcatcttccctgtggcagctcttccccaggagatccagatcctcttctccttgtgttcccatgtgcacgaaagaccaagacatcacagatacttggagaaatgaagatgatcctattacatgtgggccgcttgaatctgatgaagattccggaggcctccggattcctactcaggctcaggccatcgttgaaggctccggttcagttgctgtctctgagctcagaccttcccctgatgttgattacattcaagagcttctggcgatacagcagcaagggcctagaaccattggcttctttgggactaggaacatgggtttcatgcatcaagaactcatcgagattcttagctacgccatggttattactaaaaatcatatatatacttcaggtgcatctggaactaatgcagctgttatcagaggtgcgttgagagctgagaggccagagcttcttacagtaatcttacctcaaagtttgaaaaaacaacctcctgagagccaagagctattgtctaaggtgcaaaacgtggtagaaaagccacacaatgatcatttgccattactagaagctagcaggctgtgtaatatggacatcatatcacaagtacagcaagtgatctgcttcgcgtttcatgacagtaggcttctcatggagacatgtcaagaagctaaaaatctccgcaagatcgtcactctcttctacctcgattgattcccactctcttctcctgggaacacaagaggatggatacaagtttctttgtaaattgtgaatctctcccccatcccaaaacatattttactattcttttgtctagattttgaaaactccatcattatgatttgtaggattaaattctcagctattttgtaactttacatgggttataaaatatttcttctcatct

SEQ ID NO: 61540 - protein, 286 aa, Triticum aestivum
  peptide (1)..(286): Ceres Seq. ID no. 13662055
MSSSLPMRLLVPLTLPLIPPPSSDSLAPSPLRSKNPNFILRSSSSSTSCSSSLWQLFPRRSRSSSPCVPMCTKDQDITDTWRNEDDPITCGPLESDEDSGGLRIPTQAQAIVEGSGSVAVSELRPSPDVDYIQELLAIQQQGPRTIGFFGTRNMGFMHQELIEILSYAMVITKNHIYTSGASGTNAAVIRGALRAERPELLTVILPQSLKKQPPESQELLSKVQNVVEKPHNDHLPLLEASRLCNMDIISQVQQVICFAFHDSRLLMETCQEAKNLRKIVTLFYLD

SEQ ID NO: 61541 - protein, 280 aa, Triticum aestivum
  peptide (1)..(280): Ceres Seq. ID no. 13662056
MRLLVPLTLPLIPPPSSDSLAPSPLRSKNPNFILRSSSSSTSCSSSLWQLFPRRSRSSSPCVPMCTKDQDITDTWRNEDDPITCGPLESDEDSGGLRIPTQAQAIVEGSGSVAVSELRPSPDVDYIQELLAIQQQGPRTIGFFGTRNMGFMHQELIEILSYAMVITKNHIYTSGASGTNAAVIRGALRAERPELLTVILPQSLKKQPPESQELLSKVQNVVEKPHNDHLPLLEASRLCNMDIISQVQQVICFAFHDSRLLMETCQEAKNLRKIVTLFYLD

SEQ ID NO: 61542 - protein, 217 aa, Triticum aestivum
  peptide (1)..(217): Ceres Seq. ID no. 13662057
MCTKDQDITDTWRNEDDPITCGPLESDEDSGGLRIPTQAQAIVEGSGSVAVSELRPSPDVDYIQELLAIQQQGPRTIGFFGTRNMGFMHQELIEILSYAMVITKNHIYTSGASGTNAAVIRGALRAERPELLTVILPQSLKKQPPESQELLSKVQNVVEKPHNDHLPLLEASRLCNMDIISQVQQVICFAFHDSRLLMETCQEAKNLRKIVTLFYLD

SEQ ID NO: 61543 - DNA, 1066 bp, Triticum aestivum
  misc_feature (1)..(1066): Ceres Seq. ID no. 12784852
agtcggccgcctcccccctccacctcctccccagcgtcgcctcccgttcggaaccccaagctcccccgccgccggcgaaatggccccgaagcgaggcggcaaggccccggtgccggcgaagaagaaggcggcggacaaggtggtgaacccgctgttcgagaagaggccgaagcagttcggcatcggcggggcgctgccgcccaagaaggacctccaccggttcgtcaagtggcccaaggtcgtccgcattcagcgccagcgccgcatcctcaagcagcgcctcaaggtgcccccggcgctccaccagttcacccgcaccctcgacaagaacctcgccaccaacctgtttaagatgcttctcaagtaccgccctgaggacaaggtggctaagaaggagaggcttctgaagagggcccaggctgaggctgaggggaaaaccgttgaggcctagaagccaattgttgtgaagtatggtcttaaccatgtcacttacctcatcgagcagagcaaggctcagctggtcgtcatcgctcatgatgttgacccaattgagctggttgtgtggctcccagccctgtgcaggaagatggaggtcccatactgcattgttaagggaaagtcacgccttggatcgatcgttcacaagaagactgcctcagttctgtgccttaccactgtgaagaacgaggacaagcttgagttcagcaagatcttggaggctatcaaggctaacttcaatgacaagttcgacgaggtcaggaagaagtggggcggtggtgtcatgggctccaagtcgcaggccaagaccaaggccagggaaaggctcatcgccaaggaggctgcgcagaggatgaactaagcctagccttatatgtcagagcatatgccatgtagtttccctttcagtgtgtcctgattttgacgaggaactcgaacccttttagcagcactgtggaatcgtattgtggttttctgattctctgttccgttcgccagacttatgcaaagatcagatgaggtttacccatgtttggattctatatagttttatgccctttgtcgagtc

SEQ ID NO: 61544 - protein, 149 aa, Triticum aestivum
  peptide (1)..(149): Ceres Seq. ID no. 12784853
VGRLPPPPPPQRRLPFGTPSSPAAGEMAPKRGGKAPVPAKKKAADKVVNPLFEKRPKQFGIGGALPPKKDLHRFVKWPKVVRIQRQRRILKQRLKVPPALHQFTRTLDKNLATNLFKMLLKYRPEDKVAKKERLLKRAQAEAEGKTVEA

SEQ ID NO: 61545 - protein, 123 aa, Triticum aestivum
  peptide (1)..(123): Ceres Seq. ID no. 12784854
MAPKRGGKAPVPAKKKAADKVVNPLFEKRPKQFGIGGALPPKKDLHRFVKWPKVVRIQRQRRILKQRLKVPPALHQFTRTLDKNLATNLFKMLLKYRPEDKVAKKERLLKRAQAEAEGKTVEA

SEQ ID NO: 61546 - protein, 116 aa, Triticum aestivum
  peptide (1)..(116): Ceres Seq. ID no. 12784855
SRPPPPSTSSPASPPVRNPKLPRRRRNGPEARRQGPGAGEEEGGGQGGEPAVREEAEAVRHRRGAAAQEGPPPVRQVAQGRPHSAPAPHPQAAPQGAPGAPPVHPHPRQEPRHQPV

SEQ ID NO: 61547 - DNA, 1182 bp, Triticum aestivum
  misc_feature (1)..(1182): Ceres Seq. ID no. 13662053
attctctctctctctctcgctgcctggccaggtagcttctctctctcctccacgctcctgccgacaaaaacaagaaacgacgtagcacggtagcagcaaagagaaagagagagagaccactggtagccaagggtgggagagaagcaggagtgccgctgccgatcgaccatggagccgggccccgacgcgcctcgcggcgagggagcgagcgcgccggaggagtctggaccgtcctcatcctcggtggccgtggagaaagctgaagagccacaggcacaagcgcagccgccggaaggaggaggccagcaagtcgcactgcaggagcacctgcagccgcagccgctgtcgcagcagccgccggtgccagcggggctgagccgctacgagtcgcagaagcgccgcgactggaacacgttcctgcagtacctgcgcaaccacaagccgccgctgacactcgcgcggtgcagcggcgcgcacgtcatcgagttcctcaagtacctggaccagttcggcaagaccaaggtgcacgccgacggctgcgcctacttcggccagcccaacccgccggctccgtgcgcgtgcccgctccgacaggcatggggcagcctcgacgcgctcattggccgcctgcgcgccgcctacgaggagtccggcggccgccctgagtccaaccccttcgccgcgcgcgccgtgcgcatctatctgcgcgaggtgcgcgaggcgcaggccaaggcgcgcgggataccctacgagaagaagaagcgcaagcgcggcagcacgtccgcccccgcggcgccgcctcccgttgtcaccgccgcggaggcggcagcgacctccggaggcggcgaggacgacgaggacgagccgtcacagtccgctgagcaacagcacacaacgccagcgtctcctccgactagaattagtagcgccggcgctactagtaccaccgcagcggcggcagccacaacgacgacgacgacaacgagagggaaggagaaggaagcggcagaaggatcagcgtgataagtgtagaccatcaaattacccttttgattattccatcgcatccaaattctaatctctgcaccatcataattttagttgtttgttattataattactgtgctgttatgatttgttggatatatatatatatataagagagaggtctaagtagttcgt

SEQ ID NO: 61548 - protein, 284 aa, Triticum aestivum
  peptide (1)..(284): Ceres Seq. ID no. 15220155
MEPGPDAPRGEGASAPEESGPSSSSVAVEKAEEPQAQAQPPEGGGQQVALQEHLQPQPLSQQPPVPAGLSRYESQKRRDWNTFLQYLRNHKPPLTLARCSGAHVIEFLKYLDQFGKTKVHADGCAYFGQPNPPAPCACPLRQAWGSLDALIGRLRAAYEESGGRPESNPFAARAVRIYLREVREAQAKARGIPYEKKKRKRGSTSAPAAPPPVVTAAEAAATSGGGEDDEDEPSQSAEQQHTTPASPPTRISSAGATSTTAAAAATTTTTTTRGKEKEAAEGSA

SEQ ID NO: 61549 - DNA, 1423 bp, Triticum aestivum
  misc_feature (1)..(1423): Ceres Seq. ID no. 13661403
agacctcgaaatcatctagcgaggtcgtcgggctaatcgaagttgggcaccaccgtttattcactgaatggactcgaccaccaaccaattcgccggcgccgccgccgccgctggcgcgtcatcggcgaacacggcaccgctgccggccatgctcgctgacgcccttatcggcgccggagctggaggaggagatggggaccccagcgccgctctccaacggctggcggccctcggcgatcgcatggctgctgtccggcgcctcctcgtcgcctccatttctggggaatcgcagcccctctcctcctcggatattcagtccgtgtcctccgagatctcatctgccgctcacctcgtcgtcctcaacgccgcctccctcctttcttcgtccctcccttttcccgccccatctgccactcccgcccctcccgctcctatacaagagcttcccgcagcggcctccaccgccgatgtgcttccccaagaagctaccaagggctacgatgtcgtggagctcgatgccgacgagctgctcgcggagcatgcccacttctgcaatatctgcggcaagggcttccgccgcgacgccaacctcaggatgcacatgcgcgcgcacggcgaccgattcaagaccctggacgcgctctcccggcccggtcaggcaaagccagttgatggccgcgatgtgcgcttttcctgtcctttcacggggtgcaaccggaaccgtgcgcaccgccgcttccggccgctcaagtcagcggtgtgcgcgcgcaaccacttccgccgcagccactgccccaaactctacgcgtgtgagcgctgcggtggcaagaagcgttttgctgttcttgccgatctccgcggccacctccgccactgcggtgaggaggcacagtggcgctgctcctgcggcaccaccttctcccgcaaggacaagctgttcggccatctcgccctctttgaaggccatatgccagccatgtcccctccgaacaaggatgcagtgacaacgactacagaggcaccccttgatataatggatgaaggaggaatcgaagagcaggaagatggcggtgaaggtggttttgatccggagttcttcaaggagtggatggaggagctcaaagatgatggcgtgcctgctggtggcacagtctggcctggacgggcagcagctgggcaatagcctgtgttgcaagttctgtttggggtgtatggtaacagccgcaaggggcattggctgccaaagtgtctgaaagagcggtggggagatgcttctgaagaacagcacagaggtttctaacaagagcagtgggggcatgcccttgtttgtatggcacagtagtagtctggaatcactttgccagtctccttgtcgctccctcgttattctgtacctattgtcctgttggcagaagtacattcc

SEQ ID NO: 61550 - protein, 371 aa, Triticum aestivum
  peptide (1)..(371): Ceres Seq. ID no. 13661404
MDSTTNQFAGAAAAAGASSANTAPLPAMLADALIGAGAGGGDGDPSAALQRLAALGDRMAAVRRLLVASISGESQPLSSSDIQSVSSEISSAAHLVVLNAASLLSSSLPFPAPSATPAPPAPIQELPAAASTADVLPQEATKGYDVVELDADELLAEHAHFCNICGKGFRRDANLRMHMRAHGDRFKTLDALSRPGQAKPVDGRDVRFSCPFTGCNRNRAHRRFRPLKSAVCARNHFRRSHCPKLYACERCGGKKRFAVLADLRGHLRHCGEEAQWRCSCGTTFSRKDKLFGHLALFEGHMPAMSPPNKDAVTTTTEAPLDIMDEGGIEEQEDGGEGGFDPEFFKEWMEELKDDGVPAGGTVWPGRAAAGQ

SEQ ID NO: 61551 - protein, 344 aa, Triticum aestivum
  peptide (1)..(344): Ceres Seq. ID no. 13661405
MLADALIGAGAGGGDGDPSAALQRLAALGDRMAAVRRLLVASISGESQPLSSSDIQSVSSEISSAAHLVVLNAASLLSSSLPFPAPSATPAPPAPIQELPAAASTADVLPQEATKGYDVVELDADELLAEHAHFCNICGKGFRRDANLRMHMRAHGDRFKTLDALSRPGQAKPVDGRDVRFSCPFTGCNRNRAHRRFRPLKSAVCARNHFRRSHCPKLYACERCGGKKRFAVLADLRGHLRHCGEEAQWRCSCGTTFSRKDKLFGHLALFEGHMPAMSPPNKDAVTTTTEAPLDIMDEGGIEEQEDGGEGGFDPEFFKEWMEELKDDGVPAGGTVWPGRAAAGQ

SEQ ID NO: 61552 - protein, 333 aa, Triticum aestivum
  peptide (1)..(333): Ceres Seq. ID no. 13661406
TSKSSSEVVGLIEVGHHRLFTEWTRPPTNSPAPPPPLARHRRTRHRCRPCSLTPLSAPELEEEMGTPAPLSNGWRPSAIAWLLSGASSSPPFLGNRSPSPPRIFSPCPPRSHLPLTSSSSTPPPSFLRPSLFPPHLPLPPLPLLYKSFPQRPPPPMCFPKKLPRATMSWSSMPTSCSRSMPTSAISAARASAATPTSGCTCARTATDSRPWTRSPGPVRQSQLMAAMCAFPVLSRGATGTVRTAASGRSSQRCARATTSAAATAPNSTRVSAAVARSVLLFLPISAATSATAVRRHSGAAPAAPPSPARTSCSAISPSLKAICQPCPLRTRMQ

SEQ ID NO: 61553 - DNA, 905 bp, Triticum aestivum
  misc_feature (1)..(905): Ceres Seq. ID no. 13662000
gattcaccgctccccctccacctccacccggacccgcaagatcccgacccgccgcggcccccgctcctcgatcgattgatatcagacgcggccgggtgggcggaagaaggcggcggcggcggcgatgagcgcggtgaacatcaccaacgtggcggtgctggacaaccccaccgccttcctcaaccccttccagttcgagatctcctacgagtgcctcgtcccgctcgacgacgatctggaatggaagctcacatatgttggatcagctgaagacgaaacctatgatcagcaacttgagagcgtgcttgttggacctgtcaatgttgggacctaccgttttgtcttccaggctgacccaccggaccctttgaagatacgtgaagaagacatcattggtgtcaccgtgctgctgttgacatgctcctacgtgggtcaggagttcatgagggtgggttattatgtgaacaatgattacgacgaggagcagctgagagaagagcccccggcaaagctattacttgacagggtgcagagaaacattttggctgacaagccccgtgtcaccaagttcccaatcaacttccaccctgaacctggcacgagctcagaacagccgcaacaggatgcagaacagcagcagcagccgacttcaccggaaccacagacggctccagtagagccacatatggcgccactagagaatgtccccattgccgccgaccaatgatcagagttggggtgctaacggtctgttctccatgccttctatggtgtcttaatgttacgaatcgagagtggtggttctgcaatgtactgatctgttgtttacatttcacaatctgttctgtggcaaatgttgggtgtctagctatttcttgataaagagtacttctgcctattttgtt

SEQ ID NO: 61554 - protein, 200 aa, Triticum aestivum
  peptide (1)..(200): Ceres Seq. ID no. 13662001
MSAVNITNVAVLDNPTAFLNPFQFEISYECLVPLDDDLEWKLTYVGSAEDETYDQQLESVLVGPVNVGTYRFVFQADPPDPLKIREEDIIGVTVLLLTCSYVGQEFMRVGYYVNNDYDEEQLREEPPAKLLLDRVQRNILADKPRVTKFPINFHPEPGTSSEQPQQDAEQQQQPTSPEPQTAPVEPHMAPLENVPIAADQ

SEQ ID NO: 61555 - DNA, 888 bp, Triticum aestivum
  misc_feature (1)..(888): Ceres Seq. ID no. 13598758
atatcaggttcaggttcgggttctgcagccgccgtagaaccctagcgtgtctcattaaaccctcaacctccaccttccgacttgcttccagtaattcttccctccccaccaagaaaatcacagccgagaaatagccgaccgaccgcacccttccctcccttctcccccttcctcaagacaggccggaaccaaatcgtgaagctcgatggaccacgtgggctccatggaggagaggatcgtggcggaccggatccggaagaagctggaggaggtgaacgtcgccgcccagaagcacctcgagggcgtgcaggaccatgtcaacttcactctgcagaaagagtacttcaagtgtgcacatgactgctttgataggcgacggactcaagaggggatcaccagctgtgtagagaactgtggtgtgcccgctctttctgccaacaatgttgttgagactgagatggccaagttccaggaaaggttgaatcgctcgttgatggtctgccaagataagtttgaagcagcaaagctccagaagatgaagacagacgcaaccaatgagctggagtcgtgcgtgaacaggtccatcgatgacagcatcagggtcctgccccatctggttgagcagatcaagtccaccattaacatgaagtagaggaatcagaaactttcaaattgtcccccggctcgtttttgccatcgttagctgaatctatccagagtctctagcagcactagtgtaacatgctcattactgccatgagaaccatgtctagagaagagttttttgctgagagattagtgcgtctaaatggcgccgcgataccagactaaatgttgcaaacgtagcttttgcataacatcttaaaatcttaaaatcttttttttttc

SEQ ID NO: 61556 - protein, 148 aa, Triticum aestivum
  peptide (1)..(148): Ceres Seq. ID no. 13598759
MDHVGSMEERIVADRIRKKLEEVNVAAQKHLEGVQDHVNFTLQKEYFKCAHDCFDRRRTQEGITSCVENCGVPALSANNVVETEMAKFQERLNRSLMVCQDKFEAAKLQKMKTDATNELESCVNRSIDDSIRVLPHLVEQIKSTINMK

SEQ ID NO: 61557 - protein, 142 aa, Triticum aestivum
  peptide (1)..(142): Ceres Seq. ID no. 13598760
MEERIVADRIRKKLEEVNVAAQKHLEGVQDHVNFTLQKEYFKCAHDCFDRRRTQEGITSCVENCGVPALSANNVVETEMAKFQERLNRSLMVCQDKFEAAKLQKMKTDATNELESCVNRSIDDSIRVLPHLVEQIKSTINMK

SEQ ID NO: 61558 - DNA, 1296 bp, Triticum aestivum
  misc_feature (1)..(1296): Ceres Seq. ID no. 13664216
agaacatcctaatcgaaaaagtcgtctcccgccaccgcgtcgcccagcaccttcttaaccaacaccaagccaagtaggcaacccagagtcgagtcctcgggaccccgagctcttgcggatgggttgcctgcggcgccggccggagccggcggccatcgacatcacctgggtgtcgtgccggggcgtcaggtcgtcgctcccgttccacacgccgtgcctctacgcctccgtctccgtcacgccgtcgtctgccggcaagaacgtccgccgccaccgcgtcaagacccccaccgaccgcgccggcggcgagaaccccgagtgggacgagcgcctgcggctccgccttcccgacgacgcctcgctggcgtcagagcaggaagccgcggggaaaaagaaggacgggcacgttgaccacgacgacagcgtccttctcgtgcggttcgagctcaaggccgaggtggccgtcctcggggacgtgctcgccgcgtcggccgtcgtgccgctctccgacctcgtcgccgacggcaggacgcgccgcgtgtcctaccagcttgccgcgtccgcggacggcaggcarmcrcaayvdcgtyatctccttctcgtacgccttccaccacggaagcaccatcgacgacgaccaggaggaccgcagcagcgacggcgagccggtatcgcccgctagcccggcccctcccccgccgccgccgcctgagtcgacggtgtcgtcctccgggatgtacccggtgatggagtgggggccactggagcacctcgcggtttacccaccggtgaacgccgacacggtcacgtgctcaagctcaccggagccgattgcggtctacccaccgttgcaggagacatcgagccgtggaatttacccgatggtgggggagccggatagcagtttgtaccccacagtagactttgctccggtgagctgttacccgccgatgacggcgccgtactactacggtggtggttccgggtgtccggcagctcctgcatgggacgggcgatgtttgtacggttgaaacctcggtttccaccctgattttccagcgtttcgttggacggtgtgccggtggcttgtacttttttccgtaaaattcacgtggtgatgccgccatactaggcatccttggccggcgcagcagtgatgccgggattgtgctgtgcgttattggtggtattcgatatgttcgagccgataaaattcgtatgtatatttgtgaaatttgtgtatgttgtcacatgtgcttgataaattaaaggcacctttgatttgaaggttctttt

SEQ ID NO: 61559 - protein, 187 aa, Triticum aestivum
  peptide (1)..(187): Ceres Seq. ID no. 15220296
  misc_feature (153)..(153): Xaa is any aa, unknown or other
  misc_feature (154)..(154): Xaa is any aa, unknown or other
  misc_feature (156)..(156): Xaa is any aa, unknown or other
  misc_feature (158)..(158): Xaa is any aa, unknown or other
MGCLRRRPEPAAIDITWVSCRGVRSSLPFHTPCLYASVSVTPSSAGKNVRRHRVKTPTDRAGGENPEWDERLRLRLPDDASLASEQEAAGKKKDGHVDHDDSVLLVRFELKAEVAVLGDVLAASAVVPLSDLVADGRTRRVSYQLAASADGRXXQXRXLLLVRLPPRKHHRRRPGGPQQRRRAGIAR

SEQ ID NO: 61560 - protein, 98 aa, Triticum aestivum
  peptide (1)..(98): Ceres Seq. ID no. 15220297
MYPVMEWGPLEHLAVYPPVNADTVTCSSSPEPIAVYPPLQETSSRGIYPMVGEPDSSLYPTVDFAPVSCYPPMTAPYYYGGGSGCPAAPAWDGRCLYG

SEQ ID NO: 61561 - protein, 94 aa, Triticum aestivum
  peptide (1)..(94): Ceres Seq. ID no. 15220298
MEWGPLEHLAVYPPVNADTVTCSSSPEPIAVYPPLQETSSRGIYPMVGEPDSSLYPTVDFAPVSCYPPMTAPYYYGGGSGCPAAPAWDGRCLYG

SEQ ID NO: 61562 - DNA, 924 bp, Triticum aestivum
  misc_feature (1)..(924): Ceres Seq. ID no. 13598153
acacagtcgtaagggcaaacccgctctctctccccccaaatcgatggagtctgacggcgaggaggaggcggcggcgacgccggcggcggggcggctgaagggctgcccagagctgtcggtggagggggacatgcgggagatggccaagacggcggcctggagcgtcagctcctgcaagcccggcaacggcgtcgcctccctccgcgacgacagcctcgacacctactggcagtctgacggcgcgcagccgcacctggtcaacatccagttccagaagaaggtgcagctgcagcttgttgtgctctacgtggatttcaagctggacgagagctacacgcccagcaagatctccatccgggccggcgacggcttccacaatctcaaggaaattaaaacggtggaccttttgaagccagtaggatgggttcatatatcattatctggcactgatcccggagaaacattcattcatacatttatgctccaaatcgcggtgttggccaatcacctgaacgggagggacacccatgtccggcagatcaagatatatgggccacgaccgaaccccgttccccaccagcctttccacttcacttccagggaatgcatcatgtactccaccatcaggtgatggttcgtgaaccctggtcgcgtgggatcctccatatcagagacctttatcgtgtggcctgtgcgcttcagtcctccatgacaaacgagtcactgaagtatccagcatatgttatcatgtactactgtagattaagttgctgctgaagcattaggctgtctctctgaacatctaacacgtactaattcatgttgtattccattccatccatgtattcttggtagtacatctttttcctccatttaatgtaacatttcactatttctggaatggattggaagtttctcctggtt

SEQ ID NO: 61563 - protein, 209 aa, Triticum aestivum
  peptide (1)..(209): Ceres Seq. ID no. 13598154
HSRKGKPALSPPKSMESDGEEEAAATPAAGRLKGCPELSVEGDMREMAKTAAWSVSSCKPGNGVASLRDDSLDTYWQSDGAQPHLVNIQFQKKVQLQLVVLYVDFKLDESYTPSKISIRAGDGFHNLKEIKTVDLLKPVGWVHISLSGTDPGETFIHTFMLQIAVLANHLNGRDTHVRQIKIYGPRPNPVPHQPFHFTSRECIMYSTIR

SEQ ID NO: 61564 - protein, 195 aa, Triticum aestivum
  peptide (1)..(195): Ceres Seq. ID no. 13598155
MESDGEEEAAATPAAGRLKGCPELSVEGDMREMAKTAAWSVSSCKPGNGVASLRDDSLDTYWQSDGAQPHLVNIQFQKKVQLQLVVLYVDFKLDESYTPSKISIRAGDGFHNLKEIKTVDLLKPVGWVHISLSGTDPGETFIHTFMLQIAVLANHLNGRDTHVRQIKIYGPRPNPVPHQPFHFTSRECIMYSTIR

SEQ ID NO: 61565 - protein, 166 aa, Triticum aestivum
  peptide (1)..(166): Ceres Seq. ID no. 13598156
MREMAKTAAWSVSSCKPGNGVASLRDDSLDTYWQSDGAQPHLVNIQFQKKVQLQLVVLYVDFKLDESYTPSKISIRAGDGFHNLKEIKTVDLLKPVGWVHISLSGTDPGETFIHTFMLQIAVLANHLNGRDTHVRQIKIYGPRPNPVPHQPFHFTSRECIMYSTIR

SEQ ID NO: 61566 - DNA, 805 bp, Triticum aestivum
  misc_feature (1)..(805): Ceres Seq. ID no. 13662830
atcggtctagttagtgttgatctcggctggtgatttcactagtccgcgcaggtgcgaagccggattcggcccgctgctcccctctcgtctcccgtcgtcggacccccggcgacccctcttccaagccgccatcgtcctcacctccagcgcgacttcgtcttctccaccactcgacccagctcagcagcaaggcggcggacgggaggatgatgggaagcaacaaccccggcggcgcagggggagggggagggatggccccgggcacgggggccggcggcagcgacgggcggcatgacgacgaggccgtgctcaccgagttcctctcctccctcatggactacaatcccacgatcccggacgagctcgtggagcactacctcggccgaagcggcttccactgccccgacatacgcctaacaaggctggttgctgtagctgctcaaaagttcatttcagacattgcaagcgactctcttcagcactgcaaagccagggttgcagcacctatcaaagataacaagagcaaacaaccgaaggatagacgccttgtattgaccatggatgatctttcaaaagcattgcgtgagcatggtgttaatctgaaacatccagagtattttgcggacagcccatcagcagggatgcccccctcaacaagagaggagtagaatcgatcgctccttcaacaagagagggctagaatccattgtttcttatatgcgtacccagtgaatgggcgtgtccttccaactttatgtaacaaagccttataagcatgtatgcaatggcagttgatgtattatgg

SEQ ID NO: 61567 - protein, 153 aa, Triticum aestivum
  peptide (1)..(153): Ceres Seq. ID no. 13662831
MMGSNNPGGAGGGGGMAPGTGAGGSDGRHDDEAVLTEFLSSLMDYNPTIPDELVEHYLGRSGFHCPDIRLTRLVAVAAQKFISDIASDSLQHCKARVAAPIKDNKSKQPKDRRLVLTMDDLSKALREHGVNLKHPEYFADSPSAGMPPSTREE

SEQ ID NO: 61568 - protein, 152 aa, Triticum aestivum
  peptide (1)..(152): Ceres Seq. ID no. 13662832
MGSNNPGGAGGGGGMAPGTGAGGSDGRHDDEAVLTEFLSSLMDYNPTIPDELVEHYLGRSGFHCPDIRLTRLVAVAAQKFISDIASDSLQHCKARVAAPIKDNKSKQPKDRRLVLTMDDLSKALREHGVNLKHPEYFADSPSAGMPPSTREE

SEQ ID NO: 61569 - protein, 138 aa, Triticum aestivum
  peptide (1)..(138): Ceres Seq. ID no. 13662833
MAPGTGAGGSDGRHDDEAVLTEFLSSLMDYNPTIPDELVEHYLGRSGFHCPDIRLTRLVAVAAQKFISDIASDSLQHCKARVAAPIKDNKSKQPKDRRLVLTMDDLSKALREHGVNLKHPEYFADSPSAGMPPSTREE

SEQ ID NO: 61570 - DNA, 749 bp, Triticum aestivum
  misc_feature (1)..(749): Ceres Seq. ID no. 13598157
actcaattcacccacaacatagctagtggaacagtgtcttctaaaaaatggcttcaagctccatagcccttttcttggctctcaacctcctgttcttcacaacaatctccgcatgcggtagctgcactccttgcggaggaggctgcccctctcccaagccgaagccaactcctaaaccaaccccaagccctagctctggcaagggaaagtgccctaaagataccctcaagcttggtgtctgcgccaatgtgctcaatggcctcctcgacttgaccctcggcaagccacctgtcaagccatgctgcagcctcatccaaggactcgctgatgttgaagcagccgtttgtctctgcaccgctcttaaggctaacgttcttggaatcaacttgaacctcccaatctctctaagtcttctcctcaatgtttgcagcaaacaagttcctcctggcttccagtgctaagcaaccgtatcatatgtaatttcaatacacaaatgtgtatatttatcttcttgttttggacagacaaggtggttctatttactcttaatattgtgaccctctatattggtgttcttattatagttttcttgttatggggttcactggagccaaattgtgtctctatctggatgatccttaagattcttcaagttcacagttccattatttcccgttactcttatgttggagtaattattgtattgtgatcctatgaattgataaatcaattatcttttatgttatgcg

SEQ ID NO: 61571 - protein, 137 aa, Triticum aestivum
  peptide (1)..(137): Ceres Seq. ID no. 13598158
MASSSIALFLALNLLFFTTISACGSCTPCGGGCPSPKPKPTPKPTPSPSSGKGKCPKDTLKLGVCANVLNGLLDLTLGKPPVKPCCSLIQGLADVEAAVCLCTALKANVLGINLNLPISLSLLLNVCSKQVPPGFQC

SEQ ID NO: 61572 - protein, 71 aa, Triticum aestivum
  peptide (1)..(71): Ceres Seq. ID no. 13598159
MCIFIFLFWTDKVVLFTLNIVTLYIGVLIIVFLLWGSLEPNCVSIWMILKILQVHSSIISRYSYVGVIIVL

SEQ ID NO: 61573 - DNA, 661 bp, Triticum aestivum
  misc_feature (1)..(661): Ceres Seq. ID no. 12624252
aatccattccagccattgcaagtccccgcctccacctcctcactccccacttcaacacatctccagctcctaccagctcaaccacactagtagtggactagtggtatcaacttaccaaggcaggcaagtctccatggacgctcttgagtcctcgccgccgtcgctgcgccacaagctgcggaccaccgtatgcagctgcttcggctcgccgagcagcggcggggagaggccgcacaccggggtcggcaagagcaggtggaggcgacgcgtggcggccgcgggggagttccggtacgacccgctcagctacgcgctcaacttcgacgacggccccagcgacgacagcgacgccgatgcggacgacgccgccttccggcaccgcaacttcagctcgcgcctgccgccgtccccgacgccggcgccatagcctcaactcctgaatcgtgcatggtagcaaacgtccttagcttctgtagattccgtctctctgatttttcttctctctcttctctggccgagaatgaatcgctacttctgtaaaagcagtctatatatatatacggccgaggaaacgtacgtacgtacgtaccgagggaaagcaattaatggcatcatgtacttgtacacatataagaatcagtcagtctatttgaaatgttcc

SEQ ID NO: 61574 - protein, 141 aa, Triticum aestivum
  peptide (1)..(141): Ceres Seq. ID no. 12624253
IHSSHCKSPPPPPHSPLQHISSSYQLNHTSSGLVVSTYQGRQVSMDALESSPPSLRHKLRTTVCSCFGSPSSGGERPHTGVGKSRWRRRVAAAGEFRYDPLSYALNFDDGPSDDSDADADDAAFRHRNFSSRLPPSPTPAP

SEQ ID NO: 61575 - protein, 116 aa, Triticum aestivum
  peptide (1)..(116): Ceres Seq. ID no. 12624254
MQLLRLAEQRRGEAAHRGRQEQVEATRGGRGGVPVRPAQLRAQLRRRPQRRQRRRCGRRRLPAPQLQLAPAAVPDAGAIASTPESCMVANVLSFCRFRLSDFSSLSSLAENESLLL

SEQ ID NO: 61576 - protein, 97 aa, Triticum aestivum
  peptide (1)..(97): Ceres Seq. ID no. 12624255
MDALESSPPSLRHKLRTTVCSCFGSPSSGGERPHTGVGKSRWRRRVAAAGEFRYDPLSYALNFDDGPSDDSDADADDAAFRHRNFSSRLPPSPTPAP

SEQ ID NO: 61577 - DNA, 514 bp, Triticum aestivum
  misc_feature (1)..(514): Ceres Seq. ID no. 13598191
taggaaggaagttggcaggcaaccttcgatcgagtctcgatcaacacaagaaccagcaaattagcttcggtttcatagtcgtatactgtcatgtctagccttacgaccattagtggcggcgccatggaggagtcgcaggaagtagaggagctcgtcgacacaaggctgtccctcgtgatcggcgccgcgagccgtccgcccccgacggtcctggcgctgctgccggcggcatcaccggagaacgaagcggcggcacgcgggaagaggaagggagtcaagggaccagagaacggtgcgggcggtgccgctgctgcttcaagggagcatagcaagaggtccaagacggtgcacgacagcagcgacgtcgacgatgacgacagaggggacgcggccggcggcgacgggacgaggaagaagctcatgctcacggtggagcaggccgcgctcttggaggaaagcttccgtgcccacaacgtcctctctcacggcgagaagcacgatcttgcgaggcagc

SEQ ID NO: 61578 - protein, 141 aa, Triticum aestivum
  peptide (1)..(141): Ceres Seq. ID no. 13598192
MSSLTTISGGAMEESQEVEELVDTRLSLVIGAASRPPPTVLALLPAASPENEAAARGKRKGVKGPENGAGGAAAASREHSKRSKTVHDSSDVDDDDRGDAAGGDGTRKKLMLTVEQAALLEESFRAHNVLSHGEKHDLARQ

SEQ ID NO: 61579 - protein, 130 aa, Triticum aestivum
  peptide (1)..(130): Ceres Seq. ID no. 13598193
MEESQEVEELVDTRLSLVIGAASRPPPTVLALLPAASPENEAAARGKRKGVKGPENGAGGAAAASREHSKRSKTVHDSSDVDDDDRGDAAGGDGTRKKLMLTVEQAALLEESFRAHNVLSHGEKHDLARQ

SEQ ID NO: 61580 - DNA, 736 bp, Triticum aestivum
  misc_feature (1)..(736): Ceres Seq. ID no. 13662050
atcagagctcattctctctctctctctctatctctatctctatctctctctagctccaatgggctttcccgtaggctacacagaggtgtttctccctaagctcttcgtacaaacgctttcgatactcagtttcttcagaaccgtcgtcttctatctcttccgcttcttgggtctctccggcttcctcgaaacggatcaaacctggcccgactacacatcgtacccgacccgaatacccgaactccgctcacctttctccgccctactaatccgcgagatcttaccggttatcaaattcgaagacgtgacgagctccggcgaagaactaccaggaaactgcgccgtttgtctctacgagttcgaaggagaggaagagatccgacggctgagaaactgcagacatatattccaccggagctgtctcgaccgttggatggatcatgatcagaagacgtgtcctctttgtagaacaccgtttgttccagatgagatgcaagaagagtttaatcaacggttatgggctgcttctggtgttcatgacttccacatcgagtagagtcccttgtcgttactttagagaaagctacttttgtctccctccctccttgtgtcttttcttttctttttttactttttaccactgtacttttaattgtgctttttcacccttgctaacattagatttgccacttttatgtgtatatgaatgatatgagcaataaacacaaccaaattt

SEQ ID NO: 61581 - protein, 184 aa, Triticum aestivum
  peptide (1)..(184): Ceres Seq. ID no. 13662051
SELILSLSLYLYLYLSLAPMGFPVGYTEVFLPKLFVQTLSILSFFRTVVFYLFRFLGLSGFLETDQTWPDYTSYPTRIPELRSPFSALLIREILPVIKFEDVTSSGEELPGNCAVCLYEFEGEEEIRRLRNCRHIFHRSCLDRWMDHDQKTCPLCRTPFVPDEMQEEFNQRLWAASGVHDFHIE

SEQ ID NO: 61582 - protein, 165 aa, Triticum aestivum
  peptide (1)..(165): Ceres Seq. ID no. 13662052
MGFPVGYTEVFLPKLFVQTLSILSFFRTVVFYLFRFLGLSGFLETDQTWPDYTSYPTRIPELRSPFSALLIREILPVIKFEDVTSSGEELPGNCAVCLYEFEGEEEIRRLRNCRHIFHRSCLDRWMDHDQKTCPLCRTPFVPDEMQEEFNQRLWAASGVHDFHIE

SEQ ID NO: 61583 - DNA, 821 bp, Triticum aestivum
  misc_feature (1)..(821): Ceres Seq. ID no. 13661243
acaacccacgagctgtctgtcatccaaagcccaaagctacagacaacacttcaactcgcagtctggttcaggaaagagcagtagtaagatggagttccaagggcagcacgacaaccccgccaaccgcgtcgacgagtacggcaacccgttcccgctcggcggcgtcggaggagcgcacgccgctcccggcaccggcgggcagttccaggcccgcagggaggagcacaagaccggtgggatactgcatcggtccggcagctccagctccagctcgtcttcggaggacgacggcatgggcgggaggaagaagaagggaatgaaggagaagatcaaggagaagctccccggcggccacaaggacaaccagcagcacatggcgacggggacagggactggaggagcctacgggccgggaactggaactggtgcagcctacgggcagcaaggccacacaggaatggccggcgccggcactggcaccggcgagaagaagggaatcatggacaagatcaaggagaagctgtcgggacagcactgagccgccggctccggctggctgcttcctctgcatagctacgtgtcaaagccttccagttccacgtgatctttgttcaataataagatgaagctgaacgaaaagttgtctcttatcgcatccgtgtcagggacacttctctgcataaagcatgcgttgtgtttgttatgtttatgttgaaaaaaaattagtgtacgactatccctaaaaaaaatccctcaaaaaaaaaatagtgtacgactaaacttgtttctctctaaaggaaatcaggctctcctttctgttc

SEQ ID NO: 61584 - protein, 178 aa, Triticum aestivum
  peptide (1)..(178): Ceres Seq. ID no. 13661244
QPTSCLSSKAQSYRQHFNSQSGSGKSSSKMEFQGQHDNPANRVDEYGNPFPLGGVGGAHAAPGTGGQFQARREEHKTGGILHRSGSSSSSSSSEDDGMGGRKKKGMKEKIKEKLPGGHKDNQQHMATGTGTGGAYGPGTGTGAAYGQQGHTGMAGAGTGTGEKKGIMDKIKEKLSGQH

SEQ ID NO: 61585 - protein, 149 aa, Triticum aestivum
  peptide (1)..(149): Ceres Seq. ID no. 13661245
MEFQGQHDNPANRVDEYGNPFPLGGVGGAHAAPGTGGQFQARREEHKTGGILHRSGSSSSSSSSEDDGMGGRKKKGMKEKIKEKLPGGHKDNQQHMATGTGTGGAYGPGTGTGAAYGQQGHTGMAGAGTGTGEKKGIMDKIKEKLSGQH

SEQ ID NO: 61586 - protein, 105 aa, Triticum aestivum
  peptide (1)..(105): Ceres Seq. ID no. 13661246
NPRAVCHPKPKATDNTSTRSLVQERAVVRWSSKGSTTTPPTASTSTATRSRSAASEERTPLPAPAGSSRPAGRSTRPVGYCIGPAAPAPARLRRTTAWAGGRRRE

SEQ ID NO: 61587 - DNA, 936 bp, Triticum aestivum
  misc_feature (1)..(936): Ceres Seq. ID no. 12624280
atcagaatgagaagataaacggatccgatctaggtcgtctcttcttcttcttcttcttcttcttcgatatctatctccatcgtggatcgaagagctaaggtggaacatggacaaaggcaaagcagtgatgggtgctggccggagatgggccgtcgatttctccgatcaatctaccgttccatcttcccgcgacatcctcgatccgcctggcttctctcgtgctcctcccgaacaggatgattcagcaacgagccgccaaaagaaagacgctgaagctaattggaaacttcagaaagcatgggaagtagcgcagtcaccgtttaagaatctgatgatgatggggttcatgatgtggatggctgggaacactgttcacctctttagcattgggatcactttctctgctctttggcagcctctcagcgccctccagagtgttggcaagatttttgagccattcaaggataacaaggtggagctacttatgcccaaactagtgtttcttgcactaaaccttggagggctagctctgggtatctggaagctcaacactttggggcttcttccaacacatgcatcagattgggtttcatccttaccccctcctcaggaggttgaacactctggaggaggatatgttttccactgacaagcaagtctctctctctctctctctgtcttgtactttaaataatcagccaaaactggaagatgatgaagacattttttgtgagataacagccagagaaacttaaaccgccatgagggggaaagattcatatgaaccttctcatcttgtgatcttcatgtagcatttccaaaactcagaaaccatatagctttttcactttttcaagtatcatgttcattgttcatcattactacgaactgcattattatcaccaaagggacctattctcccagctttttgtttct

SEQ ID NO: 61588 - protein, 180 aa, Triticum aestivum
  peptide (1)..(180): Ceres Seq. ID no. 12624281
MDKGKAVMGAGRRWAVDFSDQSTVPSSRDILDPPGFSRAPPEQDDSATSRQKKDAEANWKLQKAWEVAQSPFKNLMMMGFMMWMAGNTVHLFSIGITFSALWQPLSALQSVGKIFEPFKDNKVELLMPKLVFLALNLGGLALGIWKLNTLGLLPTHASDWVSSLPPPQEVEHSGGGYVFH

SEQ ID NO: 61589 - protein, 173 aa, Triticum aestivum
  peptide (1)..(173): Ceres Seq. ID no. 12624282
MGAGRRWAVDFSDQSTVPSSRDILDPPGFSRAPPEQDDSATSRQKKDAEANWKLQKAWEVAQSPFKNLMMMGFMMWMAGNTVHLFSIGITFSALWQPLSALQSVGKIFEPFKDNKVELLMPKLVFLALNLGGLALGIWKLNTLGLLPTHASDWVSSLPPPQEVEHSGGGYVFH

SEQ ID NO: 61590 - protein, 105 aa, Triticum aestivum
  peptide (1)..(105): Ceres Seq. ID no. 12624283
MMMGFMMWMAGNTVHLFSIGITFSALWQPLSALQSVGKIFEPFKDNKVELLMPKLVFLALNLGGLALGIWKLNTLGLLPTHASDWVSSLPPPQEVEHSGGGYVFH

SEQ ID NO: 61591 - DNA, 838 bp, Triticum aestivum
  misc_feature (1)..(838): Ceres Seq. ID no. 13598227
gcataccccgaaggatcattgttcgctgacgccgcctcctttggtccttcctctcctcccgtcccctcccctccgccgcgatcgatcccaagagcacgaaaccctagccctagcccaacccatcttctccatggccaacagcaacctcccccgccgcatcatcaaggagacgcagcggctgctcagcgaaccagctcctgggatcagtgcttcaccatcagaggagaacatgcgctacttcaatgtcatgatccttggcccaactcagtcgccatatgaaggaggagtattcaaacttgagttgtttttacctgaagaatatccaatggctccgccaaaggttcgctttctcacaaaaatttaccatccaaacattgacaagcttgggaggatatgccttgatatcttaaaggacaagtggagtcctgcccttcagatccgaacagttcttttgagcattcaagcactcctcagcgctccaaatcctgacgatccgcttgctgacaatgtggcaaagcactggaaggccaacgaaacagaagctgtggaaacagccaaagagtggacccgtgtctacgctaatgatgcatgagctctgcatgctatgactgattgctcagtagtcttggcaaggtgaggcgaaatcgactatcaagtggtttaaaatggaggtccaactgatgaactagtgaaatgtgaagtttcctccttgcatcgcgtgtactgagtgtgatgtatattattaccctagttgggatgcgacggacccatgtgcatgtatattttgtttgagtgttgtaccgtaataaacatcctgaagtcatgtgtgccttttctg

SEQ ID NO: 61592 - protein, 196 aa, Triticum aestivum
  peptide (1)..(196): Ceres Seq. ID no. 13598228
HTPKDHCSLTPPPLVLPLLPSPPLRRDRSQEHETLALAQPIFSMANSNLPRRIIKETQRLLSEPAPGISASPSEENMRYFNVMILGPTQSPYEGGVFKLELFLPEEYPMAPPKVRFLTKIYHPNIDKLGRICLDILKDKWSPALQIRTVLLSIQALLSAPNPDDPLADNVAKHWKANETEAVETAKEWTRVYANDA

SEQ ID NO: 61593 - protein, 153 aa, Triticum aestivum
  peptide (1)..(153): Ceres Seq. ID no. 13598229
MANSNLPRRIIKETQRLLSEPAPGISASPSEENMRYFNVMILGPTQSPYEGGVFKLELFLPEEYPMAPPKVRFLTKIYHPNIDKLGRICLDILKDKWSPALQIRTVLLSIQALLSAPNPDDPLADNVAKHWKANETEAVETAKEWTRVYANDA

SEQ ID NO: 61594 - protein, 120 aa, Triticum aestivum
  peptide (1)..(120): Ceres Seq. ID no. 13598230
MRYFNVMILGPTQSPYEGGVFKLELFLPEEYPMAPPKVRFLTKIYHPNIDKLGRICLDILKDKWSPALQIRTVLLSIQALLSAPNPDDPLADNVAKHWKANETEAVETAKEWTRVYANDA

SEQ ID NO: 61595 - DNA, 669 bp, Triticum aestivum
  misc_feature (1)..(669): Ceres Seq. ID no. 12624284
actacctactcctaacaaacaacaatgagcttcttcatcgaagattctggtctcatcgtcacacaacttctctaccaaatggcggtcttaatcaccctcttgagatggatctttacttggatcttacgctaccgatccagatctacctcctcctcttcttcatctactcctccgatctcgtcacaaaccatcaaagagagcctcgccgtgacgacgttccgtgacgccgcggatcggtctccggaactgatcagcgacacttgcgcggtgtgtcttggagatctggaagacggagacgaggtgagagagctcagaaactgtagccacgtgttccaccgagagtgtatcgacaggtggctggactacgagtgctgcggcggagatgataacgacggcgaggaagataaccaccgcacgtgtcctctttgtagaactccgcttcttgctgctaatacgtcgtcgtgtgcggattggccggttaagaacgaacctagctgggccgttgagcggcttctctacctcttcggagatgatcttcttgtctgactttttattttatttttctttcgatatttatttgattttagtggagattgaaattagttggtcaagttttgtaaattgggaatttaaagggtagaatagcatatataataatatatcaatttt

SEQ ID NO: 61596 - protein, 173 aa, Triticum aestivum
  peptide (1)..(173): Ceres Seq. ID no. 12624285
MSFFIEDSGLIVTQLLYQMAVLITLLRWIFTWILRYRSRSTSSSSSSTPPISSQTIKESLAVTTFRDAADRSPELISDTCAVCLGDLEDGDEVRELRNCSHVFHRECIDRWLDYECCGGDDNDGEEDNHRTCPLCRTPLLAANTSSCADWPVKNEPSWAVERLLYLFGDDLLV

SEQ ID NO: 61597 - protein, 155 aa, Triticum aestivum
  peptide (1)..(155): Ceres Seq. ID no. 12624286
MAVLITLLRWIFTWILRYRSRSTSSSSSSTPPISSQTIKESLAVTTFRDAADRSPELISDTCAVCLGDLEDGDEVRELRNCSHVFHRECIDRWLDYECCGGDDNDGEEDNHRTCPLCRTPLLAANTSSCADWPVKNEPSWAVERLLYLFGDDLLV

SEQ ID NO: 61598 - DNA, 902 bp, Triticum aestivum
  misc_feature (1)..(902): Ceres Seq. ID no. 13661642
aacaaaaaacactttaaaatccaaaaagaaagaaagagaaattaaacatcttatccaaaatcaagactctgttttcgtttcattcgatggatccattttacacttctttttcagattccttcctctcgatccccgaccacaggtctcctgtttctgacagtagtgagtgttctccaaagctagcttcgagctgtccgaagaaactagcagggagaaagaagtttcgtgagacacgtcatccgatttacagaggagttcgtcagagaaactcagggaaatgggtttgtgaagttagggagcctaataagaagtcgaggatttggttagggacttttccgacagtcgaaatggccgctcgtgctcacgacgtcgccgctttagcccttcgtggccgctccgcttgtcttaatttcgccgactcggcttggcgtctacggattcctgagtctacttgtcctaaagaaattcagagagctgcggctgaagctgcaatggcgtttcagaacaagacggctacgactgagacgactatggttgaggcagtgaaaccggcagaggagacggttgggcaaacgggtggggagaccatggaagagaacggtgtgttttatatggccgaagaagcggttttggggatgccaaggtttcttgagaatatgggggaggagatgctcttgccgccgccggaacttggatggaatcataacgacttggccggagatgctgacgtgtcactctggagtttttagaatttgaatcttctcttattattcagattttgtaagattttttgaatttctaggattggtcaaaagttcaactacctactttttattggtagactggtagtacgatacggaaagagaatggagatatacaaatctaataaattctatattact

SEQ ID NO: 61599 - protein, 220 aa, Triticum aestivum
  peptide (1)..(220): Ceres Seq. ID no. 13661643
MDPFYTSFSDSFLSIPDHRSPVSDSSECSPKLASSCPKKLAGRKKFRETRHPIYRGVRQRNSGKWVCEVREPNKKSRIWLGTFPTVEMAARAHDVAALALRGRSACLNFADSAWRLRIPESTCPKEIQRAAAEAAMAFQNKTATTETTMVEAVKPAEETVGQTGGETMEENGVFYMAEEAVLGMPRFLENMGEEMLLPPPELGWNHNDLAGDADVSLWSF

SEQ ID NO: 61600 - protein, 133 aa, Triticum aestivum
  peptide (1)..(133): Ceres Seq. ID no. 13661644
MAARAHDVAALALRGRSACLNFADSAWRLRIPESTCPKEIQRAAAEAAMAFQNKTATTETTMVEAVKPAEETVGQTGGETMEENGVFYMAEEAVLGMPRFLENMGEEMLLPPPELGWNHNDLAGDADVSLWSF

SEQ ID NO: 61601 - DNA, 690 bp, Triticum aestivum
  misc_feature (1)..(690): Ceres Seq. ID no. 12627433
cttcaactccatcggtaattacctaatctaagcgtattgcatcagtttttttcacatgttatgattgtattgttcttgttgaaacagagagacagggttgaaggaagtgtttgggatcttcagcaaacagacagatctgattggtcaacaggaagctcggatccaaactcatggcaaccttttagtgatgaaccaaaacctgtgttggaaactccatcaaagtctgtgagaaccaaaagcaaaccagcttcgtcagctcctgctccagcaagccaaggttttgagccatgggggttcgagacagagtccttcagagctgctgcaacgtcttcagcgtctgcaacaccaaaatctgtaagttctggcaacagttcacagagatttgggaacacaaagatgagagataaccagaaagctgctcaacctgctggatgggctggcttctaaaaagctttcactctatctcaatgcttattgctattcctcgtattacagaatcttgaatctttttgtagatgaatgaccatcctctgtttttgtgttgctctctatatatatccactgtttctgtagattgtttaaaatttacagatttgtttttttttttttttggcggaatgtataacgtatttctgaaaatgatcaaacgattgatcatattaccttactggaaaaaaaaatatatttaag

SEQ ID NO: 61602 - protein, 128 aa, Triticum aestivum
  peptide (1)..(128): Ceres Seq. ID no. 12627434
MIVLFLLKQRDRVEGSVWDLQQTDRSDWSTGSSDPNSWQPFSDEPKPVLETPSKSVRTKSKPASSAPAPASQGFEPWGFETESFRAAATSSASATPKSVSSGNSSQRFGNTKMRDNQKAAQPAGWAGF

SEQ ID NO: 61603 - DNA, 992 bp, Triticum aestivum
  misc_feature (1)..(992): Ceres Seq. ID no. 13664279
attattctctttgcattttgtgttcgttgacccgataacaaaaaaggcatcgaagatgaacgttagggttttgtttctggctctccttctccttgcatcgccgctgcttcaagttgctagatgtcaagtagatgccgaggatcattccagtatcgttgacgatgttgtgggagaacacagcgattctggtgctgaggaggatgatcaggatttggataatatcaacttgacctctgctccaggggttgagactgtctctgttttccccaaaaacagtgccaaagtggttccagctggagaagagactgagctccttgttgctctcaagaacgatggcaaatctagcgtaggtgtgatggggattagggccagcgtccatcttccttatgatcacaagctgttggttcagaatctcaccatgatgaggtacaacaatgcgtccatcccaacttctgttcaagcaacattcccttacatctttgcagtcagccagtacctgcagcctggagcgtttgatctggtgggttatattatctacgacgtggaggggaagccataccagagcgtcttctacaatggaaccatcgaggtagttgaatctggaggtcttctcagcggtgagtctgtcttccttataacacttggagttgctctcctcctcctcctcggtctatgggcatacagccaagtccagcgtctcactaagaaaaccaaaaaggtgtcaaaggtggaagtaggaaccaggtctaccgacgcatcgctggacgagtggctcgagggaactcatttggccaagacattgtctgggaaatcaaaaagcaagaagaactaagaaagaacgcagtgtttagagactcgacttttagcgttttgagagagtttacaagttttaaagttgagtcttgaggaactttagggtttataaacgttactttccttttttttgttcatgcatttgtactttttagacaatcttatcactctttcttgtc

SEQ ID NO: 61604 - protein, 276 aa, Triticum aestivum
  peptide (1)..(276): Ceres Seq. ID no. 13664280
LFSLHFVFVDPITKKASKMNVRVLFLALLLLASPLLQVARCQVDAEDHSSIVDDVVGEHSDSGAEEDDQDLDNINLTSAPGVETVSVFPKNSAKVVPAGEETELLVALKNDGKSSVGVMGIRASVHLPYDHKLLVQNLTMMRYNNASIPTSVQATFPYIFAVSQYLQPGAFDLVGYIIYDVEGKPYQSVFYNGTIEVVESGGLLSGESVFLITLGVALLLLLGLWAYSQVQRLTKKTKKVSKVEVGTRSTDASLDEWLEGTHLAKTLSGKSKSKKN

SEQ ID NO: 61605 - protein, 258 aa, Triticum aestivum
  peptide (1)..(258): Ceres Seq. ID no. 13664281
MNVRVLFLALLLLASPLLQVARCQVDAEDHSSIVDDVVGEHSDSGAEEDDQDLDNINLTSAPGVETVSVFPKNSAKVVPAGEETELLVALKNDGKSSVGVMGIRASVHLPYDHKLLVQNLTMMRYNNASIPTSVQATFPYIFAVSQYLQPGAFDLVGYIIYDVEGKPYQSVFYNGTIEVVESGGLLSGESVFLITLGVALLLLLGLWAYSQVQRLTKKTKKVSKVEVGTRSTDASLDEWLEGTHLAKTLSGKSKSKKN

SEQ ID NO: 61606 - protein, 158 aa, Triticum aestivum
  peptide (1)..(158): Ceres Seq. ID no. 13664282
MGIRASVHLPYDHKLLVQNLTMMRYNNASIPTSVQATFPYIFAVSQYLQPGAFDLVGYIIYDVEGKPYQSVFYNGTIEVVESGGLLSGESVFLITLGVALLLLLGLWAYSQVQRLTKKTKKVSKVEVGTRSTDASLDEWLEGTHLAKTLSGKSKSKKN

SEQ ID NO: 61607 - DNA, 893 bp, Triticum aestivum
  misc_feature (1)..(893): Ceres Seq. ID no. 13661656
caagaatcgaaactcctctctctctctgtcttttacacctcaccaagaacacacaaagagcaagagagagaagaaacccacaatggccacttccttctccgccgcgacgccttttgttttcatcctcctcctctccatctcctccgtcaccgttcacggcgcatctcaccaccacacggcggctccggctccggctgtagactgttcgactctcataatcaacatggcggattgtttggacttcgtcatggccggaggcacgtcggcgaaaccgaagagttcgtgttgcgcggggcttaagacagtgcttaaggctgacgcagagtgtctttgtgaggcgtttaaaaacagtgctgcttttggaatcaccttgaacatgaccaaggctgctacacttcccaccgcatgcaagcttcatgctccttctatttctaactgtggattgtctatgactcctactatggctccaggtcttgctccaggaggtgcggttgctgctggacccggcgcagctggaacaaccctagctccaaccccgtctcaggggaacgacggatcttccttgattccgatctcgttcaccaccctattcagcgctttattcttcgtattgttcttgtctcgtgtgtaaaagagcctgcgcctttctcactatctatagatttggatttatgatatgctttagggctttttaagactgagctttgtgtcttggagtgtcttctgttttagacaatttcgggtttctgcagtagttttactctcttaatttatgttattattttgtcgcacattgatcttttatattaatggtatctctcattccccwaagtgggaatctggaggggggctcattccccmaaaaaaaaaaaaaaaaagcttatcgataccgt

SEQ ID NO: 61608 - protein, 209 aa, Triticum aestivum
  peptide (1)..(209): Ceres Seq. ID no. 15220123
KNRNSSLSLSFTPHQEHTKSKREKKPTMATSFSAATPFVFILLLSISSVTVHGASHHHTAAPAPAVDCSTLIINMADCLDFVMAGGTSAKPKSSCCAGLKTVLKADAECLCEAFKNSAAFGITLNMTKAATLPTACKLHAPSISNCGLSMTPTMAPGLAPGGAVAAGPGAAGTTLAPTPSQGNDGSSLIPISFTTLFSALFFVLFLSRV

SEQ ID NO: 61609 - protein, 182 aa, Triticum aestivum
  peptide (1)..(182): Ceres Seq. ID no. 15220124
MATSFSAATPFVFILLLSISSVTVHGASHHHTAAPAPAVDCSTLIINMADCLDFVMAGGTSAKPKSSCCAGLKTVLKADAECLCEAFKNSAAFGITLNMTKAATLPTACKLHAPSISNCGLSMTPTMAPGLAPGGAVAAGPGAAGTTLAPTPSQGNDGSSLIPISFTTLFSALFFVLFLSRV

SEQ ID NO: 61610 - protein, 135 aa, Triticum aestivum
  peptide (1)..(135): Ceres Seq. ID no. 15220125
MADCLDFVMAGGTSAKPKSSCCAGLKTVLKADAECLCEAFKNSAAFGITLNMTKAATLPTACKLHAPSISNCGLSMTPTMAPGLAPGGAVAAGPGAAGTTLAPTPSQGNDGSSLIPISFTTLFSALFFVLFLSRV

SEQ ID NO: 61611 - DNA, 683 bp, Triticum aestivum
  misc_feature (1)..(683): Ceres Seq. ID no. 13661859
aatcgtattagtcccactttggttggcttaggattgttcttgcatcatcttaaaaatggcttcgctttctttactcagcggcggtgctctccaggctcgttgcgcaagacatgcgcatgttagcccacgcgcggcgcatcctaccaaaccagctcctccgtcctcctctctaactggcgcctctcgcaggaacctgctgttttccctgacggcagcgacggtggtgacgggactgcagcctgcatcaatggcggagactattccgttgttcgggatcagaaagaagctgaagaaggcagaagaagaagcggtggagatcgtgaaggaaggcttcgagacggcggagaaaggactagagacggctgagaagggattagaggcggcggagaagggagtagagacggcggagaaagaaatcgagacggcggttagttataacggattgacgcaggcgggagcagttgtggcggctgagttcatcggagttcttgtcgcaacttcagtcgtcaacgggattttaggacctgaagcccagaagtcgtagacttttatcatttcaagactgaaagacatttgatctttaagtgtaatattgtgtctaaaagttgtgttaattaagcgttgaacgtatgtaatcttgattgagttttgataatatatagttttaatttattttcatttgg

SEQ ID NO: 61612 - protein, 162 aa, Triticum aestivum
  peptide (1)..(162): Ceres Seq. ID no. 15220705
MASLSLLSGGALQARCARHAHVSPRAAHPTKPAPPSSSLTGASRRNLLFSLTAATVVTGLQPASMAETIPLFGIRKKLKKAEEEAVEIVKEGFETAEKGLETAEKGLEAAEKGVETAEKEIETAVSYNGLTQAGAVVAAEFIGVLVATSVVNGILGPEAQKS

SEQ ID NO: 61613 - protein, 98 aa, Triticum aestivum
  peptide (1)..(98): Ceres Seq. ID no. 15220706
MAETIPLFGIRKKLKKAEEEAVEIVKEGFETAEKGLETAEKGLEAAEKGVETAEKEIETAVSYNGLTQAGAVVAAEFIGVLVATSVVNGILGPEAQKS

SEQ ID NO: 61614 - DNA, 1066 bp, Triticum aestivum
  misc_feature (1)..(1066): Ceres Seq. ID no. 13661330
gccgaatcacttcactaatcttgcgtccctcttccagctgcagctctgtccaagcgatcgatcgtccgctgtctgtccaacgagctctttctagctcgatcgaggcacgccattgccatggaagccgcacggatcgcgtcctttctgctcctcctcggggtcgtttggtcacgcgcacagcccggcgccgaggcggccggcacgacggtcttcacactgcgcaacaactgcaccttcacgatctggccggccacattgtccggcaacagcgccgtcgccgtcgggggcggcggcttcgagctcgcgccgggcgccaacgtgtcgttccccggcccgacgggctggtccggccggctctgggcgcgcaccggctgcgtcgccgccgcctccggcgcgtccctcgcctgcgccacgggcgactgcggcggcgccgtgcgctgcaccctgggcggggcgccccccgtcacgctcgccgagttcaccctcgggggcgcggacggcaaggacttctacgacgtgagcctggtggacgggtacaacgtcggcatcggcgtggcggccacgggcgccagggtgaactcctcgacatgcggctacgccgggtgcgtgggcgacgtgaacgcgctgtgccccgcggagctgcaggtggccggcaaggaaggggaccaggaggggaagacggtggcgtgccggagcgcgtgcgaggcgttcgggacggccgagtactgctgcacgggcgcgcacggcgggccgaacagctgcgggccgaccaagtactcgaggctgttcaaggcggcatgccccgccgcgtacagctacgcctacgacgatcccaccagcaccttcacctgcggcgccggagcgcagtacctcatcaccttttgcccggcgcagcagtagtccggcccttcgattttggctagtagtgtcgttcattcatcgttatggtgtctcgattttggttagtactatcgttcatccgaattaccagatgtttattggtttggtcgtgtcaatatgtatgcttttgattcattcatttcaaaaaaaaaagaaatatgctttt

SEQ ID NO: 61615 - protein, 306 aa, Triticum aestivum
  peptide (1)..(306): Ceres Seq. ID no. 13661331
RITSLILRPSSSCSSVQAIDRPLSVQRALSSSIEARHCHGSRTDRVLSAPPRGRLVTRTARRRGGRHDGLHTAQQLHLHDLAGHIVRQQRRRRRGRRLRARAGRQRVVPRPDGLVRPALGAHRLRRRRLRRVPRLRHGRLRRRRALHPGRGAPRHARRVHPRGRGRQGLLRREPGGRVQRRHRRGGHGRQGELLDMRLRRVRGRRERAVPRGAAGGRQGRGPGGEDGGVPERVRGVRDGRVLLHGRARRAEQLRADQVLEAVQGGMPRRVQLRLRRSHQHLHLRRRSAVPHHLLPGAAVVRPFDFG

SEQ ID NO: 61616 - protein, 260 aa, Triticum aestivum
  peptide (1)..(260): Ceres Seq. ID no. 13661332
MEAARIASFLLLLGVVWSRAQPGAEAAGTTVFTLRNNCTFTIWPATLSGNSAVAVGGGGFELAPGANVSFPGPTGWSGRLWARTGCVAAASGASLACATGDCGGAVRCTLGGAPPVTLAEFTLGGADGKDFYDVSLVDGYNVGIGVAATGARVNSSTCGYAGCVGDVNALCPAELQVAGKEGDQEGKTVACRSACEAFGTAEYCCTGAHGGPNSCGPTKYSRLFKAACPAAYSYAYDDPTSTFTCGAGAQYLITFCPAQQ

SEQ ID NO: 61617 - DNA, 1002 bp, Triticum aestivum
  misc_feature (1)..(1002): Ceres Seq. ID no. 15224408
tctagcatcgctactgaaactgaatttatcttctgaatctttgacttcaattcccatacaacaatggtcatctctactgcgcctggatgtttggaactgtagcaaattaacaacagttgacttcactcctcgttccttaccagcagtaaaagtaatcacaattcgaaattgtgaagctttattgtctctacctggcgaaacgtttgtggagttctgttgtctagaggaattgatgatacgtgaatgtccaaatattgagtggagaggcttgacatttcctatatcgcttcgggagctgtacctcaatgactgtggagacatctcaccatgggttccgaactcactggagcacctcaaccacttaacccatctggcgttgatgaacctcaagtacatcaaatctatctctgcacaaatatgggcacagagtttgtcaaagctggaattcttgcagatctgtgagtgtcctcatctgcaagcgattggtggtcccaaaggaattgcaggcattactaatgcatttgttgaatcgtgtgacaagctaaagggtataaagcaacctttccggagaggtagaatggcccacttcggccacttttgacacatgttagctcctgcaggtggagtcgaaccagagagaaggcgtgaagtgccaaagtgaccctgaacctcctgaagcctgaagagggttaaacccctgtgacttgttactctgctttcttgctttggtggtccgagaggtgagagcaaatggcttaacaaacatgaagcctgacgttttttttccttggttttcttttggcgaagcaaagagcaccgtagcaggcaggcaatttccccgtaactgatactcttgcgttcctgcgctgtgatgtctggtggtgagtttaggacctttcccctgtgttgagcatatgcgctttggcccgcccaaaggtgatgacgcttttgctgttatggcaattggcaagtggtagcaaattgatgaactatttgtccttt

SEQ ID NO: 61618 - protein, 199 aa, Triticum aestivum
  peptide (1)..(199): Ceres Seq. ID no. 15224409
LASLLKLNLSSESLTSIPIQQWSSLLRLDVWNCSKLTTVDFTPRSLPAVKVITIRNCEALLSLPGETFVEFCCLEELMIRECPNIEWRGLTFPISLRELYLNDCGDISPWVPNSLEHLNHLTHLALMNLKYIKSISAQIWAQSLSKLEFLQICECPHLQAIGGPKGIAGITNAFVESCDKLKGIKQPFRRGRMAHFGHF

SEQ ID NO: 61619 - protein, 122 aa, Triticum aestivum
  peptide (1)..(122): Ceres Seq. ID no. 15224410
MIRECPNIEWRGLTFPISLRELYLNDCGDISPWVPNSLEHLNHLTHLALMNLKYIKSISAQIWAQSLSKLEFLQICECPHLQAIGGPKGIAGITNAFVESCDKLKGIKQPFRRGRMAHFGHF

SEQ ID NO: 61620 - DNA, 768 bp, Triticum aestivum
  misc_feature (1)..(768): Ceres Seq. ID no. 13661333
acctagaacatcctaatcgaaaaatattcgaaaaaagatcttcgttttctctgcgtctcctttcagcagtctttgacagcgtcttgattcagccatggctaacgcggcgtcgggaatggcagtccatgatgactgcaagctaaggttcctggaactgaaggcgaagaggacgcaccgtttcattgtttacaagatcgaggagaagcagaagcaagtgattgttgagaaagttggtgagcctattcaaacctacgaggactttgctgcgagcctccctgctgaagagtgccgatacgccatttatgacttcgactttgtcactgcggagaattgccagaagagcaagattttcttcattgcgtggtgtcctgacgtagcaaaggtgagaagcaagatgatctatgcgagctccaaggacaggttcaagcgtgagcttgatggaattcaagtggagcttcaagcgactgatccaactgagatggatcttgatgttttcaaaagccgtgtcaattaaaaaacaaatattctctctctctctctctctctctctttgaataagcttctttggctcttacagtttcctgcgactgtataaaaacataacgccctttattctatccttatctggtctcgtcttctgcgtcgttgttaccgaacagtgttttcatcttatattgaaagttatcccaacgtttgtgctgaaaaaaaaaaaaaaaaaagcttatcgataccgtcgactgtttaaacwcrataaagggggggcccggt

SEQ ID NO: 61621 - protein, 139 aa, Triticum aestivum
  peptide (1)..(139): Ceres Seq. ID no. 15218799
MANAASGMAVHDDCKLRFLELKAKRTHRFIVYKIEEKQKQVIVEKVGEPIQTYEDFAASLPAEECRYAIYDFDFVTAENCQKSKIFFIAWCPDVAKVRSKMIYASSKDRFKRELDGIQVELQATDPTEMDLDVFKSRVN

SEQ ID NO: 61622 - protein, 132 aa, Triticum aestivum
  peptide (1)..(132): Ceres Seq. ID no. 15218800
MAVHDDCKLRFLELKAKRTHRFIVYKIEEKQKQVIVEKVGEPIQTYEDFAASLPAEECRYAIYDFDFVTAENCQKSKIFFIAWCPDVAKVRSKMIYASSKDRFKRELDGIQVELQATDPTEMDLDVFKSRVN

SEQ ID NO: 61623 - DNA, 791 bp, Triticum aestivum
  misc_feature (1)..(791): Ceres Seq. ID no. 15224870
actctccaaaaccaccaaaatctccatcccctccgtgcaccggattccatccaactgctccaccactctaatctctctctcatggcgacggccaccgcgagtcggcccagcggcccggtcctgtcgatccccagctaccgctccgcctcgccaacccgcgtcaaggtcgccacccgcttgccgggcaagtccgtcagcgtctcctccccgtcctccaccaggagccatcggtcctcctgcatgtgctccccgacgaaccacccgggctcgttccgctgcagcctccacaaggagcgcaagcagccggcccacgctggcagcagcagcaggcccgcctccccgccttccccgccgtccacctcgaagagcacgggcggcgcgctggcgaggctcgtccccatggggagcgggcactgggcacgcagggcgctagcgccgtcccccgcggcgcagcagtcgctacagcaccggaggcgcgcgggcgggttccgcccccggccgagcaggctctccgccgtgtccacggccggcgacagccagtagacgaacagcgtctgacatgaagaattgcctgaagaaattgaagtttttagaaccaattcgatacctgcgtcgacatgccatggcaagatagtagagtagtgctagtagatagcaaagaaattgcctgaagaattggagtttttagaaccaattcgatacctgcctggagagttgatgagcccgtccgtaactgtacagaatgcatttttctagcaagcatgaatggcgttaattgagattcaagaagc

SEQ ID NO: 61624 - protein, 180 aa, Triticum aestivum
  peptide (1)..(180): Ceres Seq. ID no. 15224871
TLQNHQNLHPLRAPDSIQLLHHSNLSLMATATASRPSGPVLSIPSYRSASPTRVKVATRLPGKSVSVSSPSSTRSHRSSCMCSPTNHPGSFRCSLHKERKQPAHAGSSSRPASPPSPPSTSKSTGGALARLVPMGSGHWARRALAPSPAAQQSLQHRRRAGGFRPRPSRLSAVSTAGDSQ

SEQ ID NO: 61625 - protein, 153 aa, Triticum aestivum
  peptide (1)..(153): Ceres Seq. ID no. 15224872
MATATASRPSGPVLSIPSYRSASPTRVKVATRLPGKSVSVSSPSSTRSHRSSCMCSPTNHPGSFRCSLHKERKQPAHAGSSSRPASPPSPPSTSKSTGGALARLVPMGSGHWARRALAPSPAAQQSLQHRRRAGGFRPRPSRLSAVSTAGDSQ

SEQ ID NO: 61626 - protein, 143 aa, Triticum aestivum
  peptide (1)..(143): Ceres Seq. ID no. 15224873
LSKTTKISIPSVHRIPSNCSTTLISLSWRRPPRVGPAARSCRSPATAPPRQPASRSPPACRASPSASPPRPPPGAIGPPACAPRRTTRARSAAASTRSASSRPTLAAAAGPPPRLPRRPPRRARAARWRGSSPWGAGTGHAGR

SEQ ID NO: 61627 - DNA, 884 bp, Triticum aestivum
  misc_feature (1)..(884): Ceres Seq. ID no. 15226343
taataacatcaaaagctccatcaccaaaacccttccatattttcaagtaaagttttcaatgacttcatcaatggcgtcctcctccctttctcctgctactcagcttggttcgagcagaagctctttgttggcgatgtcgcgtgtgatgtttgtgaagccaacgaatcatcagatggtgaaaaaggagaagattggtctgagaattgcttgtcaagcgacgagtataccagcagacaatgttccagatatggaaaagaggaagcttttgaatcttcttcttgtcggggctctttctctccctactggcttcatgcttgtcccttacgctaccttctttgctcctcctggatccggaggtgggggtggtggtactccagccaaggatgcacttggaaacgatgtcgttgcagcagaatggcttaagactcatggtcccggtgatcgaaccttgacccaaggattaaagggagatccaacttacctagttgtggagaacgacaaaactctagcgacctacggtataaacgcagtgtgcactcatcttggatgtgttgtgccatggaacaaagctgagaacaagttcctatgcccttgccatggttcccaatacaacgcccaaggaagagtcgttagaggtccagcgccattgtcgcttgccttggctcacgccgatattgatgacagtggaaaggttctatttgttccatgggttgaaactgacttcaggactggtgatgctccatggtggtcttaaaactgtgcaacaactcttttgcctaatacttgtatgaatgttcttataatgtaaaagctatgtgtaaccatacatttcatggcattactctgtgaattcttccctcttatatgaattttatgttcattcg

SEQ ID NO: 61628 - protein, 250 aa, Triticum aestivum
  peptide (1)..(250): Ceres Seq. ID no. 15226344
NNIKSSITKTLPYFQVKFSMTSSMASSSLSPATQLGSSRSSLLAMSRVMFVKPTNHQMVKKEKIGLRIACQATSIPADNVPDMEKRKLLNLLLVGALSLPTGFMLVPYATFFAPPGSGGGGGGTPAKDALGNDVVAAEWLKTHGPGDRTLTQGLKGDPTYLVVENDKTLATYGINAVCTHLGCVVPWNKAENKFLCPCHGSQYNAQGRVVRGPAPLSLALAHADIDDSGKVLFVPWVETDFRTGDAPWWS

SEQ ID NO: 61629 - protein, 231 aa, Triticum aestivum
  peptide (1)..(231): Ceres Seq. ID no. 15226345
MTSSMASSSLSPATQLGSSRSSLLAMSRVMFVKPTNHQMVKKEKIGLRIACQATSIPADNVPDMEKRKLLNLLLVGALSLPTGFMLVPYATFFAPPGSGGGGGGTPAKDALGNDVVAAEWLKTHGPGDRTLTQGLKGDPTYLVVENDKTLATYGINAVCTHLGCVVPWNKAENKFLCPCHGSQYNAQGRVVRGPAPLSLALAHADIDDSGKVLFVPWVETDFRTGDAPWWS

SEQ ID NO: 61630 - protein, 227 aa, Triticum aestivum
  peptide (1)..(227): Ceres Seq. ID no. 15226346
MASSSLSPATQLGSSRSSLLAMSRVMFVKPTNHQMVKKEKIGLRIACQATSIPADNVPDMEKRKLLNLLLVGALSLPTGFMLVPYATFFAPPGSGGGGGGTPAKDALGNDVVAAEWLKTHGPGDRTLTQGLKGDPTYLVVENDKTLATYGINAVCTHLGCVVPWNKAENKFLCPCHGSQYNAQGRVVRGPAPLSLALAHADIDDSGKVLFVPWVETDFRTGDAPWWS

SEQ ID NO: 61631 - DNA, 1217 bp, Triticum aestivum
  misc_feature (1)..(1217): Ceres Seq. ID no. 15225659
aagcggacaaggccctatccatccatccatccccatcagatcacctccccacacatctgtgcgccacccgaacgaaagctaagccaccagcagccatggcatctcgcgacgccgccaccttccagctctaccggcccatggcaatgccgacggcgacgctcatgccccagacgatggcaatgcccggcttctcgtcggccgaggccgcggacgacgccgtggtgagagtgccggcgccgagaacggcgggggcggcgaagggcgccaaggaccggcacagcaaggtgaacgggcgcgggcggcgcgtgcgcatgccgatcgtgtgcgcggcgcgcgtgttccagctcacccgcgagctggggctcaagtcggacgggcagaccgtggagtggctgctccggcaggccgagccgtccatcctggccgccaccggctccggcaccaccccggccgtcttctcctgctcctccgcgccctccatcgccgccgtctccctcctcgggaagcggccgcgcgaggaccacgagcacgaggcggcgccgtcgttctgggaggcgctgcaggcccggcccgtaccctggggcctctccccgtcgctggaggcgcaggcgtacgcgtcgtcggtggcgcaggggcaccaccaccacctgaacctgctctccgcgctctccggcgcctccaggcggccagaggaggagtcccggtgaccgaccgccgctgcagctagcgccgagccgcgcgcgctctctacgtgatcgcatgcgctgacctgccagtgccctgctgcctaattcttggagccaagctagccaggtgttcctgcttgcttgcctgctgctgtgtggtgtggcttgccctacgtactttatcattttcttttgcttcctttctcctttgcgtgcaccgtgtgttttcttttgcgtggtttttggtctgggaagaaagaatggagaatctgggcagcatcagagattccaaggtagcaactgtagatacaagcctgctagagatcttaccaccccatctcgtcggatttgtgattgtgcttgtcactagttattactacagtgtattacgccactgccacggctctgccattccctgctgtctgtgacaagtcgattgatctatctaacacagtgccactcttgtaccactcgattgttgttttgcgtcaatggaagtccctctatctgtaggaatcgttttgccgatgc

SEQ ID NO: 61632 - protein, 234 aa, Triticum aestivum
  peptide (1)..(234): Ceres Seq. ID no. 15225660
ADKALSIHPSPSDHLPTHLCATRTKAKPPAAMASRDAATFQLYRPMAMPTATLMPQTMAMPGFSSAEAADDAVVRVPAPRTAGAAKGAKDRHSKVNGRGRRVRMPIVCAARVFQLTRELGLKSDGQTVEWLLRQAEPSILAATGSGTTPAVFSCSSAPSIAAVSLLGKRPREDHEHEAAPSFWEALQARPVPWGLSPSLEAQAYASSVAQGHHHHLNLLSALSGASRRPEEESR

SEQ ID NO: 61633 - protein, 203 aa, Triticum aestivum
  peptide (1)..(203): Ceres Seq. ID no. 15225661
MASRDAATFQLYRPMAMPTATLMPQTMAMPGFSSAEAADDAVVRVPAPRTAGAAKGAKDRHSKVNGRGRRVRMPIVCAARVFQLTRELGLKSDGQTVEWLLRQAEPSILAATGSGTTPAVFSCSSAPSIAAVSLLGKRPREDHEHEAAPSFWEALQARPVPWGLSPSLEAQAYASSVAQGHHHHLNLLSALSGASRRPEEESR

SEQ ID NO: 61634 - protein, 189 aa, Triticum aestivum
  peptide (1)..(189): Ceres Seq. ID no. 15225662
MAMPTATLMPQTMAMPGFSSAEAADDAVVRVPAPRTAGAAKGAKDRHSKVNGRGRRVRMPIVCAARVFQLTRELGLKSDGQTVEWLLRQAEPSILAATGSGTTPAVFSCSSAPSIAAVSLLGKRPREDHEHEAAPSFWEALQARPVPWGLSPSLEAQAYASSVAQGHHHHLNLLSALSGASRRPEEESR

SEQ ID NO: 61635 - DNA, 761 bp, Triticum aestivum
  misc_feature (1)..(761): Ceres Seq. ID no. 14301649
aaaacatagctcctctcctcctgtgcgcgctcaccgctgcacagtatccacccataagagcatataggcgcagtgcaacaggatcatcagtacgggttgcactagcttattaggctagcggctagcgagggagtaggcaggcactgcgcaggagctgatccatggcgagcacggtggagtcgccgacgagctcgtgcgtgtcgtcggacacggaggaggaggccgcggcggtgacgaagccgatggtggtggtggggtgcccgcagtgcctcatgtacgtgatgctgtcgggggcggcggaggagcagcccaggtgcccccggtgcaagagccccgtgctgctgcacttcctccacggcgctgccgccgccgccgccgccagcaccaacaggcagcagcccagcaagagctagccagccaacatgctgctgcttggtcgctgcatgctgcttgctgatcagccgctagcttctcctgccatcgatctccaccatgttctaactcgtgtattctgctgcactatgtagctcttcttttttcccttttcgtcgacgatagtaatttccatgcgagtaactctcaagaagacaagaacgcaaatcttttacagcctggtgcaattggctcggttttactctcgcttagcagtggctgtccttctccaacaacctttagatgtatgcacgtgttctgcaccgtgaaggtcgatgtctgttttaatcccctccttaatttcggtttgaataagatgagatttcacg

SEQ ID NO: 61636 - protein, 83 aa, Triticum aestivum
  peptide (1)..(83): Ceres Seq. ID no. 14301650
MASTVESPTSSCVSSDTEEEAAAVTKPMVVVGCPQCLMYVMLSGAAEEQPRCPRCKSPVLLHFLHGAAAAAAASTNRQQPSKS

SEQ ID NO: 61637 - protein, 56 aa, Triticum aestivum
  peptide (1)..(56): Ceres Seq. ID no. 14301651
MVVVGCPQCLMYVMLSGAAEEQPRCPRCKSPVLLHFLHGAAAAAAASTNRQQPSKS

SEQ ID NO: 61638 - protein, 46 aa, Triticum aestivum
  peptide (1)..(46): Ceres Seq. ID no. 14301652
MYVMLSGAAEEQPRCPRCKSPVLLHFLHGAAAAAAASTNRQQPSKS

SEQ ID NO: 61639 - DNA, 979 bp, Triticum aestivum
  misc_feature (1)..(979): Ceres Seq. ID no. 15226347
aataataataaaattcaacggaggccgccttcccttcaccggatcaccttccttcctttggatctatcttcccattccgacggttcttcgtttctcagagtatcaatctaccttggaacaatgactgaagtgtttaacggctacgagcgccaatactgcgacctctccgccaatctctccaagaaatgctcctctgctcttgcccttgacggagaacaaaagaagcagaagctctctgagataagatctggcctcgataatgctgaagcattgattaggaaaatggatgttgaggcgaggagccttccaccgagcattaggaccagcctccttgttaaactaagagagttcaagtctgatctcaacaacttcaaaagcgaagtcaagaggatcacatctgctaacttgaacgctgctgctcgcgacgagctgcttgaagctggtctggctgacacaaagacggcttcggctgatcaaagagcgagattgatgatgtcaaccgatcgattgggtcgaactactgacagaatcaaggacagtcgaagaatgatgattgagactgaagagcttggcgtttctgtcctccaagacttgcacagtcagagacagtctctccttcgcactggcgacacgcttagtggagtagacgaaaatgtcggaaagagcaagaagatcttgacaggcatgaccaggaggatgaacaggaacaagtggaccattggagccattatcaccgctttggtcgcggctattatcctcatcttgtacttcaaactcaccaagtaatccctctgtatctaaactctttgtcgctgaacaaatggtgtgcatcttttatttaatccttttctggctttctgtgtgataagttatgtctttgccaccttttctattatcacgttctcttgtttgcgtttgcgattacatttgtgtattttcatactaaatgatgcaaattgttttgttttattattattag

SEQ ID NO: 61640 - protein, 261 aa, Triticum aestivum
  peptide (1)..(261): Ceres Seq. ID no. 15226348
NNNKIQRRPPSLHRITFLPLDLSSHSDGSSFLRVSIYLGTMTEVFNGYERQYCDLSANLSKKCSSALALDGEQKKQKLSEIRSGLDNAEALIRKMDVEARSLPPSIRTSLLVKLREFKSDLNNFKSEVKRITSANLNAAARDELLEAGLADTKTASADQRARLMMSTDRLGRTTDRIKDSRRMMIETEELGVSVLQDLHSQRQSLLRTGDTLSGVDENVGKSKKILTGMTRRMNRNKWTIGAIITALVAAIILILYFKLTK

SEQ ID NO: 61641 - protein, 221 aa, Triticum aestivum
  peptide (1)..(221): Ceres Seq. ID no. 15226349
MTEVFNGYERQYCDLSANLSKKCSSALALDGEQKKQKLSEIRSGLDNAEALIRKMDVEARSLPPSIRTSLLVKLREFKSDLNNFKSEVKRITSANLNAAARDELLEAGLADTKTASADQRARLMMSTDRLGRTTDRIKDSRRMMIETEELGVSVLQDLHSQRQSLLRTGDTLSGVDENVGKSKKILTGMTRRMNRNKWTIGAIITALVAAIILILYFKLTK

SEQ ID NO: 61642 - protein, 167 aa, Triticum aestivum
  peptide (1)..(167): Ceres Seq. ID no. 15226350
MDVEARSLPPSIRTSLLVKLREFKSDLNNFKSEVKRITSANLNAAARDELLEAGLADTKTASADQRARLMMSTDRLGRTTDRIKDSRRMMIETEELGVSVLQDLHSQRQSLLRTGDTLSGVDENVGKSKKILTGMTRRMNRNKWTIGAIITALVAAIILILYFKLTK

SEQ ID NO: 61643 - DNA, 887 bp, Triticum aestivum
  misc_feature (1)..(887): Ceres Seq. ID no. 13661963
aacgaatatatcctagctactcgatcttgtcccagccaataggtagctgcttctgtctgcctagtgaacttttctcgctagctaccagggaaaagaccacctcaccggtcaccaccatggctgggctagtgctagccaagtgccttcttctgttctccctctccgccgcgctcctctctctgctcggcaccggcgcctccgccattggcctgccccagcctcatgcgccagtgaacttcaccatcggcgtgcagggcatggtctggtgcaagacctgcaggtacatcggctacaatgccaacatggacgcctccccactcaaaggcgtggaggtgtacctgcagtgccggcacggcccggggcggctgaagaaggtgcaaggggcatcggggcagggcggctactttgtcatccagtcggcgcagatggcgtccttcaccaacgacgagtgcaaggtgtacgcggagagctcgtcgtcgaccgcgtgcagcctcgtcgacgaacccgctgccggcgaggggctgccgctcaagttcgactccttcgtcaagcacggcgatggcctgcaggcgctctactccgtcggcaacttcttcttccgccccagcaaccccaacaagtgctactgacgcatccatccgtcatgtacatacttgtgggacttgaataaatgggtcaggaactcaggatgaattagttgttggagtagctggggatatgcatccggtgctgtaatgttgatttaagtttcttctattgttgcagtagttttgtaagcttcttttaattagcaaccgcatgatcgaaataactcgaatatgattagggcagtgtatgtcctgtcatgtgatgactaaccgatgtgctacaaggctctatgtataact

SEQ ID NO: 61644 - protein, 208 aa, Triticum aestivum
  peptide (1)..(208): Ceres Seq. ID no. 13661964
RIYPSYSILSQPIGSCFCLPSELFSLATREKTTSPVTTMAGLVLAKCLLLFSLSAALLSLLGTGASAIGLPQPHAPVNFTIGVQGMVWCKTCRYIGYNANMDASPLKGVEVYLQCRHGPGRLKKVQGASGQGGYFVIQSAQMASFTNDECKVYAESSSSTACSLVDEPAAGEGLPLKFDSFVKHGDGLQALYSVGNFFFRPSNPNKCY

SEQ ID NO: 61645 - protein, 170 aa, Triticum aestivum
  peptide (1)..(170): Ceres Seq. ID no. 13661965
MAGLVLAKCLLLFSLSAALLSLLGTGASAIGLPQPHAPVNFTIGVQGMVWCKTCRYIGYNANMDASPLKGVEVYLQCRHGPGRLKKVQGASGQGGYFVIQSAQMASFTNDECKVYAESSSSTACSLVDEPAAGEGLPLKFDSFVKHGDGLQALYSVGNFFFRPSNPNKCY

SEQ ID NO: 61646 - protein, 123 aa, Triticum aestivum
  peptide (1)..(123): Ceres Seq. ID no. 13661966
MVWCKTCRYIGYNANMDASPLKGVEVYLQCRHGPGRLKKVQGASGQGGYFVIQSAQMASFTNDECKVYAESSSSTACSLVDEPAAGEGLPLKFDSFVKHGDGLQALYSVGNFFFRPSNPNKCY

SEQ ID NO: 61647 - DNA, 886 bp, Triticum aestivum
  misc_feature (1)..(886): Ceres Seq. ID no. 13661797
ctgcttggatggatcagccgagaccgcacacaccagccacaccactccaccgaagcgaaaggggacaaaggtttgcacgtcgccaagtcctgaaccattacctagcagagcagggatcccatcgacgaggcgaggacagaggtggatcaacaatggcgtcgcttctttcgccgaacaccgtcgctgcgaccacggcgaggccgtccggcaggaggagccgccttactcccagtgtcaccgccatggcaaccaagggcccgaagcccagctccggcggcacgaaaagatcgtcgggcactaccacggtgttcccggtggggaagcccgcgggcccgccgcggccggcgacgacgaaggggtcggcgcccgtgaagctgctgacgaacgtggagaagctacggctgctgaccaaggcggagaaggcgggcctgctgtccgcggcggagcgcgccgggctgtcgctgtcggcggtcgagcgcctcgggctgctgtccaaggcggaggagctcggggtgctgtcggccgccaccgaccctggcacccccggctcgctgcagggcctcgcgctcctgctgctggccgccggccccgccgtcgtcttcctcgtccccgagcagtacccctgggaggtggcgctccaggccgtcgccgccctcgtctgcgtcgccgggggctccgccgcgttcgccgcgtccagcttcgtgtccaggctccagggctcctccggctgatctcgacgaactctgcttgcttcagcatcgaccgagtgtcaattgccgcgtttgattctagcaccaatgatcttgcgtagagttaatctacttctgtaaagatgggctgatatttatacgatgcgccattcggttgcaatactgcaggtttttgt

SEQ ID NO: 61648 - protein, 269 aa, Triticum aestivum
  peptide (1)..(269): Ceres Seq. ID no. 13661798
CLDGSAETAHTSHTTPPKRKGTKVCTSPSPEPLPSRAGIPSTRRGQRWINNGVASFAEHRRCDHGEAVRQEEPPYSQCHRHGNQGPEAQLRRHEKIVGHYHGVPGGEARGPAAAGDDEGVGAREAADERGEATAADQGGEGGPAVRGGARRAVAVGGRAPRAAVQGGGARGAVGRHRPWHPRLAAGPRAPAAGRRPRRRLPRPRAVPLGGGAPGRRRPRLRRRGLRRVRRVQLRVQAPGLLRLISTNSACFSIDRVSIAAFDSSTNDLA

SEQ ID NO: 61649 - protein, 242 aa, Triticum aestivum
  peptide (1)..(242): Ceres Seq. ID no. 13661799
AWMDQPRPHTPATPLHRSERGQRFARRQVLNHYLAEQGSHRRGEDRGGSTMASLLSPNTVAATTARPSGRRSRLTPSVTAMATKGPKPSSGGTKRSSGTTTVFPVGKPAGPPRPATTKGSAPVKLLTNVEKLRLLTKAEKAGLLSAAERAGLSLSAVERLGLLSKAEELGVLSAATDPGTPGSLQGLALLLLAAGPAVVFLVPEQYPWEVALQAVAALVCVAGGSAAFAASSFVSRLQGSSG

SEQ ID NO: 61650 - protein, 240 aa, Triticum aestivum
  peptide (1)..(240): Ceres Seq. ID no. 13661800
MDQPRPHTPATPLHRSERGQRFARRQVLNHYLAEQGSHRRGEDRGGSTMASLLSPNTVAATTARPSGRRSRLTPSVTAMATKGPKPSSGGTKRSSGTTTVFPVGKPAGPPRPATTKGSAPVKLLTNVEKLRLLTKAEKAGLLSAAERAGLSLSAVERLGLLSKAEELGVLSAATDPGTPGSLQGLALLLLAAGPAVVFLVPEQYPWEVALQAVAALVCVAGGSAAFAASSFVSRLQGSSG

SEQ ID NO: 61651 - DNA, 894 bp, Triticum aestivum
  misc_feature (1)..(894): Ceres Seq. ID no. 15225572
acacacacaatggttggtatggctgtggttggtcaatggactctctgtgtcgcctcgccgtcgccgagagtaaagtcggcaacttgcaattcaaactcttgtccaaccaccgttaacttacgctctgagctgtctgcatttcgtcctcagttccggctcttctctcgtgtttctccgacacgccgccgccgtctttgcgcttccagctccgccgattcgggaatcttcctccctcaccttgtcgcttctatggagcaagttgaggagacttacattatggtcaaaccagacggcatccaacgaggccttgttggagaaatcatctctcgttttgagaagaaggggtttaaactgattggacttaagatgttccaatgcccaaaagaattggctcaggaacattataaggatcttagtgctaagtctttctttcctagcctgattgagtacatcacttctggcccagttgtgtgtatggcttgggaaggtgttggtgtggttgcttcagtcaggaagctgatagggaaaactgatcctcttcaagctgaacctggtaccattagaggagatcttgctgtacaaaccggaaggaacatcgtgcatggtagtgacagtcctgaaaacggaaagcgtgagattgctctgtggttcaaagaaggcgagctgtgcgggtgggattcagctctagctaaatggctaagggagtgatccttgagaagacaaattcaattctttttccttgttactgagtgcgaatgggctttggtcctttgttttgtttttgtttttgtttttgttttggcggcgtgtacgtggacttgttgatctttctggcatctttaatcacacttgtcatgtaatgaaatgagttgaatagattcaccttttctctgc

SEQ ID NO: 61652 - protein, 235 aa, Triticum aestivum
  peptide (1)..(235): Ceres Seq. ID no. 15225573
THTMVGMAVVGQWTLCVASPSPRVKSATCNSNSCPTTVNLRSELSAFRPQFRLFSRVSPTRRRRLCASSSADSGIFLPHLVASMEQVEETYIMVKPDGIQRGLVGEIISRFEKKGFKLIGLKMFQCPKELAQEHYKDLSAKSFFPSLIEYITSGPVVCMAWEGVGVVASVRKLIGKTDPLQAEPGTIRGDLAVQTGRNIVHGSDSPENGKREIALWFKEGELCGWDSALAKWLRE

SEQ ID NO: 61653 - protein, 232 aa, Triticum aestivum
  peptide (1)..(232): Ceres Seq. ID no. 15225574
MVGMAVVGQWTLCVASPSPRVKSATCNSNSCPTTVNLRSELSAFRPQFRLFSRVSPTRRRRLCASSSADSGIFLPHLVASMEQVEETYIMVKPDGIQRGLVGEIISRFEKKGFKLIGLKMFQCPKELAQEHYKDLSAKSFFPSLIEYITSGPVVCMAWEGVGVVASVRKLIGKTDPLQAEPGTIRGDLAVQTGRNIVHGSDSPENGKREIALWFKEGELCGWDSALAKWLRE

SEQ ID NO: 61654 - protein, 229 aa, Triticum aestivum
  peptide (1)..(229): Ceres Seq. ID no. 15225575
MAVVGQWTLCVASPSPRVKSATCNSNSCPTTVNLRSELSAFRPQFRLFSRVSPTRRRRLCASSSADSGIFLPHLVASMEQVEETYIMVKPDGIQRGLVGEIISRFEKKGFKLIGLKMFQCPKELAQEHYKDLSAKSFFPSLIEYITSGPVVCMAWEGVGVVASVRKLIGKTDPLQAEPGTIRGDLAVQTGRNIVHGSDSPENGKREIALWFKEGELCGWDSALAKWLRE

SEQ ID NO: 61655 - DNA, 1147 bp, Triticum aestivum
  misc_feature (1)..(1147): Ceres Seq. ID no. 13661801
tcgcaccaacgccacagacagaccaacaccgcagcacgcaccacgcgccccccccccccaccctgtgatccctcgccgtggtctcgccgccgcgccgacccctccaccggcattcgattcggagcgcagctcgtccgccggcgcggagccatgggcacggttgtggatgctcccgcagttgtgactgagaaggaggtggttgctgagaacatgttgggtgacaagaaagtcacagtagtatttgttcttggcggtcctggaagtggaaagggcacacagtgttccaacattgttgaacactttggattcacccatcttagtgctggagatcttttgcgcgcggagattaaatctggctctgagaatggaactatgattgagaacatgataaaggagggaaagattgttccgtcggaggtgactataaagctcttgcagcaagccatgataaagaatgagaatgataagttcctcatcgacgggtttccaaggaatgaagagaatcgtgctgcgttcgagaatgttacaaaaatttcgcctgcatttgtgctattcttcaattgttccgaggaagagatggaaaggcgtcttttgggacgcaatgagggtagagttgatgacaacatcgagactatcaggaagagattcaaagtttttgttgaatccagtttgcctgtgattgagtactatgacgcgaaggacaaggttaagaagatcgatgctgcaaaaccaattcctgaggtgtttgaagatgtcaaagccatttttgccccatatgccaaggctacatagaacagtataaaggaccacaaaggtgataaatggaatgatttcatacaaggttttgctcaagtgtgactacatatctgtgattacaaacccttaatatagatcagacttatcagtagacaatttgatttgttgccagcaataagttagatctggtttgtggtgttcctgctagaagtttttatttaccacccattgttggtgtatcccatgtagtatacctgtaccattgtgtaatttacggtaaggacggatcagaccttgtgcccatgagctatccggttgtattacagaaaattgaacttatcacatgttcactcatatttacattctttatacactgttggttcttctgttg

SEQ ID NO: 61656 - protein, 263 aa, Triticum aestivum
  peptide (1)..(263): Ceres Seq. ID no. 13661802
SHQRHRQTNTAARTTRPPPPPCDPSPWSRRRADPSTGIRFGAQLVRRRGAMGTVVDAPAVVTEKEVVAENMLGDKKVTVVFVLGGPGSGKGTQCSNIVEHFGFTHLSAGDLLRAEIKSGSENGTMIENMIKEGKIVPSEVTIKLLQQAMIKNENDKFLIDGFPRNEENRAAFENVTKISPAFVLFFNCSEEEMERRLLGRNEGRVDDNIETIRKRFKVFVESSLPVIEYYDAKDKVKKIDAAKPIPEVFEDVKAIFAPYAKAT

SEQ ID NO: 61657 - protein, 213 aa, Triticum aestivum
  peptide (1)..(213): Ceres Seq. ID no. 13661803
MGTVVDAPAVVTEKEVVAENMLGDKKVTVVFVLGGPGSGKGTQCSNIVEHFGFTHLSAGDLLRAEIKSGSENGTMIENMIKEGKIVPSEVTIKLLQQAMIKNENDKFLIDGFPRNEENRAAFENVTKISPAFVLFFNCSEEEMERRLLGRNEGRVDDNIETIRKRFKVFVESSLPVIEYYDAKDKVKKIDAAKPIPEVFEDVKAIFAPYAKAT

SEQ ID NO: 61658 - protein, 193 aa, Triticum aestivum
  peptide (1)..(193): Ceres Seq. ID no. 13661804
MLGDKKVTVVFVLGGPGSGKGTQCSNIVEHFGFTHLSAGDLLRAEIKSGSENGTMIENMIKEGKIVPSEVTIKLLQQAMIKNENDKFLIDGFPRNEENRAAFENVTKISPAFVLFFNCSEEEMERRLLGRNEGRVDDNIETIRKRFKVFVESSLPVIEYYDAKDKVKKIDAAKPIPEVFEDVKAIFAPYAKAT

SEQ ID NO: 61659 - DNA, 748 bp, Triticum aestivum
  misc_feature (1)..(748): Ceres Seq. ID no. 14301683
acatcgattccttcctgccactccttcctcgcatgccccctgacttcctgcaccgagactgctaagctagctctgtaatctcgtcggcctctttctctgccccctcggccggcttgccacccgataggtcctgatgtcgggcaccgtctgctccatgtgcggcgacgtcggtttccaggacaagctcttcggctgtgcccgctgccgctgccgcttccagcactcctattgcacgaactactacggcgacgcggccccggccgacgcgggcgccggcgtctgcgactggtgcctcagcgacgaccccctcgtgaagaacaagcgcccttcggcgccgccggccatgcagcaccgcggtcacgcgactgggatgggctgcggcaaagtcaaggtgaccggcggcggcgagcaggagggcggccggagagtggccaaggcggccgtccgcaggtacaagctcctcaaagacgtcctgtgctagctagctggtgcatgcatggtcctgggtcaccgtactcgtttccttagatcgggacctcgtcatcatgtgtactaaaaaacgatgctgtttaattaggtagtcgatagtcgttgtacctagctagctggtggggttctgcttccatatcgatccttgcgtgcaaatgtctgcatgtcacaatgagatctacttccgcatgtaaatatgtactgctactctttatctctgtcatcaactgcgtgctgtcgtgtgtggtcaggacttttg

SEQ ID NO: 61660 - protein, 115 aa, Triticum aestivum
  peptide (1)..(115): Ceres Seq. ID no. 14301684
MSGTVCSMCGDVGFQDKLFGCARCRCRFQHSYCTNYYGDAAPADAGAGVCDWCLSDDPLVKNKRPSAPPAMQHRGHATGMGCGKVKVTGGGEQEGGRRVAKAAVRRYKLLKDVLC

SEQ ID NO: 61661 - protein, 108 aa, Triticum aestivum
  peptide (1)..(108): Ceres Seq. ID no. 14301685
MCGDVGFQDKLFGCARCRCRFQHSYCTNYYGDAAPADAGAGVCDWCLSDDPLVKNKRPSAPPAMQHRGHATGMGCGKVKVTGGGEQEGGRRVAKAAVRRYKLLKDVLC

SEQ ID NO: 61662 - DNA, 681 bp, Triticum aestivum
  misc_feature (1)..(681): Ceres Seq. ID no. 15227036
atcgaaaaagattaggtcgagtgtgctctcacagacacggataacgcaaaacctctctgtcttcccaaatccaccacctcacaacgacgactacgatggctctttctactggaatcttctccaccttcctctgcgtcaaaacggtgacgttacgcagctcaccgttcctccgtgtttcccctcctcatccggctaacctgcggatggtgcgagccgtgacctccgcgacggcggcgtcctccgagccgtcagccaccaagactcgggagccacgtggcatcatgaagcctcgcccagtgtcccccgagatgcaggacgtggtgggtgagccggtgattcctcgcacgcaggctcttaagcgcatttgggcctacatcaaggaacacgaccttcaggatccacaagacaagaaggttataatctgcgacgagaagctgaagaagatattcgcaggcaaagaccgtgtcgggttcttggagattgcaaagctcatcggtcctcacttcctctgaatgagaagacaatcgatcactagcgtatgtttacatattagtaacgttaggtttaagaagttttatgcaacaaagtagtagtcaagccctttgggacgatatcttttgcgtttgttggttatgtgtctctttgcttcagattgcagtttaaaatttgctatgttttgtc

SEQ ID NO: 61663 - protein, 138 aa, Triticum aestivum
  peptide (1)..(138): Ceres Seq. ID no. 15227037
MALSTGIFSTFLCVKTVTLRSSPFLRVSPPHPANLRMVRAVTSATAASSEPSATKTREPRGIMKPRPVSPEMQDVVGEPVIPRTQALKRIWAYIKEHDLQDPQDKKVIICDEKLKKIFAGKDRVGFLEIAKLIGPHFL

SEQ ID NO: 61664 - protein, 102 aa, Triticum aestivum
  peptide (1)..(102): Ceres Seq. ID no. 15227038
MVRAVTSATAASSEPSATKTREPRGIMKPRPVSPEMQDVVGEPVIPRTQALKRIWAYIKEHDLQDPQDKKVIICDEKLKKIFAGKDRVGFLEIAKLIGPHFL

SEQ ID NO: 61665 - protein, 76 aa, Triticum aestivum
  peptide (1)..(76): Ceres Seq. ID no. 15227039
MKPRPVSPEMQDVVGEPVIPRTQALKRIWAYIKEHDLQDPQDKKVIICDEKLKKIFAGKDRVGFLEIAKLIGPHFL

SEQ ID NO: 61666 - DNA, 850 bp, Triticum aestivum
  misc_feature (1)..(850): Ceres Seq. ID no. 13661411
aaaaacccctctccccaccatccagtctctctccaaatctcgggacagaaaggccgccgtaccgaattagagattgacagcggcggggcgggagccagcgagctcggcgcgaacccggccccggcgagatgctcggcaagcggcagaggagcatgctgatgcgccggacgaccagcctggcgtccatgccgtcggtgcccaagcaggtgcgccagggcagcggcggcggcggcggcgacaaggacaaaacggcgcgcgcgcggccgtcctcctccgtgtcggccggcgcggtggggacgggcggcggcggctacccctctcccgggagggacgccttcgccgggctgatgatcacggcggcgttcctgtcggcctgcggcttctgcgccaagcccctcggccccggcgaggacacctacatctacaggggcgaggtggcattctgcagccaggagtgcagggagcatcggatcaagaaagacgagctcatggaacagaactgcaccatcacatccatccgggaggccccgtcggaccagtccggcagcggcggcggctcgggcggcgccggggacgccgtcgccgccgcatagccgggcggccattagcttactctattatactagctgctagtgatgtgccacatatatttggcacatgtccgccatgtttaaaccgcccgtccgtgtatacagatcgaactgggtagccggaagttgttgttgtgggtggtgatgccccagtagtggccggtgactgaggatgccatgtgacacatggaacatggtggtttcctctcctgccccagtggagaaccgaacctggactgcaatgcaacatcaaattgcgt

SEQ ID NO: 61667 - protein, 154 aa, Triticum aestivum
  peptide (1)..(154): Ceres Seq. ID no. 13661412
MLGKRQRSMLMRRTTSLASMPSVPKQVRQGSGGGGGDKDKTARARPSSSVSAGAVGTGGGGYPSPGRDAFAGLMITAAFLSACGFCAKPLGPGEDTYIYRGEVAFCSQECREHRIKKDELMEQNCTITSIREAPSDQSGSGGGSGGAGDAVAAA

SEQ ID NO: 61668 - protein, 146 aa, Triticum aestivum
  peptide (1)..(146): Ceres Seq. ID no. 13661413
MLMRRTTSLASMPSVPKQVRQGSGGGGGDKDKTARARPSSSVSAGAVGTGGGGYPSPGRDAFAGLMITAAFLSACGFCAKPLGPGEDTYIYRGEVAFCSQECREHRIKKDELMEQNCTITSIREAPSDQSGSGGGSGGAGDAVAAA

SEQ ID NO: 61669 - protein, 144 aa, Triticum aestivum
  peptide (1)..(144): Ceres Seq. ID no. 13661414
MRRTTSLASMPSVPKQVRQGSGGGGGDKDKTARARPSSSVSAGAVGTGGGGYPSPGRDAFAGLMITAAFLSACGFCAKPLGPGEDTYIYRGEVAFCSQECREHRIKKDELMEQNCTITSIREAPSDQSGSGGGSGGAGDAVAAA

SEQ ID NO: 61670 - DNA, 420 bp, Triticum aestivum
  misc_feature (1)..(420): Ceres Seq. ID no. 13664306
atttttctccaagagaaacgtaaatttgcagttcctttgtcactagttttcgatgctgtagaattgaagagtgagagagagagagatagatcgttgaagacgcagcggtgatcgaaacagaggagagatctggaaatggaaggtggaggatccaacgttagatctagctactacaacgtcctcggtattcgcaaagacgcctctgtttccgatgtccgggctgcttaccgtaagctcgccatgaaatggcatccggatagatacgcgaggactcctgacgtcgccggagaagccaaacgtcgatttcagcaaatccaagaagcctattctgttctgaatgacgagaataagcgctcgatgtatgacgctggactatacgatccccatgaagatgacgacgacgacttctgcgacttcatg

SEQ ID NO: 61671 - protein, 95 aa, Triticum aestivum
  peptide (1)..(95): Ceres Seq. ID no. 13664307
MEGGGSNVRSSYYNVLGIRKDASVSDVRAAYRKLAMKWHPDRYARTPDVAGEAKRRFQQIQEAYSVLNDENKRSMYDAGLYDPHEDDDDDFCDFM

SEQ ID NO: 61672 - protein, 60 aa, Triticum aestivum
  peptide (1)..(60): Ceres Seq. ID no. 13664308
MKWHPDRYARTPDVAGEAKRRFQQIQEAYSVLNDENKRSMYDAGLYDPHEDDDDDFCDFM

SEQ ID NO: 61673 - DNA, 1010 bp, Triticum aestivum
  misc_feature (1)..(1010): Ceres Seq. ID no. 13661419
agaacatcctaatcaaaaagttatgctgtaatctatggtgcatcacaatcaatcctactcgttgttttattgataacttgcagcaaaaatgctgggattggaggaagcccctccggcgcatgcccgcacagcagagaaaacctgcgacccgtccggcatgacctttgctaccggtggtgcatgcgtgttggacagtacatcgcacgaggtccctgccctcgccaagcagatttacactttcaagaagatggtcaaggacgggaccatcacggagaatcaactgagtcgctctgtagcgctcgtggcctactccggcaacgactatgcaggcaccggcgtcattgggctaggtagccccaacgatattaatgcttatattggaaaggtgacaaaagagattgcagctaatgtggatcaattgttgaagcttggggtgacaaaggttcttgtcaataacttgcaccctatcggttgcacgccatcacacacccgaaccaacaactacaccacgtgtgatatttttagaaacttgggtgcatctatccacaacgataatctgaaacaagttatgacatcaaagaagaatgtctacatcattgacgtgtacaccgcattcgctaatattgtggatcatgcggcaggtaaaggctcagagttgtccaaacaattcaagcgcaaactatcgccgtgttgcgagagtttgaattcgaagggttactgcggacagcaaaacgagtcatccggggagcttctgtacactgtgtgtgacaagtcaagtaaatttttctattgggacgatatgcacccgacccatgcaggatgggaggttgtgataaaacaattggaaaagcccttgagagagtttgtaaatcaagcctaggtagctggttttatatatctgtgtagagctttgcatccatgatgacaaccttctgatttatttcatagtttcaagtatttggaagacgggattttcccgattccatgatgaatattatattgtatttgct

SEQ ID NO: 61674 - protein, 263 aa, Triticum aestivum
  peptide (1)..(263): Ceres Seq. ID no. 13661420
MLGLEEAPPAHARTAEKTCDPSGMTFATGGACVLDSTSHEVPALAKQIYTFKKMVKDGTITENQLSRSVALVAYSGNDYAGTGVIGLGSPNDINAYIGKVTKEIAANVDQLLKLGVTKVLVNNLHPIGCTPSHTRTNNYTTCDIFRNLGASIHNDNLKQVMTSKKNVYIIDVYTAFANIVDHAAGKGSELSKQFKRKLSPCCESLNSKGYCGQQNESSGELLYTVCDKSSKFFYWDDMHPTHAGWEVVIKQLEKPLREFVNQA

SEQ ID NO: 61675 - protein, 240 aa, Triticum aestivum
  peptide (1)..(240): Ceres Seq. ID no. 13661421
MTFATGGACVLDSTSHEVPALAKQIYTFKKMVKDGTITENQLSRSVALVAYSGNDYAGTGVIGLGSPNDINAYIGKVTKEIAANVDQLLKLGVTKVLVNNLHPIGCTPSHTRTNNYTTCDIFRNLGASIHNDNLKQVMTSKKNVYIIDVYTAFANIVDHAAGKGSELSKQFKRKLSPCCESLNSKGYCGQQNESSGELLYTVCDKSSKFFYWDDMHPTHAGWEVVIKQLEKPLREFVNQA

SEQ ID NO: 61676 - protein, 210 aa, Triticum aestivum
  peptide (1)..(210): Ceres Seq. ID no. 13661422
MVKDGTITENQLSRSVALVAYSGNDYAGTGVIGLGSPNDINAYIGKVTKEIAANVDQLLKLGVTKVLVNNLHPIGCTPSHTRTNNYTTCDIFRNLGASIHNDNLKQVMTSKKNVYIIDVYTAFANIVDHAAGKGSELSKQFKRKLSPCCESLNSKGYCGQQNESSGELLYTVCDKSSKFFYWDDMHPTHAGWEVVIKQLEKPLREFVNQA

SEQ ID NO: 61677 - DNA, 1262 bp, Triticum aestivum
  misc_feature (1)..(1262): Ceres Seq. ID no. 14301894
atcaacaaaccaacccaaccagcaatagccaccccaatccatccagctcctccaagctcagtgtccgagctcagctcagctacccacacttcactcagtagcagctaccggtagcgagaaagaaagatcgatagtgcgacgtgcgcgatgacgacggtggcgataggcattctggccatggcgtgcctcgtggcggtggcgcggggcggcaacttcttccaggactccgagatgacctggggggacggccgcggcaaggtcgtcgacggcggccgcgggctcgacctcacgctcgacaagacctccggctccggcttccagtccaagaccgagtacctcttcggcaagatcgacatgcagatcaagctcgtccccggcaactccgccggcaccgtcaccaccttctacctgtcgtcgcaggggacggcgcacgacgagatcgacttcgagttcctgggcaacgtcaccggcgagccctacacgctgcacaccaacgtgttcgcgaaagggcaggggcagcgggagcagcagttccgcctctggttcgaccccaccaaggccttccacacctactccatcatctggaacccgcagcacgtcatattcgcggtggacggcacggcgatcagggacttcaagaaccacgaggcgcgcggcgtgtcgttccccaagagccagccgatgcggctgtacgcgagcctgtggaacgccgacgactgggccacgcagggcggccgggtcaagaccgactggagcaaggcgccgttcgtcgcctccttccgcaacttcaacgccgacgcctgcgtcatgtcgggcggcgcgcagcgctgccccgccggcacaatggaggcctctgcggccggcggcagcggcagctggtggaaccaggagctcagcggcatgggctaccgccgcatgcggtgggtgcagaggaagttcatgatctacaactactgcaccgaccccaagcgggtggcgcagggcgtgcctgccgagtgcaagctccgctgatgagatcctcccgcagcttacaagaacaacaacgcatgaacccgtcatctgagatgtgttttgtttcggctttcgatccgtgagaacgaaggaaggaaggaagtgcgcgcatcagagctctgtcggatggtgtaaatgtagtaccgtagtatgcatatcgcattctttcatttgtttcgttgtcacacgggtcgttccatgtacttatgcaagttctataattagctagttccttttagccttgaaaatcc

SEQ ID NO: 61678 - protein, 287 aa, Triticum aestivum
  peptide (1)..(287): Ceres Seq. ID no. 14301895
MTTVAIGILAMACLVAVARGGNFFQDSEMTWGDGRGKVVDGGRGLDLTLDKTSGSGFQSKTEYLFGKIDMQIKLVPGNSAGTVTTFYLSSQGTAHDEIDFEFLGNVTGEPYTLHTNVFAKGQGQREQQFRLWFDPTKAFHTYSIIWNPQHVIFAVDGTAIRDFKNHEARGVSFPKSQPMRLYASLWNADDWATQGGRVKTDWSKAPFVASFRNFNADACVMSGGAQRCPAGTMEASAAGGSGSWWNQELSGMGYRRMRWVQRKFMIYNYCTDPKRVAQGVPAECKLR

SEQ ID NO: 61679 - protein, 277 aa, Triticum aestivum
  peptide (1)..(277): Ceres Seq. ID no. 14301896
MACLVAVARGGNFFQDSEMTWGDGRGKVVDGGRGLDLTLDKTSGSGFQSKTEYLFGKIDMQIKLVPGNSAGTVTTFYLSSQGTAHDEIDFEFLGNVTGEPYTLHTNVFAKGQGQREQQFRLWFDPTKAFHTYSIIWNPQHVIFAVDGTAIRDFKNHEARGVSFPKSQPMRLYASLWNADDWATQGGRVKTDWSKAPFVASFRNFNADACVMSGGAQRCPAGTMEASAAGGSGSWWNQELSGMGYRRMRWVQRKFMIYNYCTDPKRVAQGVPAECKLR

SEQ ID NO: 61680 - protein, 259 aa, Triticum aestivum
  peptide (1)..(259): Ceres Seq. ID no. 14301897
MTWGDGRGKVVDGGRGLDLTLDKTSGSGFQSKTEYLFGKIDMQIKLVPGNSAGTVTTFYLSSQGTAHDEIDFEFLGNVTGEPYTLHTNVFAKGQGQREQQFRLWFDPTKAFHTYSIIWNPQHVIFAVDGTAIRDFKNHEARGVSFPKSQPMRLYASLWNADDWATQGGRVKTDWSKAPFVASFRNFNADACVMSGGAQRCPAGTMEASAAGGSGSWWNQELSGMGYRRMRWVQRKFMIYNYCTDPKRVAQGVPAECKLR

SEQ ID NO: 61681 - DNA, 955 bp, Triticum aestivum
  misc_feature (1)..(955): Ceres Seq. ID no. 13664314
accgctccagtcccgccaggatctgccgccccacaccgtgcccagctccgccgcccccgcgccccccctctcagccgctcgacgctcgccggagcggcggatctccgacgcgtcgctccctcccgcaggcaacagacggcatctaggcagaacctcccaccattccaccggaatcggagaacctagtcgcggcgcctcaacctcgcctgaactcaccgtcgatggcggccgctgcggggtcgtacggcaagctcgacaagtcattcaagcttgccgctcgctccatactcaccgccttctcccgcgaggatcttaacaatgctttcccatcgttcacggacgccgaaagggagcgcctgtaccaaatgttcatctatgtgatcaagtctttgcatggcaatatagtggaggagttccgaaatctctgcgatgaaatagaaattgctactgcccttgacaaggtagatcagtttgccgaagaacaaactctggacgtattatcttcagacaagactagcattgaagacatcaaagaaaggatatcaaaggagaagaaggatgaaattgaacttttaaaaggtttactagagaagactcaagaaaggaacaatgccatgaaggcccgaatcgaacccttgaagcaaggggaggatttcaatgacacaagagatgttctcacgaagctgaaggaatggaattctgcatgtcagagctgcaatgaccattgagcttctctggttactcgatgtagtcaagagacatctgctgtgtagctttgtgtgttcgtagagtggaggtcgagtcaggggtcatgctcccccatgaaccaatggtgctaaccaattgtagcgtgatttcgtttcttcgttgcaaggcatagctgttgcgtttctgtattttcgtcgcctcatgtttcctgcacccatagttgatgcttgctttagtgatcatcctg

SEQ ID NO: 61682 - protein, 168 aa, Triticum aestivum
  peptide (1)..(168): Ceres Seq. ID no. 13664315
MAAAAGSYGKLDKSFKLAARSILTAFSREDLNNAFPSFTDAERERLYQMFIYVIKSLHGNIVEEFRNLCDEIEIATALDKVDQFAEEQTLDVLSSDKTSIEDIKERISKEKKDEIELLKGLLEKTQERNNAMKARIEPLKQGEDFNDTRDVLTKLKEWNSACQSCNDH

SEQ ID NO: 61683 - protein, 120 aa, Triticum aestivum
  peptide (1)..(120): Ceres Seq. ID no. 13664316
MFIYVIKSLHGNIVEEFRNLCDEIEIATALDKVDQFAEEQTLDVLSSDKTSIEDIKERISKEKKDEIELLKGLLEKTQERNNAMKARIEPLKQGEDFNDTRDVLTKLKEWNSACQSCNDH

SEQ ID NO: 61684 - protein, 104 aa, Triticum aestivum
  peptide (1)..(104): Ceres Seq. ID no. 13664317
PLQSRQDLPPHTVPSSAAPAPPLSAARRSPERRISDASLPPAGNRRHLGRTSHHSTGIGEPSRGASTSPELTVDGGRCGVVRQARQVIQACRSLHTHRLLPRGS

SEQ ID NO: 61685 - DNA, 857 bp, Triticum aestivum
  misc_feature (1)..(857): Ceres Seq. ID no. 13661487
tggaaactttgggtcttagaaatggtcctgctaaggaggccgaagatgctgcagaatgtaccaaacagacaaatttgagcactgagaatgagcaactagaaagtgcagaaggtactgagcggcatctggatgtttcatttcatggtactgaagctagcacagacgaagctgcctctgaagcagctgaatcttcagtctcagctacttagacacaggcagagagaacagttgataaaccagctggctcatctgatttggacaatcctatctctgaagcttcacccgatcctgatgtcaatgggagtgatttggctggctcggcattatcttctgagcaagctgtccgtaacgaagatgtggaggtaccgaccaagactgatgcagtcgtggatactgaaatgaaaactgatacagtcgtggaaactgatgcagtcggggatgttggagtgaaagctgatgcagtcgtggaggtaccaagcaaggaagtatctgccgtggatgttgaagctaaaactggcgcagcagaagcaaaagagtgaagtggcagcttatctcatggactgaaatggcatagctgacgagcaattattagtcagacccctcagaagacaggcaatcatctttgcttcaagtgctcatcagccacaagcaacttcgaagcaaactgctgtacaataagcaagtgtactattttgccttccattgtggccaatcactgtacaaatgggcaccattgtctaactgcacgcgtacacttcatcagaaattggtcaatttgcttcaaaatttaccctccgtttcatggggaacaattggttgatgcgaaatgtcatttggcggtagtctcgtgtcttgcg

SEQ ID NO: 61686 - protein, 90 aa, Triticum aestivum
  peptide (1)..(90): Ceres Seq. ID no. 13661488
MFHFMVLKLAQTKLPLKQLNLQSQLLRHRQREQLINQLAHLIWTILSLKLHPILMSMGVIWLARHYLLSKLSVTKMWRYRPRLMQSWILK

SEQ ID NO: 61687 - protein, 86 aa, Triticum aestivum
  peptide (1)..(86): Ceres Seq. ID no. 13661489
MVLKLAQTKLPLKQLNLQSQLLRHRQREQLINQLAHLIWTILSLKLHPILMSMGVIWLARHYLLSKLSVTKMWRYRPRLMQSWILK

SEQ ID NO: 61688 - protein, 68 aa, Triticum aestivum
  peptide (1)..(68): Ceres Seq. ID no. 13661490
ETLGLRNGPAKEAEDAAECTKQTNLSTENEQLESAEGTERHLDVSFHGTEASTDEAASEAAESSVSAT

SEQ ID NO: 61689 - DNA, 659 bp, Triticum aestivum
  misc_feature (1)..(659): Ceres Seq. ID no. 13661877
atcctaatcgaaaagatttttttggcgagagagctaagatgtgtctccgttactccctttgcttgatcttattctctctcatttcactccaaggttttgccaagaagacaggagatgtgtcggaattgcagatcggtgttaagtttaagccagcaacgtgtgaagtgaaggctcacaaaggtgatatgatcaaggtgcactacagggggaaacttactgatggaacagtattcgattcgagctttgaaagggatgaaccgttcgagtttgagttaggaagtggtcaggttatcaaaggctgggatcaaggattgctaggtgcgtgtgtaggagagaagaggaagttaaagatacctgctaaacttggatatggtgaacagggctctcctccaaccatccccggtggggcaacactgatatttgacacagagcttatcgcggtaaatgaaaaaccagctggtggagaacaagaacaagaagaagaagatgtagacgacacatatggagctgacgagctgtgattgattctctattctccaaccgtttagcttcagagttcctctacgaataaaatgtctatgtgcgtttgctttttaatcattggatgcttttagttttgcttctttctaagttatcaacaattacttcgttttggtttg

SEQ ID NO: 61690 - protein, 172 aa, Triticum aestivum
  peptide (1)..(172): Ceres Seq. ID no. 13661878
PNRKDFFGERAKMCLRYSLCLILFSLISLQGFAKKTGDVSELQIGVKFKPATCEVKAHKGDMIKVHYRGKLTDGTVFDSSFERDEPFEFELGSGQVIKGWDQGLLGACVGEKRKLKIPAKLGYGEQGSPPTIPGGATLIFDTELIAVNEKPAGGEQEQEEEDVDDTYGADEL

SEQ ID NO: 61691 - protein, 160 aa, Triticum aestivum
  peptide (1)..(160): Ceres Seq. ID no. 13661879
MCLRYSLCLILFSLISLQGFAKKTGDVSELQIGVKFKPATCEVKAHKGDMIKVHYRGKLTDGTVFDSSFERDEPFEFELGSGQVIKGWDQGLLGACVGEKRKLKIPAKLGYGEQGSPPTIPGGATLIFDTELIAVNEKPAGGEQEQEEEDVDDTYGADEL

SEQ ID NO: 61692 - protein, 111 aa, Triticum aestivum
  peptide (1)..(111): Ceres Seq. ID no. 13661880
MIKVHYRGKLTDGTVFDSSFERDEPFEFELGSGQVIKGWDQGLLGACVGEKRKLKIPAKLGYGEQGSPPTIPGGATLIFDTELIAVNEKPAGGEQEQEEEDVDDTYGADEL

SEQ ID NO: 61693 - DNA, 1136 bp, Triticum aestivum
  misc_feature (1)..(1136): Ceres Seq. ID no. 13662018
cctagaacatcctaatcgaaaaatcacgaaaggtctcgctcgctagctgccgtccccgcccgcctgccgcctcgtgccctcgacacgacacgacacgatggccgcggccgcgccatcccgccaccgccccgagggacctccctcggaggaggaggcggcgagggactgggcggggctgccgggggacgcgctgctggcggtgctccacaggctagaccacgtcgacgtcctcatgggggccggccaggtgtgcagcccctggcgctgcgcggcgcggaacgagccggagctgtggcgccgcgtcgaggtgcgctcccacgccgaccgccgatctcacgtcgcggcgccctcccgcgccagacgccactcctgctccgtcctctgtgggctggcgcgcgccgccgtcaggcgtgccgcggggcagtgcgaggccttctgcggcgagggcgccgtggacgacagcgtcctctccctccttgccgactcggcgccttcgctgaagagcctccggatcatctccggcgacaggatcgtcgacgagaggctcagcctcaccatcacgaacttctccctgctggaggagctggagctctcgctttgcaccgacgtctacccggggacgtgcgaggccgtcggcaccgcctgccctctcctcaagcgcttccgtctgagcaagaagcagttctgcaagtggaacaccaagaacatcgaccaggaggccatggccatcgccaccatgggcgggctgcggtcgcttcagctcttcgccaaccctctcagcgacgacgggctggcggccatccttgacggatgcccgcgcctcgagtctctcgacatccgccactgcttcaacgttgggatgggcgctgctgcgatccgagcacggtgtcctgggatcaagacgctgaggctgccggatgactccacgatcgattacgatctgaagttttctcccccggatatgaccccgtggaacacccaggatgagcatcaatgtgattggcacgagttggtctatttcagttcatggtagtctagtgtactggtgtgcagcttccccacaagataccgctgctgtaagtaggagtacaaccaaatggacgggttaataatggcaatgatacttttttttggtt

SEQ ID NO: 61694 - protein, 311 aa, Triticum aestivum
  peptide (1)..(311): Ceres Seq. ID no. 13662019
MAAAAPSRHRPEGPPSEEEAARDWAGLPGDALLAVLHRLDHVDVLMGAGQVCSPWRCAARNEPELWRRVEVRSHADRRSHVAAPSRARRHSCSVLCGLARAAVRRAAGQCEAFCGEGAVDDSVLSLLADSAPSLKSLRIISGDRIVDERLSLTITNFSLLEELELSLCTDVYPGTCEAVGTACPLLKRFRLSKKQFCKWNTKNIDQEAMAIATMGGLRSLQLFANPLSDDGLAAILDGCPRLESLDIRHCFNVGMGAAAIRARCPGIKTLRLPDDSTIDYDLKFSPPDMTPWNTQDEHQCDWHELVYFSSW

SEQ ID NO: 61695 - protein, 266 aa, Triticum aestivum
  peptide (1)..(266): Ceres Seq. ID no. 13662020
MGAGQVCSPWRCAARNEPELWRRVEVRSHADRRSHVAAPSRARRHSCSVLCGLARAAVRRAAGQCEAFCGEGAVDDSVLSLLADSAPSLKSLRIISGDRIVDERLSLTITNFSLLEELELSLCTDVYPGTCEAVGTACPLLKRFRLSKKQFCKWNTKNIDQEAMAIATMGGLRSLQLFANPLSDDGLAAILDGCPRLESLDIRHCFNVGMGAAAIRARCPGIKTLRLPDDSTIDYDLKFSPPDMTPWNTQDEHQCDWHELVYFSSW

SEQ ID NO: 61696 - DNA, 643 bp, Triticum aestivum
  misc_feature (1)..(643): Ceres Seq. ID no. 13661491
aatcaggaagacgagtgagaagagaagaagcaatggggagaaagaagggattgccggagtttgaagagacggcgccggatggcttcgatccggcgaatccatacaaggatccggtggcgatggtggaaatgagagagcacatcgtccgcgaaaagtggatccagatcgagaaggctaagatcatgcgcgagaaggtcaaatggtgttaccgcgtcgaaggagtcaaccattaccagaaatgccgtcatctcgtccagcagtacctcgactccactcgcggcgtcggctgggggaaagaccaccgtcctatgtcgctccacggtcctaagcctgaggctgttgaagctgaataatgatttgcgtgtgattaatctgaggtgacggagcttttaatacaagacatgaaaaggtctttggactctgcagatttgctcttgtttgttctttttcttttgttgaaacatgtcagtctttggactggcggatacatggaagggtttttataagcttcagtaatgtattgaagaaactacactcaacattagtctttcattatgctacccaaataagtccatttttttctttgttccgggcttccggctagttttttactttcttgccaaaaactgtagcttaaattctc

SEQ ID NO: 61697 - protein, 116 aa, Triticum aestivum
  peptide (1)..(116): Ceres Seq. ID no. 15218790
SGRRVRREEAMGRKKGLPEFEETAPDGFDPANPYKDPVAMVEMREHIVREKWIQIEKAKIMREKVKWCYRVEGVNHYQKCRHLVQQYLDSTRGVGWGKDHRPMSLHGPKPEAVEAE

SEQ ID NO: 61698 - protein, 106 aa, Triticum aestivum
  peptide (1)..(106): Ceres Seq. ID no. 15218791
MGRKKGLPEFEETAPDGFDPANPYKDPVAMVEMREHIVREKWIQIEKAKIMREKVKWCYRVEGVNHYQKCRHLVQQYLDSTRGVGWGKDHRPMSLHGPKPEAVEAE

SEQ ID NO: 61699 - protein, 77 aa, Triticum aestivum
  peptide (1)..(77): Ceres Seq. ID no. 15218792
MVEMREHIVREKWIQIEKAKIMREKVKWCYRVEGVNHYQKCRHLVQQYLDSTRGVGWGKDHRPMSLHGPKPEAVEAE

SEQ ID NO: 61700 - DNA, 852 bp, Triticum aestivum
  misc_feature (1)..(852): Ceres Seq. ID no. 12624328
atatttaatttgtttctagtttctacatttcgctattcacgaatctgagatgttatgctctagccatgatctgcgattcttctggctcctgcgagattgacaaaatacaagatacttttaatcaatggaagcaagcacctgaaaatacaggagagtatgtgcatcttaccagagaactgctaaccacctgtgagagcgtccaatggcaggtggatgagttagagaaggcaatttctgttgctgagagagatccagcttactatggactaaacgaggttgaaattgggaaacggaggaactggactagcaccgcccgcaaccaggtggtatcaatacggaggaatgttgaagctggaaagcacaagactgcctttggacgttcggtcaatccttccgaactaggcagatccaagcagcacatttctcaggataacgatgacttcattgcttcagaatctgatcaacagatgctcctgatgaagcgtcaggatgatgagttggatgcgcttagtgctagtgtccagcgaattggaggtgtaggtctcacaatacacgaagagcttgttggacaggaaaaacttctaggtgaactaagcctcgacatggaaactacctccaaccggctcgattttgtgcagaaaagagtggctatggttctgaagaaggccagcttgaaagggcagatcatgatgatagctttcttggtggttcttttcatcatccttttcgttttggtattcttgacttgagagatggagtttaagttgcgtgagtatttgccatcaggtgtataattgattcgtgtaattggggccggtatagtttgttcttcgggatctgcctctgccaagt

SEQ ID NO: 61701 - protein, 227 aa, Triticum aestivum
  peptide (1)..(227): Ceres Seq. ID no. 12624329
MICDSSGSCEIDKIQDTFNQWKQAPENTGEYVHLTRELLTTCESVQWQVDELEKAISVAERDPAYYGLNEVEIGKRRNWTSTARNQVVSIRRNVEAGKHKTAFGRSVNPSELGRSKQHISQDNDDFIASESDQQMLLMKRQDDELDALSASVQRIGGVGLTIHEELVGQEKLLGELSLDMETTSNRLDFVQKRVAMVLKKASLKGQIMMIAFLVVLFIILFVLVFLT

SEQ ID NO: 61702 - DNA, 886 bp, Triticum aestivum
  misc_feature (1)..(886): Ceres Seq. ID no. 13661499
aacccaaagcagaccggaccgtctgaacagacagcataagaagcgagaaggcagagacgggagcctcgccgccgacgggcaagatgcagcgcgcgtcgctcgcgtccgccttgctgctgctctgctccctctgttccttcttcgcgcagccgtcgcaggcgttcctcgacggcacgcgcggcgcaggggcgtgcatttctcggctgcttggcgagggcttcggcgacgagaagatccccatggccgtcgtggtgccgtcggtgccagattactccccgctgccggcaccgaccgctgtcgcggtcgccgcgcctgcgcctgcgcccacgcccacgccaacgccaacgccggtgcccggctcggaggagtacatgccgaagctgccgtcggagaggctgagccctggggcgccggccagcggcaatgcgggcgcgccggcgcctgccgcgtcgggcgatggggcgagcaccgcattcatcagcagcaaccccgcggtgccgctccccgccggcgtcaccgactccgccaccgtcctgcccatgcccacccctggacaagagcaacggcaggacgtggggatgggcaccctgcttcaggctagggcggtgccgttggtcgctcctctcctcatggtgctctacttttgagtttcttgttggggtagtagactagttcctttctcttactgtataatcatcgtgcgattagttgtcagaatctgcgcttgtaatcagcaccgtagtgctttcgttatcatctagtaggcgattgtaagctctaaccatctgtaaacagtgtcacctctgcttactgcatgcttcttgtctcttgttacacctgtatcctgcgtacgagtaagtctgcattgcaaatttgcaattctttc

SEQ ID NO: 61703 - protein, 199 aa, Triticum aestivum
  peptide (1)..(199): Ceres Seq. ID no. 15218793
TQSRPDRLNRQHKKREGRDGSLAADGQDAARVARVRLAAALLPLFLLRAAVAGVPRRHARRRGVHFSAAWRGLRRREDPHGRRGAVGARLLPAAGTDRCRGRRACACAHAHANANAGARLGGVHAEAAVGEAEPWGAGQRQCGRAGACRVGRWGEHRIHQQQPRGAAPRRRHRLRHRPAHAHPWTRATAGRGDGHPASG

SEQ ID NO: 61704 - protein, 187 aa, Triticum aestivum
  peptide (1)..(187): Ceres Seq. ID no. 15218794
MQRASLASALLLLCSLCSFFAQPSQAFLDGTRGAGACISRLLGEGFGDEKIPMAVVVPSVPDYSPLPAPTAVAVAAPAPAPTPTPTPTPVPGSEEYMPKLPSERLSPGAPASGNAGAPAPAASGDGASTAFISSNPAVPLPAGVTDSATVLPMPTPGQEQRQDVGMGTLLQARAVPLVAPLLMVLYF

SEQ ID NO: 61705 - protein, 135 aa, Triticum aestivum
  peptide (1)..(135): Ceres Seq. ID no. 15218795
MAVVVPSVPDYSPLPAPTAVAVAAPAPAPTPTPTPTPVPGSEEYMPKLPSERLSPGAPASGNAGAPAPAASGDGASTAFISSNPAVPLPAGVTDSATVLPMPTPGQEQRQDVGMGTLLQARAVPLVAPLLMVLYF

SEQ ID NO: 61706 - DNA, 971 bp, Triticum aestivum
  misc_feature (1)..(971): Ceres Seq. ID no. 15226351
aaaccttaggggataacttagaaacaagaaaacggcgtcggtttgacccgacggaggaaccatgtcgtcgtctcttcttctctcaggctctacagtatcttcttcattcattgctccttcgaagctttatctcttacggaatcaaaatcaatcactgtcactatctcggaacgtttcgagaaccttcaaaccccttaggtgctcctccgctgattctccatacggaggcaacgtgcccacgttccctcgaaccagggtctgggacccatacaagcgtctagggataagcccctacgcctccgaggaagagatctgggcctcgcgcaacttcctcttggagcagtacgcgggacacgagaggagccaagagtctatagaaggcgcattcgagaagcttctcatgtctagttttgtgaagaggaagaagactaaaatcaacctcaagacgaggttgaagaagaaagttgaggagtctcctccgtggcttaaagctcttcttgatttcgttgagatgcctcccatggatactgttttcagaagactctttcttttcgctttcatgggtggttggagtatcatgaactctgcagaaggcggtcctgcctttcaggtggcggtgtcgttggcggcttgcgtatatttccttaatgagaagacgaagagcttggggagagcttgcttaatcgggtttggtgcattaacagtcgggtggttctgcggttcgctagtcattcccatgattccgacggctttcattaacccgacatggaccctggagcttctaacgtcactggttgcttatgtgtttttgtttctttcttgtactttcctcaagtaggttgttgcacttttatccagactttgtgtttctttcttgtacctgttctcgccggaaaattgaacttgagttctacaacattggttaactcttgttaaagtatggaatcaagttgatcaggatcttaccaacc

SEQ ID NO: 61707 - protein, 258 aa, Triticum aestivum
  peptide (1)..(258): Ceres Seq. ID no. 15226352
MSSSLLLSGSTVSSSFIAPSKLYLLRNQNQSLSLSRNVSRTFKPLRCSSADSPYGGNVPTFPRTRVWDPYKRLGISPYASEEEIWASRNFLLEQYAGHERSQESIEGAFEKLLMSSFVKRKKTKINLKTRLKKKVEESPPWLKALLDFVEMPPMDTVFRRLFLFAFMGGWSIMNSAEGGPAFQVAVSLAACVYFLNEKTKSLGRACLIGFGALTVGWFCGSLVIPMIPTAFINPTWTLELLTSLVAYVFLFLSCTFLK

SEQ ID NO: 61708 - protein, 145 aa, Triticum aestivum
  peptide (1)..(145): Ceres Seq. ID no. 15226353
MSSFVKRKKTKINLKTRLKKKVEESPPWLKALLDFVEMPPMDTVFRRLFLFAFMGGWSIMNSAEGGPAFQVAVSLAACVYFLNEKTKSLGRACLIGFGALTVGWFCGSLVIPMIPTAFINPTWTLELLTSLVAYVFLFLSCTFLK

SEQ ID NO: 61709 - DNA, 1139 bp, Triticum aestivum
  misc_feature (1)..(1139): Ceres Seq. ID no. 15224904
gctagcttcctgagtagtacatcctcttgacgttgaccattcgctttcccatcgcagaggatcatgtccatgttcacctccagcagctccggcgtgccgtccccgtctccggaggcgggcagcagcatggtcagaacggcgcggcagccccagcgccaggcgtttgactacttcgtggttctagacttcgaggcgacgtgcgagaaaggcgcgcagatctacccgcaggagatcatcgagttcccctccgtgctcgtcgacggcgccaccggcgacctcgactccgccgagttccgcacctacgtgcgcccgcagcaccaccccgcgctgaccgacttctgcagggacctcaccggcatccggcaggcggacgtcgacggcggcgtgcagctggccgaggcgctccgcctgcacgccgcgtggctgcaggactcggcgtgggccaggagcggcggctgcttcgccgtcgtcacgtggggggactgggacctccgcaccatgctggagacggagtgccgcttcaaagacctcgccaagccgccctgcttcaaccactggatcaacctcaagatccccttcgccgcggcgatgggcggaggtcggtgggctgctctgcggtcggccgtcgaagcggcggggctccagtgggagggccgcgcgcactgcggcctcgacgacgctcgtaacacggcgcggcttctcgtggagctgatgcggcgcggcgtccagctcagcatcacgacctcgaccccatcgcctcaggtaactgtaactccatacggtggcgccgccgcggcgtgctactgctactgcggggtggcgagcagaggtggcgtggtggccgtgccggggccgatgcaggggagatgcttctacggttgcggtaactggacgccgtccatgggagcagcgtgctcctacttcacgtgggcagattaattgctactcaatccatgggtttggatttggagaatacgctataaattatatgtgcgagtatcactccagctctttgatttctcttgtcaacacagtgttgacaacactcttttgagcttggttttcttaacaacttgaatcctattgcgtggtgtatttgattttgtcatgaacttcaaattctatacatgtttgagtac

SEQ ID NO: 61710 - protein, 291 aa, Triticum aestivum
  peptide (1)..(291): Ceres Seq. ID no. 15224905
MSMFTSSSSGVPSPSPEAGSSMVRTARQPQRQAFDYFVVLDFEATCEKGAQIYPQEIIEFPSVLVDGATGDLDSAEFRTYVRPQHHPALTDFCRDLTGIRQADVDGGVQLAEALRLHAAWLQDSAWARSGGCFAVVTWGDWDLRTMLETECRFKDLAKPPCFNHWINLKIPFAAAMGGGRWAALRSAVEAAGLQWEGRAHCGLDDARNTARLLVELMRRGVQLSITTSTPSPQVTVTPYGGAAAACYCYCGVASRGGVVAVPGPMQGRCFYGCGNWTPSMGAACSYFTWAD

SEQ ID NO: 61711 - protein, 289 aa, Triticum aestivum
  peptide (1)..(289): Ceres Seq. ID no. 15224906
MFTSSSSGVPSPSPEAGSSMVRTARQPQRQAFDYFVVLDFEATCEKGAQIYPQEIIEFPSVLVDGATGDLDSAEFRTYVRPQHHPALTDFCRDLTGIRQADVDGGVQLAEALRLHAAWLQDSAWARSGGCFAVVTWGDWDLRTMLETECRFKDLAKPPCFNHWINLKIPFAAAMGGGRWAALRSAVEAAGLQWEGRAHCGLDDARNTARLLVELMRRGVQLSITTSTPSPQVTVTPYGGAAAACYCYCGVASRGGVVAVPGPMQGRCFYGCGNWTPSMGAACSYFTWAD

SEQ ID NO: 61712 - protein, 270 aa, Triticum aestivum
  peptide (1)..(270): Ceres Seq. ID no. 15224907
MVRTARQPQRQAFDYFVVLDFEATCEKGAQIYPQEIIEFPSVLVDGATGDLDSAEFRTYVRPQHHPALTDFCRDLTGIRQADVDGGVQLAEALRLHAAWLQDSAWARSGGCFAVVTWGDWDLRTMLETECRFKDLAKPPCFNHWINLKIPFAAAMGGGRWAALRSAVEAAGLQWEGRAHCGLDDARNTARLLVELMRRGVQLSITTSTPSPQVTVTPYGGAAAACYCYCGVASRGGVVAVPGPMQGRCFYGCGNWTPSMGAACSYFTWAD

SEQ ID NO: 61713 - DNA, 648 bp, Triticum aestivum
  misc_feature (1)..(648): Ceres Seq. ID no. 12624019
acactgaccgaagacatcgatatccatggccccgaccgtcatctccccagccacgggcgccgtcgcctcgcccatcgcgagcgacctcgggaaggccgcgcgctccgtcggactcgggctccccgcgctgccgccgctgcccggcctcgcatcccacggccagccccgcgtcgcgtccttttgcaaaaggctcgcgaggaacgtggtgtcaatggccgccggtgagccggccgcgccgctggccgacaacgccgagcttaccgagttcttcaactccttgaaacaagagtgggacagggtggaggacaagtacgcggtgaccacgctcgccgtcgccgccacgctcggcatgtggagcgccggcggagtagtatcggcaatcgacaggctccccgtggttccaggtctcatggaggtcgttggcattggctacagcgggtggtttgcgtacaagaacctgctattcaagcccgacaggaaagcgttcttcgctaaggtcaggaacatttacgaggatataatcagcggctagacgatgaagcacttgaagaggcacatcccaattgagagaagcacaaagtactcaaaacggagacgtgcaattactgtatatcaatatgtactatatatttgagcatagcatctaat

SEQ ID NO: 61714 - protein, 168 aa, Triticum aestivum
  peptide (1)..(168): Ceres Seq. ID no. 12624020
MAPTVISPATGAVASPIASDLGKAARSVGLGLPALPPLPGLASHGQPRVASFCKRLARNVVSMAAGEPAAPLADNAELTEFFNSLKQEWDRVEDKYAVTTLAVAATLGMWSAGGVVSAIDRLPVVPGLMEVVGIGYSGWFAYKNLLFKPDRKAFFAKVRNIYEDIISG

SEQ ID NO: 61715 - protein, 106 aa, Triticum aestivum
  peptide (1)..(106): Ceres Seq. ID no. 12624021
MAAGEPAAPLADNAELTEFFNSLKQEWDRVEDKYAVTTLAVAATLGMWSAGGVVSAIDRLPVVPGLMEVVGIGYSGWFAYKNLLFKPDRKAFFAKVRNIYEDIISG

SEQ ID NO: 61716 - protein, 92 aa, Triticum aestivum
  peptide (1)..(92): Ceres Seq. ID no. 12624022
TDRRHRYPWPRPSSPQPRAPSPRPSRATSGRPRAPSDSGSPRCRRCPASHPTASPASRPFAKGSRGTWCQWPPVSRPRRWPTTPSLPSSSTP

SEQ ID NO: 61717 - DNA, 825 bp, Triticum aestivum
  misc_feature (1)..(825): Ceres Seq. ID no. 12784326
aatctctcggagcctcacaaccaccgtatctcgctgcttctccgccgagccgatcacgagcagcaactagttgagatcaagccgtcgccgtcgccgtattcttcttcctctccgacaggaggttaagccgccgtcgccgtcttcttcttcgtctccgacaggagtttaagccgccgtcctcgtcttgttcttcctcgtcttcatcaggaggagcggccggaaacctcgggaagagctggccaacctggatcagctggagggcggcgccgcctccctgcgcgggcacgagaccgaggagcagcgcaacaaattcctcgtgctccgcctctacgaggcgctcaacggccgcgaccacgccgccgtgcactccctcctcgcccccgacctcgagtggtggttccatggcccgcccacgcaccagcacatgatgcgcctcctcaccggctccagctccccgtcctcctcctcctccttccgcttccagccgcgctccgtcgacgccttcggctccaccgtcatcgccgagggcgtcgacgacaaggccaaggcgtactgggtgcacgcctggaccgtgggtgccgatggggtgatcacccagctgcgcgaatacttcaacaccgacctcaccgtcacgcgcctcgccgccgccgccgcgtccaagtgcgtctggcagagccgccgccccgaccgcgcccgcaactccctcccgggcctcgtcctcgccctctaactgcggaaagcaatgtactcctactgtgtaggttttttattgtgggattacttaccacatttccgcacgtctcgtggacagaatgatgaattggt

SEQ ID NO: 61718 - protein, 101 aa, Triticum aestivum
  peptide (1)..(101): Ceres Seq. ID no. 12784327
MMRLLTGSSSPSSSSSFRFQPRSVDAFGSTVIAEGVDDKAKAYWVHAWTVGADGVITQLREYFNTDLTVTRLAAAAASKCVWQSRRPDRARNSLPGLVLAL

SEQ ID NO: 61719 - protein, 100 aa, Triticum aestivum
  peptide (1)..(100): Ceres Seq. ID no. 12784328
MRLLTGSSSPSSSSSFRFQPRSVDAFGSTVIAEGVDDKAKAYWVHAWTVGADGVITQLREYFNTDLTVTRLAAAAASKCVWQSRRPDRARNSLPGLVLAL

SEQ ID NO: 61720 - DNA, 912 bp, Triticum aestivum
  misc_feature (1)..(912): Ceres Seq. ID no. 15226744
attcaccgacagtctctgactctcttgtcttaataacccccctgccatcctaggaagaatcgaaagagcgagaaaatgatcagaacgtttttcctcttccttgtcttcttcatcatatggacgcaagtccacgcgcagctaattccaccgtcgaagcccgatggtttcgtatacccaccgggtcgccgtgttgacccggattctatactgatcgaggcgttttatgacccggtgtgcccgtacagtagagactcttggccgccgctaaagcaagcgcttaaacactacggatctcgcgtttccttgctcctccacctacttccgttaccgtaccatgacaatgcgtatgtaacctctcgtgctttacacatagtgaatattcacaacgctaatgctaccttcagtttgctggaagggttctttaagcatcaggcaatgttctatggtgcgcaaacacaactcctgactagacctgaagttgtgggaagaattgtcaagcttggaacagccacgttgggaaactcttatcatcatgttcttaaatctggattcaacgacacaaagtcggaacgtgcaaccagagtttcattcaagtatagcgcttcaagaggtgtgtatggaacaccaaccttctccgtgaatgggttcgcattgccagatgctgatgatccctcagattttggaggatggaaaaaaattattgattctctggttcaaccacacaaagtacaaggtagctagagatgcaagatgatctcgtttcctttatttgacgatcgctagtactttaccttttttcacatctatataatgtaaaaataagagtgctattgctgtgtgatgtgacaatatgcactgtatatataatttgtcaaaacctttttatcgtacaaatgaaacatatattcattg

SEQ ID NO: 61721 - protein, 221 aa, Triticum aestivum
  peptide (1)..(221): Ceres Seq. ID no. 15226745
MIRTFFLFLVFFIIWTQVHAQLIPPSKPDGFVYPPGRRVDPDSILIEAFYDPVCPYSRDSWPPLKQALKHYGSRVSLLLHLLPLPYHDNAYVTSRALHIVNIHNANATFSLLEGFFKHQAMFYGAQTQLLTRPEVVGRIVKLGTATLGNSYHHVLKSGFNDTKSERATRVSFKYSASRGVYGTPTFSVNGFALPDADDPSDFGGWKKIIDSLVQPHKVQGS

SEQ ID NO: 61722 - DNA, 818 bp, Triticum aestivum
  misc_feature (1)..(818): Ceres Seq. ID no. 13661903
aactagaacatcctaatcgaaaatattttttcgccttacacctcgccatcgactcacatacttttgctggccggccggagccacacgaccacaaggaaggagctaagctagcaccgacaaacagcccttgctgccgtcccgatggcaagcaccaacatggcgtcggccacctccagattcatgctggcggcgggcatccccagcggcaccaacggcggcgtgagcagccgcgtcagcttcgtcccctccaaccgactgggcttgaagctcgtggcccgcgccgaggaggagcccactgccgccgcgccggcggaaccagcaccggccgcggaggagaaaccggacgccgccgtggccaccaaggagcccgccaaagccaagccgccgccgaggggacccaagaggggaaccaaggtgaagattctgaggagggagtcctactggtacaacgggaccggatccgtcgtcacggttgatcaggatcccaacacccgttacccggtggtggtgcgtttcgccaaggtgaactacgccggcgtgtcgaccaacaactacgccctggacgagatcaaggaggttgctgcttaaacgatcgaagctgccgcgtgtgctccatccaatgtttgtatcagtagctcgtcaagtgacgatgtgaatgttagcctctcacaaaccttatgtgtaatacctctgcgattatatgtatttgcctgcttcctcatggacctaataatctcctcctgttgcttaagatgattgcattcttgctcacttttgtacaaaagatcggttgttcatgttaccggaaggctacacag

SEQ ID NO: 61723 - protein, 157 aa, Triticum aestivum
  peptide (1)..(157): Ceres Seq. ID no. 13661904
LEHPNRKYFFALHLAIDSHTFAGRPEPHDHKEGAKLAPTNSPCCRPDGKHQHGVGHLQIHAGGGHPQRHQRRREQPRQLRPLQPTGLEARGPRRGGAHCRRAGGTSTGRGGETGRRRGHQGARQSQAAAEGTQEGNQGEDSEEGVLLVQRDRIRRHG

SEQ ID NO: 61724 - protein, 148 aa, Triticum aestivum
  peptide (1)..(148): Ceres Seq. ID no. 13661905
MASTNMASATSRFMLAAGIPSGTNGGVSSRVSFVPSNRLGLKLVARAEEEPTAAAPAEPAPAAEEKPDAAVATKEPAKAKPPPRGPKRGTKVKILRRESYWYNGTGSVVTVDQDPNTRYPVVVRFAKVNYAGVSTNNYALDEIKEVAA

SEQ ID NO: 61725 - protein, 143 aa, Triticum aestivum
  peptide (1)..(143): Ceres Seq. ID no. 13661906
MASATSRFMLAAGIPSGTNGGVSSRVSFVPSNRLGLKLVARAEEEPTAAAPAEPAPAAEEKPDAAVATKEPAKAKPPPRGPKRGTKVKILRRESYWYNGTGSVVTVDQDPNTRYPVVVRFAKVNYAGVSTNNYALDEIKEVAA

SEQ ID NO: 61726 - DNA, 839 bp, Triticum aestivum
  misc_feature (1)..(839): Ceres Seq. ID no. 12624558
aagcccatacatccacactgcttagtctatagactctataccatagtttcaccaccacctagctttaccagaaatggagggtcagagatcacagcgctggggttacttgaaagacaaggctatagccaccagccttgctgaagaagaaacggagaatagcatggatggagaggaggatgatactggagatgaagacaaaaggaagagagtgatagagagagctagaggtcctaacacagaacgtgttcccttgcggctgtgcctggtcgataggtgcactgctaacttaactgaggccaagcagtattaccgcagacacaaagtctgtgaggttcatgcaaaggcctcttctgcaactgttgctggagtcaagcaacgtttttgtcaacaatgcagcaggttccatgagctagcagagtttgatgaaactaaaagaagttgcaggaggcgcttagctggacacaatgagaggaggaggaagatatccggtgacagttacggagaagggtcaggccggagaggggttagcttgacacagactcaagaaagaaacaggatagacatgaaacttcctatgactaactcaccattcaagcgaccacagatcagataaaacaatatcaactcacccaaacgctctctctcttctgtcatctacttatgttctatgtctacgttctcttgttatccaaataatggcatctaaccatgtggtattatctcctacacctctatataattacaaaactctagtaccctttatgtaatcatgtaaaggatgcctatccacaaatgtataagaccttatcatactcttgtattgtctaattatgtttcgt

SEQ ID NO: 61727 - protein, 179 aa, Triticum aestivum
  peptide (1)..(179): Ceres Seq. ID no. 12624559
MEGQRSQRWGYLKDKAIATSLAEEETENSMDGEEDDTGDEDKRKRVIERARGPNTERVPLRLCLVDRCTANLTEAKQYYRRHKVCEVHAKASSATVAGVKQRFCQQCSRFHELAEFDETKRSCRRRLAGHNERRRKISGDSYGEGSGRRGVSLTQTQERNRIDMKLPMTNSPFKRPQIR

SEQ ID NO: 61728 - protein, 150 aa, Triticum aestivum
  peptide (1)..(150): Ceres Seq. ID no. 12624560
MDGEEDDTGDEDKRKRVIERARGPNTERVPLRLCLVDRCTANLTEAKQYYRRHKVCEVHAKASSATVAGVKQRFCQQCSRFHELAEFDETKRSCRRRLAGHNERRRKISGDSYGEGSGRRGVSLTQTQERNRIDMKLPMTNSPFKRPQIR

SEQ ID NO: 61729 - DNA, 854 bp, Triticum aestivum
  misc_feature (1)..(854): Ceres Seq. ID no. 12624081
aatcgcttcttcgaaacgccaaaagagcaacaacatccaatggcttctcacaccttcctctccttctcatcgcctccgcgcctcctcgtttcccctccgtccactctccgttcctctttcggcggcgtctctctcaacctccaccgtccccagtctgtttccttcccggcctcgaagaaatcgctgacagtcgtttccgccgcgaagaaagctgttgctgtgctcaagggtaactccgacgtcgaaggagttgttactttgacacaagaagacacaggtcctacaaaagtgagtgttcgtatcaccggtctcacaccagggcctcatggctttcacctccatgagtttggtgatacaacaaatggatgcatctcaacagggccacatttcaaccctaacaacatgacacacggagctcctgaagacgagatccgtcatgcgggtgacctgggaaacattactgccaaggccgatggcgtggcagaaacaacacttgtggacaatcagattcctctgactggtcctaactctgttgttggaagagcctttgtggttcacgagcttaaggatgacctcggaaagggtgggcatgagcttagcctgaccactggaaacgcaggcgggagattggcatgcggtgtggttggtttgacgccgctctaagtctgggctaagtaagtactttggtgtctactgtgttggtcgtcttgtctgttgaatcagatgtcaaataaaagttggctgaataagcttttgatgtttatgttcctagcatcaaagtctctttctggagttgtgcctttgtaaacgtgtttgttacttttggtttaaatctgcatttgatcgtttgtttt

SEQ ID NO: 61730 - protein, 220 aa, Triticum aestivum
  peptide (1)..(220): Ceres Seq. ID no. 12624082
NRFFETPKEQQHPMASHTFLSFSSPPRLLVSPPSTLRSSFGGVSLNLHRPQSVSFPASKKSLTVVSAAKKAVAVLKGNSDVEGVVTLTQEDTGPTKVSVRITGLTPGPHGFHLHEFGDTTNGCISTGPHFNPNNMTHGAPEDEIRHAGDLGNITAKADGVAETTLVDNQIPLTGPNSVVGRAFVVHELKDDLGKGGHELSLTTGNAGGRLACGVVGLTPL

SEQ ID NO: 61731 - protein, 207 aa, Triticum aestivum
  peptide (1)..(207): Ceres Seq. ID no. 12624083
MASHTFLSFSSPPRLLVSPPSTLRSSFGGVSLNLHRPQSVSFPASKKSLTVVSAAKKAVAVLKGNSDVEGVVTLTQEDTGPTKVSVRITGLTPGPHGFHLHEFGDTTNGCISTGPHFNPNNMTHGAPEDEIRHAGDLGNITAKADGVAETTLVDNQIPLTGPNSVVGRAFVVHELKDDLGKGGHELSLTTGNAGGRLACGVVGLTPL

SEQ ID NO: 61732 - DNA, 780 bp, Triticum aestivum
  misc_feature (1)..(780): Ceres Seq. ID no. 15172618
aaatcacccacagctaagcttccgccacccaactcttccgtccatccaaaagacgtacggcacgtgcaagttcgaagaaggaaagcatcgaatcaatggcgggcgtgagccggagcatggtggcgccgctgctggtgctgaacctggtgatgtacatcgtcgtcatcggcctcgccagctggaacctcaaccacttcatcaacggcaccaccaactacgccggcgtggccggcaacggcgccaccttctacttcctcctcttcgccatcctcgccggcgtggtgggcgccgcctccaagctcgccggcgtgcaccacgtcaggacctggcgcggggacagcctcgccaccagcgcctcctccgcgctcgtcgcctgggccatcacggcgctcgccttcgggctcgcgtgcaaggagatccacgtcggcggtcaccgcggctggcggctccgggttctcgaggcgttcatcatcatactcgccttcacccagctgctctacgtgatggcgctccacgccggtctcttcggcaaccagttcggcgacgggtacggcgcggagcaccagtacggcgaccaccatcacaagggcatgggcaccggcgcccccgccgccagggtctgaccgtctttgagcttttactttgcttaatttcttgatgggccaatgaacaagatgtatgtatgtatcaatgtatgtgtgcgtgtgtttgtgttgggcgagtgtgatgtaacatgtatgcatacatagtgtcggtgcatgtgctgccgttgttttttac

SEQ ID NO: 61733 - protein, 218 aa, Triticum aestivum
  peptide (1)..(218): Ceres Seq. ID no. 15172619
NHPQLSFRHPTLPSIQKTYGTCKFEEGKHRINGGREPEHGGAAAGAEPGDVHRRHRPRQLEPQPLHQRHHQLRRRGRQRRHLLLPPLRHPRRRGGRRLQARRRAPRQDLARGQPRHQRLLRARRLGHHGARLRARVQGDPRRRSPRLAAPGSRGVHHHTRLHPAALRDGAPRRSLRQPVRRRVRRGAPVRRPPSQGHGHRRPRRQGLTVFELLLCLIS

SEQ ID NO: 61734 - protein, 175 aa, Triticum aestivum
  peptide (1)..(175): Ceres Seq. ID no. 15172620
MAGVSRSMVAPLLVLNLVMYIVVIGLASWNLNHFINGTTNYAGVAGNGATFYFLLFAILAGVVGAASKLAGVHHVRTWRGDSLATSASSALVAWAITALAFGLACKEIHVGGHRGWRLRVLEAFIIILAFTQLLYVMALHAGLFGNQFGDGYGAEHQYGDHHHKGMGTGAPAARV

SEQ ID NO: 61735 - protein, 168 aa, Triticum aestivum
  peptide (1)..(168): Ceres Seq. ID no. 15172621
MVAPLLVLNLVMYIVVIGLASWNLNHFINGTTNYAGVAGNGATFYFLLFAILAGVVGAASKLAGVHHVRTWRGDSLATSASSALVAWAITALAFGLACKEIHVGGHRGWRLRVLEAFIIILAFTQLLYVMALHAGLFGNQFGDGYGAEHQYGDHHHKGMGTGAPAARV

SEQ ID NO: 61736 - DNA, 940 bp, Triticum aestivum
  misc_feature (1)..(940): Ceres Seq. ID no. 15173936
aagaacgcaatgtctggtgccgctgacacagctgcggccgccgccgtcgccgccgtcgccggctcatcgggtcccgcggcgttgccgctcagcggacgcgtggccatcgtgaccggcgcgtcgcgcggcatcgggcgagccatcgcggcccacctctcctccctcggcgcaagcgtcgtcctgggctacgcggccagcgcggccgaggccgacgcgctcgccgcagagctcccacgagccgtcgccgtgaaggccaacgtgtccgaagaggccggcgtgcgctccctcttcgacgccgccgagtcggccttcggctgcgcggcgccgcacatcatagtcgccaacgccggcgtgctcggcgacaagtacccgcccctcgccgacaccgccacggcggacttcgaccgcgtgttcgccgtcaacacgcgcggcgccttcctctgcctccgcgaggccgccaaccggctgccccgtggcggcggcggccggatcgtggccgtgacgtcgtccgtggtcgggtcgaacccgacggggtactccgcctacaccgcgtccaaggcggccgtggaggcgatggtgcgtaccatggccaaggagctcaagggcacgcgcgtgacggccaactgcgtggctccgggggccacggccacggacatgttcttcgccgggaagagcaacgagacggtgaggcggaccgcggagatgaacccgatggagcggctcggggaggccggcgacatcgcaccagtggtcggcttcctctgcactgacgccgccgagtgggtcaacgggcaggtcatcagggtcaacggcgggtacgtctgataatctgctggctggcctgtcatgccattagacattacggtgggagcgaaataatgcctctgggtgttgcagaaaactaaaaaaatatatctgccggaaatttatagcacaattt

SEQ ID NO: 61737 - protein, 274 aa, Triticum aestivum
  peptide (1)..(274): Ceres Seq. ID no. 15173937
KNAMSGAADTAAAAAVAAVAGSSGPAALPLSGRVAIVTGASRGIGRAIAAHLSSLGASVVLGYAASAAEADALAAELPRAVAVKANVSEEAGVRSLFDAAESAFGCAAPHIIVANAGVLGDKYPPLADTATADFDRVFAVNTRGAFLCLREAANRLPRGGGGRIVAVTSSVVGSNPTGYSAYTASKAAVEAMVRTMAKELKGTRVTANCVAPGATATDMFFAGKSNETVRRTAEMNPMERLGEAGDIAPVVGFLCTDAAEWVNGQVIRVNGGYV

SEQ ID NO: 61738 - protein, 271 aa, Triticum aestivum
  peptide (1)..(271): Ceres Seq. ID no. 15173938
MSGAADTAAAAAVAAVAGSSGPAALPLSGRVAIVTGASRGIGRAIAAHLSSLGASVVLGYAASAAEADALAAELPRAVAVKANVSEEAGVRSLFDAAESAFGCAAPHIIVANAGVLGDKYPPLADTATADFDRVFAVNTRGAFLCLREAANRLPRGGGGRIVAVTSSVVGSNPTGYSAYTASKAAVEAMVRTMAKELKGTRVTANCVAPGATATDMFFAGKSNETVRRTAEMNPMERLGEAGDIAPVVGFLCTDAAEWVNGQVIRVNGGYV

SEQ ID NO: 61739 - DNA, 634 bp, Triticum aestivum
  misc_feature (1)..(634): Ceres Seq. ID no. 15173929
aaatacacacaagaaatgcaaatgattgatgagcttcttaatgaaaggaatgtaatccatgcatcctataccaacaatccacctctaaaacggacttcgagcaggaataaatctaaatcatcaccttctttcaaatatgatgaagaaaaaaaccagaggaaagaaaagaaagtgaaggatcagcacatggaagcctgcggaagcgaagatgacgactcgagtgataagaaaaccaaagagcggttcccaaggaagagatggctaaacattcctttcaaagttgacaggagaaagccatgctgaccataatggtaagcttacaagtgaaatacaaactattttcattttgactgccccagaagaactcattcgccattacctttttccttagtgttgtctattatatttcctgcaaagattgggtgcaaccctgagttcatatgatgtatggctacgaggcacgagcactcgtagcttctaagggtgctgccaccgtagtccagttccatattcttgagtgtgataatgtcaattttgatttcattggctgtgtaatcagttgtaaatattagttatctcgtctctgttgcacattatctctttccccgctttcgaatcctgatgtgtaattaac

SEQ ID NO: 61740 - protein, 100 aa, Triticum aestivum
  peptide (1)..(100): Ceres Seq. ID no. 15173930
KYTQEMQMIDELLNERNVIHASYTNNPPLKRTSSRNKSKSSPSFKYDEEKNQRKEKKVKDQHMEACGSEDDDSSDKKTKERFPRKRWLNIPFKVDRRKPC

SEQ ID NO: 61741 - protein, 95 aa, Triticum aestivum
  peptide (1)..(95): Ceres Seq. ID no. 15173931
MQMIDELLNERNVIHASYTNNPPLKRTSSRNKSKSSPSFKYDEEKNQRKEKKVKDQHMEACGSEDDDSSDKKTKERFPRKRWLNIPFKVDRRKPC

SEQ ID NO: 61742 - protein, 93 aa, Triticum aestivum
  peptide (1)..(93): Ceres Seq. ID no. 15173932
MIDELLNERNVIHASYTNNPPLKRTSSRNKSKSSPSFKYDEEKNQRKEKKVKDQHMEACGSEDDDSSDKKTKERFPRKRWLNIPFKVDRRKPC

SEQ ID NO: 61743 - DNA, 797 bp, Triticum aestivum
  misc_feature (1)..(797): Ceres Seq. ID no. 15173925
tagacaaggaaggaatgtggtagaaaatccaaaaatggaagctgaacttcgatacaaggatttgtctcataaatttcacaaaatggcacaaaaagcagccaactctccacaatgttgtattctattggataatgcacttgattccgtcgctccgcatatacatgatttactcaatgcatccactagtgccatgaatgaactatgtaaagacaaagagaatgttgacccaaatgtgcagcaagtagatgagttgcttagatctgcacggctgaagaaaaaagaggttcagtcaaagaacttaaggagatagaaaatttggcttgataagttactcaaggggaagcacagagtaactaaaggaccaacaaaacagggagaaaagccacaaaggaagaaggatggtgtgcaacaaaagaaaaaagatggtgtgcagcctcaagtagaagtcgagaagtatgacaacaacaaagaagtaaatttggtgcttcaagagtgcaataatattatgagtttcacccagctcttgacggctgaccatgataatctgttctagcatggaagctccttagataatattttgtacatggtggtgatcatgatgattatctgttctagcatggaactcgtgagatagtatttaatactgaatttcaatcaagtggtactgaatttgtattgttaaattactgctgttttttgttgctatatgactgctgtttgcatacagttttttttgtatagctaagtttgaaatttaatactgaatttcaatcaagtggtattgaatttgtattgtt

SEQ ID NO: 61744 - protein, 102 aa, Triticum aestivum
  peptide (1)..(102): Ceres Seq. ID no. 15173926
RQGRNVVENPKMEAELRYKDLSHKFHKMAQKAANSPQCCILLDNALDSVAPHIHDLLNASTSAMNELCKDKENVDPNVQQVDELLRSARLKKKEVQSKNLRR

SEQ ID NO: 61745 - protein, 91 aa, Triticum aestivum
  peptide (1)..(91): Ceres Seq. ID no. 15173927
MEAELRYKDLSHKFHKMAQKAANSPQCCILLDNALDSVAPHIHDLLNASTSAMNELCKDKENVDPNVQQVDELLRSARLKKKEVQSKNLRR

SEQ ID NO: 61746 - protein, 75 aa, Triticum aestivum
  peptide (1)..(75): Ceres Seq. ID no. 15173928
MAQKAANSPQCCILLDNALDSVAPHIHDLLNASTSAMNELCKDKENVDPNVQQVDELLRSARLKKKEVQSKNLRR

SEQ ID NO: 61747 - DNA, 889 bp, Triticum aestivum
  misc_feature (1)..(889): Ceres Seq. ID no. 15173862
tccgttctcccttctcccatcccatgtaacaaaatcagctcagctcagcgacaacagcggcggatgatgagagctcctcctcggctactgtcgcctccttcctccgccacggctcctcacctcctcctctacgcttcctccgcggcctgccgcctccctccctccgcggccgccgtcgcccgctccgtctccgtctccaccaccgtcgtcgacgccccggccgccgccgccgagccgggctcctccgactcggcctccgccacgccgcgacgccgcctcatcctcctccgccacggggacagcgcggttggggaacgcttcaccagagatcatgacaaaccactgagcaaagctggaagagctgatgcaataagcgtttctgataaattccatcaaatgggatggatacctgagcttatcctatgcagtgatgcaactcgtacaaaggaaactcttcagatcatgcaagagcatgttcaaggattgtctcaagcacttgtgcatttcatcccaagtttctactcgattgctgcaatggatggtcaaactgccgagcacttgcaaaaggcaatttgtgaatattcaactgatgagatactaacggtgatgtgcatgggacataataaaggatgggaagaagcagcctctatgttttctggtgattcagtggtgctcaagacgtgtaatgctgcattgctagaagctgctgggaaatcatggattgaggctttttcgcaggctggccttgggggatggaagcttcacggcattgtaaagccataaagtgaaaacattgtagctaaagctagatacagtttttttgtagcatttttgttctcattttgcctggtgtagctatgattgaatgttaatgaagttattgatgtgg

SEQ ID NO: 61748 - protein, 260 aa, Triticum aestivum
  peptide (1)..(260): Ceres Seq. ID no. 15173863
SVLPSPIPCNKISSAQRQQRRMMRAPPRLLSPPSSATAPHLLLYASSAACRLPPSAAAVARSVSVSTTVVDAPAAAAEPGSSDSASATPRRRLILLRHGDSAVGERFTRDHDKPLSKAGRADAISVSDKFHQMGWIPELILCSDATRTKETLQIMQEHVQGLSQALVHFIPSFYSIAAMDGQTAEHLQKAICEYSTDEILTVMCMGHNKGWEEAASMFSGDSVVLKTCNAALLEAAGKSWIEAFSQAGLGGWKLHGIVKP

SEQ ID NO: 61749 - protein, 239 aa, Triticum aestivum
  peptide (1)..(239): Ceres Seq. ID no. 15173864
MMRAPPRLLSPPSSATAPHLLLYASSAACRLPPSAAAVARSVSVSTTVVDAPAAAAEPGSSDSASATPRRRLILLRHGDSAVGERFTRDHDKPLSKAGRADAISVSDKFHQMGWIPELILCSDATRTKETLQIMQEHVQGLSQALVHFIPSFYSIAAMDGQTAEHLQKAICEYSTDEILTVMCMGHNKGWEEAASMFSGDSVVLKTCNAALLEAAGKSWIEAFSQAGLGGWKLHGIVKP

SEQ ID NO: 61750 - protein, 238 aa, Triticum aestivum
  peptide (1)..(238): Ceres Seq. ID no. 15173865
MRAPPRLLSPPSSATAPHLLLYASSAACRLPPSAAAVARSVSVSTTVVDAPAAAAEPGSSDSASATPRRRLILLRHGDSAVGERFTRDHDKPLSKAGRADAISVSDKFHQMGWIPELILCSDATRTKETLQIMQEHVQGLSQALVHFIPSFYSIAAMDGQTAEHLQKAICEYSTDEILTVMCMGHNKGWEEAASMFSGDSVVLKTCNAALLEAAGKSWIEAFSQAGLGGWKLHGIVKP

SEQ ID NO: 61751 - DNA, 870 bp, Triticum aestivum
  misc_feature (1)..(870): Ceres Seq. ID no. 15173847
caattcagattccccaagatcgtctcgtctcgtctcgaatcgcatccatgggttggcgttggcacgacgacggcgagggcgacggtggccgcggcgggctcggcgacatccccgacctcgccggccgaggcggcggcgaggcggcgcacgtcggcacgcgccgggtggtgcagtcccgctgccacacggaggaggtggagcccggccgcttcgtccgcaagtgcgagaagaccgagcagctcctccgcaactgcgtcggcaggccttctgaactggtggagtcgaaaactgagaacaccgaagaagatgtcacagatgaaatgaccggtggtgcctcgcattctcttggcttcccaacaaaagagccctttgcatttccaggacttcgcagtgacattgaagctattgagaaaggcttcggtagctttctggatgaagctgagcggatgaccaacgaattcttcaaatcttttggatttccaaccattcacgacggggactcgagaccgtttcctaggcaacctgcagagaggcatgttggagaaggtaccgtgaagaagcccaatgagaatgagtactcagaattcggtagccagataactgatgtgtaacaagctacagtcgtataacatgccttgttggagctgaagcctgagaagtgtgtttcgctgggtatctagggtactaaagtggtttctcttttggactcttcattatggttgtaatagtcgatgaagaatcatattttactaattttatctgcaactatcataagtgtatgacttttggttgtatgggcattatgtatagtactgttttcagacgcttcagctgtaacatggataaatctgaagatctcagggctgcaag

SEQ ID NO: 61752 - protein, 202 aa, Triticum aestivum
  peptide (1)..(202): Ceres Seq. ID no. 15173848
IQIPQDRLVSSRIASMGWRWHDDGEGDGGRGGLGDIPDLAGRGGGEAAHVGTRRVVQSRCHTEEVEPGRFVRKCEKTEQLLRNCVGRPSELVESKTENTEEDVTDEMTGGASHSLGFPTKEPFAFPGLRSDIEAIEKGFGSFLDEAERMTNEFFKSFGFPTIHDGDSRPFPRQPAERHVGEGTVKKPNENEYSEFGSQITDV

SEQ ID NO: 61753 - protein, 187 aa, Triticum aestivum
  peptide (1)..(187): Ceres Seq. ID no. 15173849
MGWRWHDDGEGDGGRGGLGDIPDLAGRGGGEAAHVGTRRVVQSRCHTEEVEPGRFVRKCEKTEQLLRNCVGRPSELVESKTENTEEDVTDEMTGGASHSLGFPTKEPFAFPGLRSDIEAIEKGFGSFLDEAERMTNEFFKSFGFPTIHDGDSRPFPRQPAERHVGEGTVKKPNENEYSEFGSQITDV

SEQ ID NO: 61754 - protein, 107 aa, Triticum aestivum
  peptide (1)..(107): Ceres Seq. ID no. 15173850
QFRFPKIVSSRLESHPWVGVGTTTARATVAAAGSATSPTSPAEAAARRRTSARAGWCSPAATRRRWSPAASSASARRPSSSSATASAGLLNWWSRKLRTPKKMSQMK

SEQ ID NO: 61755 - DNA, 783 bp, Triticum aestivum
  misc_feature (1)..(783): Ceres Seq. ID no. 15173814
attcaacaacccaaatcctttcaatgctgggtcatccactagtaatagcactcaatcatctgggctgtttacgtcttcccctacaatggggcagcagccatttggccactcatttaaccagcaatcaagcactccagctttctccaccagtatgttcaatacatctaacatcggaatcactggaggtggagggatatttggcaacacttcttcaccttttcaaacatcaccatttcaacaatctgctttggtgaccctcctgaacatcaagtgcatgaataagaagacgggtgagcagtacacgcaagggccgaggttggacaagttcaaggagatgttggtgaagaaggctgaggagcagggagtggagtttatctcgtttgacggtgccaagggcgagtggaagttcagggtgaagcacttcagctcctacgggtttggtgaagccgaagccgacgacctggccgattccttgtagctttgttgataggtgcttgttttcttttggatgaacggtggacactcgattccatgtagcgttggtcggtagctggtctgggagaatattggttgtgatgcttttcttctctgaatgctgctatgagttccttcccatgttcttctgtacatattcttttttcttgcagaatgcacaaaaattacattctggcaccaatctagcacgtgcgtggattggataatgaactgacatctgtacaaatctggtcgatgaataatcttgttactgtcctggatggaatgcatccttttggcagtttatct

SEQ ID NO: 61756 - protein, 158 aa, Triticum aestivum
  peptide (1)..(158): Ceres Seq. ID no. 15173815
FNNPNPFNAGSSTSNSTQSSGLFTSSPTMGQQPFGHSFNQQSSTPAFSTSMFNTSNIGITGGGGIFGNTSSPFQTSPFQQSALVTLLNIKCMNKKTGEQYTQGPRLDKFKEMLVKKAEEQGVEFISFDGAKGEWKFRVKHFSSYGFGEAEADDLADSL

SEQ ID NO: 61757 - protein, 130 aa, Triticum aestivum
  peptide (1)..(130): Ceres Seq. ID no. 15173816
MGQQPFGHSFNQQSSTPAFSTSMFNTSNIGITGGGGIFGNTSSPFQTSPFQQSALVTLLNIKCMNKKTGEQYTQGPRLDKFKEMLVKKAEEQGVEFISFDGAKGEWKFRVKHFSSYGFGEAEADDLADSL

SEQ ID NO: 61758 - protein, 108 aa, Triticum aestivum
  peptide (1)..(108): Ceres Seq. ID no. 15173817
MFNTSNIGITGGGGIFGNTSSPFQTSPFQQSALVTLLNIKCMNKKTGEQYTQGPRLDKFKEMLVKKAEEQGVEFISFDGAKGEWKFRVKHFSSYGFGEAEADDLADSL

SEQ ID NO: 61759 - DNA, 827 bp, Triticum aestivum
  misc_feature (1)..(827): Ceres Seq. ID no. 15173803
tccagtccagtatccgtcgttccccctcgccatcgtcccgcgccccgtccatggccaccgccacgctccctctccgcctcctcccctcgagaaccccactcctccacaccgccgccttcctccctgcgagcacttctctctccgtcaccgcgtccgcgccccgcaactggcgcatcttcgccgccgccgaggaggcgcccgctccggtggaagccgaggcggaggaggtggtagaggatgccgcggttccggagcctgttgaggtgcagctggctgctgctggcgcggggaaggacgccgacatcttcgccgttgtcatgattgggtccagacaatacattgtgatgccagatcattttgaacaaggtactactggtgtcaactagagacaaagcttatattggcatgccagtggtgaccaatgctgctgttcatgcaattcttgaagaacagggactggacgataaagtgattgttttcaagttcaagaagaagaagaagtaccagaggaaagctggtcacagacagccaaatacgaggttaagaattactggcataagtggatatgaggaattccctgctgatccaatacttcaagttccagcttaagtgtaattgtaagttgtttagttacaaatgcttggtagtacattagagtgcaagagcattttccccactgttccccaagtgaggctcttccccaagttaatgtactcgaaatgctgccattcgtcgagtggttggttccatccttttgtttattccgccagctcttgtgttcctttgaaatccaattgtattatcttgattgtgcagaaagacagggg

SEQ ID NO: 61760 - protein, 127 aa, Triticum aestivum
  peptide (1)..(127): Ceres Seq. ID no. 15173804
QSSIRRSPSPSSRAPSMATATLPLRLLPSRTPLLHTAAFLPASTSLSVTASAPRNWRIFAAAEEAPAPVEAEAEEVVEDAAVPEPVEVQLAAAGAGKDADIFAVVMIGSRQYIVMPDHFEQGTTGVN

SEQ ID NO: 61761 - protein, 111 aa, Triticum aestivum
  peptide (1)..(111): Ceres Seq. ID no. 15173805
MATATLPLRLLPSRTPLLHTAAFLPASTSLSVTASAPRNWRIFAAAEEAPAPVEAEAEEVVEDAAVPEPVEVQLAAAGAGKDADIFAVVMIGSRQYIVMPDHFEQGTTGVN

SEQ ID NO: 61762 - protein, 86 aa, Triticum aestivum
  peptide (1)..(86): Ceres Seq. ID no. 15173806
PVQYPSFPLAIVPRPVHGHRHAPSPPPPLENPTPPHRRLPPCEHFSLRHRVRAPQLAHLRRRRGGARSGGSRGGGGGRGCRGSGAC

SEQ ID NO: 61763 - DNA, 922 bp, Triticum aestivum
  misc_feature (1)..(922): Ceres Seq. ID no. 15173795
cacgggcctctctccacgcctgcattccaacacggacgagccaacgagaggagggaggcgagatgacggcggggcctaagagcggcgggggcggcgcggcagccgcgcgagcggcggccgcggggccgaggacggtgctcatcacgggggtcagccgggggctgggccgagctttagctctggagctcgcgcgccgggggcacgccgtcgtcggctgcggccgctcggtcgatcccatccgctccctcgaggccgagatgggttccccgtctcgccactttctcaccgtcgccgacgtcaggtctgacacccccatgggtgaactggcaaaggctgttgtggaaaggaagcaaattcctgatatcatagtaaacaatgctggtacaataaacaagaataacaaaacgtggaatgttccagcagaagaatttgatacggtggttgatacaaatattaaaggaacagcaaatgtacttcgccattttgtaccacttatgatacagaagaaacatgggatgataatcaatttatcctctggttggggaaggtctgctgctgcagaggttgctccatattgtgcttcaaagtgggctattgaaggtttaacacgctcattagcaaaggagttgcctcctggattggcagcaattgctcttagccctggtgttgtgaataccgacatgcttacttcatgctttggaagttcagctgcgttataccaatctactgagcaatgggcacccaaggcagccacaatgattctaagcctttcactggaagataatggtgcctcactaactgtatgatgctgtagcaatgttgtattaatcacagatcggttctcaagtaattatgacatttaacttgcagctgttgaatatcaattatgttgtagtaataagataaaaaggttcatgtaaag

SEQ ID NO: 61764 - protein, 267 aa, Triticum aestivum
  peptide (1)..(267): Ceres Seq. ID no. 15173796
RASLHACIPTRTSQREEGGEMTAGPKSGGGGAAAARAAAAGPRTVLITGVSRGLGRALALELARRGHAVVGCGRSVDPIRSLEAEMGSPSRHFLTVADVRSDTPMGELAKAVVERKQIPDIIVNNAGTINKNNKTWNVPAEEFDTVVDTNIKGTANVLRHFVPLMIQKKHGMIINLSSGWGRSAAAEVAPYCASKWAIEGLTRSLAKELPPGLAAIALSPGVVNTDMLTSCFGSSAALYQSTEQWAPKAATMILSLSLEDNGASLTV

SEQ ID NO: 61765 - protein, 247 aa, Triticum aestivum
  peptide (1)..(247): Ceres Seq. ID no. 15173797
MTAGPKSGGGGAAAARAAAAGPRTVLITGVSRGLGRALALELARRGHAVVGCGRSVDPIRSLEAEMGSPSRHFLTVADVRSDTPMGELAKAVVERKQIPDIIVNNAGTINKNNKTWNVPAEEFDTVVDTNIKGTANVLRHFVPLMIQKKHGMIINLSSGWGRSAAAEVAPYCASKWAIEGLTRSLAKELPPGLAAIALSPGVVNTDMLTSCFGSSAALYQSTEQWAPKAATMILSLSLEDNGASLTV

SEQ ID NO: 61766 - protein, 182 aa, Triticum aestivum
  peptide (1)..(182): Ceres Seq. ID no. 15173798
MGSPSRHFLTVADVRSDTPMGELAKAVVERKQIPDIIVNNAGTINKNNKTWNVPAEEFDTVVDTNIKGTANVLRHFVPLMIQKKHGMIINLSSGWGRSAAAEVAPYCASKWAIEGLTRSLAKELPPGLAAIALSPGVVNTDMLTSCFGSSAALYQSTEQWAPKAATMILSLSLEDNGASLTV

SEQ ID NO: 61767 - DNA, 1132 bp, Triticum aestivum
  misc_feature (1)..(1132): Ceres Seq. ID no. 15173789
acacagggagcaaccaaaccaaacgaacccagccaaccagcaaactccccttctcttctcttcttcttcctcctagtacaccttttgtctctccgtccacagtccacacacagcactctccaccaaaagatcaagcaagagccaagagcacgtgcgatggcggcgacggcgactgcgacggcggcggcgacgagcgtggtgacggggacgacgcggtggtgcccgacgccggagcagctgatgatcctggaggagatgtaccgcggcgggctgcgcacccccaacgcgtcgcagatccagcagatcacggcgcacctggcccactacggccgcatcgagggcaagaacgtcttctactggttccagaaccacaaggcccgggaccgccagaagctccgccgcaggctctgcatgagccaccacctcctctcctgcgcgcactactacgccgccgccaacgccggccagtaccaccagcagcagcagctcctcggcgccggcgcggtgcctcctccgctgctgcagcacccgcagcagcagcagtactactccgcctcttgcgccggtggcggctacgaccagcacctgctcccgacgaccgtcccagcttccgcttacgctgctgctgctgggtacgcctaccccttcgccggcgtgccggcaagccggtgcgccgagccctcgccgccaaacaccccgctctccttccatcatcagggaggaggcgtagtgggatcgccggagtactcgctggggaggctgggcaacttcggcgtggtggaggacacatgccggccgtcgcggtacgagcagcagccgcagcagctggccgcggcaacggaagatcaggcggcgccggtgacggcgacggggctgttctgccggccgctgaagacgctggacctcttccccggcgcgatcaaggaggagcagcgcgacgtcgcctagctatatactacctccaacctatagctagccaccagtagcagcagcagcagcagtcgtcgtcgtagtacgtagagcagtccgtacgttgcgcgcgttgtacgtacgcaggtagagcagtacgtaggagtacgtatctttgtaattcccatcgatttttcgttgattattaatccgctttagtagc

SEQ ID NO: 61768 - protein, 327 aa, Triticum aestivum
  peptide (1)..(327): Ceres Seq. ID no. 15173790
TGSNQTKRTQPTSKLPFSSLLLPPSTPFVSPSTVHTQHSPPKDQARAKSTCDGGDGDCDGGGDERGDGDDAVVPDAGAADDPGGDVPRRAAHPQRVADPADHGAPGPLRPHRGQERLLLVPEPQGPGPPEAPPQALHEPPPPLLRALLRRRQRRPVPPAAAAPRRRRGASSAAAAPAAAAVLLRLLRRWRLRPAPAPDDRPSFRLRCCCWVRLPLRRRAGKPVRRALAAKHPALLPSSGRRRSGIAGVLAGEAGQLRRGGGHMPAVAVRAAAAAAGRGNGRSGGAGDGDGAVLPAAEDAGPLPRRDQGGAARRRLAIYYLQPIASHQ

SEQ ID NO: 61769 - protein, 315 aa, Triticum aestivum
  peptide (1)..(315): Ceres Seq. ID no. 15173791
TQGATKPNEPSQPANSPSLLFFFLLVHLLSLRPQSTHSTLHQKIKQEPRARAMAATATATAAATSVVTGTTRWCPTPEQLMILEEMYRGGLRTPNASQIQQITAHLAHYGRIEGKNVFYWFQNHKARDRQKLRRRLCMSHHLLSCAHYYAAANAGQYHQQQQLLGAGAVPPPLLQHPQQQQYYSASCAGGGYDQHLLPTTVPASAYAAAAGYAYPFAGVPASRCAEPSPPNTPLSFHHQGGGVVGSPEYSLGRLGNFGVVEDTCRPSRYEQQPQQLAAATEDQAAPVTATGLFCRPLKTLDLFPGAIKEEQRDVA

SEQ ID NO: 61770 - protein, 263 aa, Triticum aestivum
  peptide (1)..(263): Ceres Seq. ID no. 15173792
MAATATATAAATSVVTGTTRWCPTPEQLMILEEMYRGGLRTPNASQIQQITAHLAHYGRIEGKNVFYWFQNHKARDRQKLRRRLCMSHHLLSCAHYYAAANAGQYHQQQQLLGAGAVPPPLLQHPQQQQYYSASCAGGGYDQHLLPTTVPASAYAAAAGYAYPFAGVPASRCAEPSPPNTPLSFHHQGGGVVGSPEYSLGRLGNFGVVEDTCRPSRYEQQPQQLAAATEDQAAPVTATGLFCRPLKTLDLFPGAIKEEQRDVA

SEQ ID NO: 61771 - DNA, 797 bp, Triticum aestivum
  misc_feature (1)..(797): Ceres Seq. ID no. 15173774
atcccaagctagcaaagcccacctagcgctcagccacaagccagtagcccagtacgctctagctagctactagcgttatccacatagcaatggcgccctccatgctcgccctcttcctcgccatgaatctggtcctcctcgtggcagtgcatggctgcgggtcgtgcggcaacacaccgcccgtccctgttccaagcccaccgattgcgtttccaccgccagctcccgtgccgtctccgccttcccccggcggcgggggcggcacctgctcaatcgacactctgaagctgaaggtttgcgccaacgtgctgaacctgctgaagctcaacctcggcgtgccgacggacgagcagtgctgcccgcttctgagcggcctcgctgacctagacgccgccctgtgtctctgcactgccatcaaggccaacgtcctcggcatcaagctcaatgtgcccgtcgacctcgtgctcctcctcaaccagtgcggcaagacctgccccgccgacttcacctgccctcgctgatccatccatcacaaaccatgcattttttacctgcatcgcatcatcgtcgtcggcgtactcgtacttacaatattttttcgtatccgcatgtacctatatattttctcgcaattacaatatggtagtatatgtcagtcgcgtgcatgcatgggctccctcgcaagtgcatgcatgcttcagttagtcattccccgttatggtatctaagtgcatgattcaagtatttgtaaacgggtatatgtacgtggaataaaattttgttcaggttgtcttttt

SEQ ID NO: 61772 - protein, 143 aa, Triticum aestivum
  peptide (1)..(143): Ceres Seq. ID no. 15173775
MAPSMLALFLAMNLVLLVAVHGCGSCGNTPPVPVPSPPIAFPPPAPVPSPPSPGGGGGTCSIDTLKLKVCANVLNLLKLNLGVPTDEQCCPLLSGLADLDAALCLCTAIKANVLGIKLNVPVDLVLLLNQCGKTCPADFTCPR

SEQ ID NO: 61773 - protein, 139 aa, Triticum aestivum
  peptide (1)..(139): Ceres Seq. ID no. 15173776
MLALFLAMNLVLLVAVHGCGSCGNTPPVPVPSPPIAFPPPAPVPSPPSPGGGGGTCSIDTLKLKVCANVLNLLKLNLGVPTDEQCCPLLSGLADLDAALCLCTAIKANVLGIKLNVPVDLVLLLNQCGKTCPADFTCPR

SEQ ID NO: 61774 - protein, 132 aa, Triticum aestivum
  peptide (1)..(132): Ceres Seq. ID no. 15173777
MNLVLLVAVHGCGSCGNTPPVPVPSPPIAFPPPAPVPSPPSPGGGGGTCSIDTLKLKVCANVLNLLKLNLGVPTDEQCCPLLSGLADLDAALCLCTAIKANVLGIKLNVPVDLVLLLNQCGKTCPADFTCPR

SEQ ID NO: 61775 - DNA, 783 bp, Triticum aestivum
  misc_feature (1)..(783): Ceres Seq. ID no. 15173749
atcgatgtcgacggcgacgtcccagcgcctacacgtacgtgtacacccccgcacccccctgactttatctcgccgacatggtcacggccctcctataaaatcaccacacccgacactgctaaatcaacaacactcatcaccgccaaccatcagctttcaatctagctaccagttccagtttagcacacagattttttcctcgggccaacctccagatccatcaacaatggcgaactctgtgtccggagtggcggtgaacgaggagtgcgtgaaggcgttccaggagctgcgggcggaccgcaagcaccggttcgtggtgtacaagatggacgacgacgcgcagcaggtggtggtggacaaggtgggcgcgctcgacgccaccttcgacgacctggcggcggccatgcccgccgacgactgccgctacgccgtctacgacctggacttcgtgtccgaggactcggccggcgagaccccccgcagcaagatcttcttcatccactggtcgccggagtcggcggacgcgaggaacaagatgctgtacgccagctccacggaggggctcaagaaggagctggacggcgtgcagatcgacgtgcaggccaccgacgccagcgagctcaccctcgacatcctcaaggactacaccacctaagttaatcgatgaatcacgtacgcgcttggcatcgcgttcctgcttggagttggatcgtgtcttgtggatccaaataatgtttttccatgtgcagcggggtgtgaataattgatgagtggttttctttc

SEQ ID NO: 61776 - protein, 217 aa, Triticum aestivum
  peptide (1)..(217): Ceres Seq. ID no. 15173750
SMSTATSQRLHVRVHPRTPLTLSRRHGHGPPIKSPHPTLLNQQHSSPPTISFQSSYQFQFSTQIFSSGQPPDPSTMANSVSGVAVNEECVKAFQELRADRKHRFVVYKMDDDAQQVVVDKVGALDATFDDLAAAMPADDCRYAVYDLDFVSEDSAGETPRSKIFFIHWSPESADARNKMLYASSTEGLKKELDGVQIDVQATDASELTLDILKDYTT

SEQ ID NO: 61777 - protein, 216 aa, Triticum aestivum
  peptide (1)..(216): Ceres Seq. ID no. 15173751
MSTATSQRLHVRVHPRTPLTLSRRHGHGPPIKSPHPTLLNQQHSSPPTISFQSSYQFQFSTQIFSSGQPPDPSTMANSVSGVAVNEECVKAFQELRADRKHRFVVYKMDDDAQQVVVDKVGALDATFDDLAAAMPADDCRYAVYDLDFVSEDSAGETPRSKIFFIHWSPESADARNKMLYASSTEGLKKELDGVQIDVQATDASELTLDILKDYTT

SEQ ID NO: 61778 - protein, 142 aa, Triticum aestivum
  peptide (1)..(142): Ceres Seq. ID no. 15173752
MANSVSGVAVNEECVKAFQELRADRKHRFVVYKMDDDAQQVVVDKVGALDATFDDLAAAMPADDCRYAVYDLDFVSEDSAGETPRSKIFFIHWSPESADARNKMLYASSTEGLKKELDGVQIDVQATDASELTLDILKDYTT

SEQ ID NO: 61779 - DNA, 775 bp, Triticum aestivum
  misc_feature (1)..(775): Ceres Seq. ID no. 15173736
gcaattgcatccagttctcgcgccgcccccgtcccataatcccttcccgtcctcgcctcgtcgccggtaatggcgggtcccggcatcggagcggccgcgcctcgcctgtcgctgctgctgctgctgctcgtcgtcgtcttcgcgggctcctcccgccacagccgcaccgaggcggccgtgcggacgtgcacgtacacggtgaaggtgaagacgagctgcgcgtcgccggcgccgacgtcggacgcggttagcgtggcgttcggggacgcgtaccgcaacgaggcgtacggcgcgcgcctcccgagcgcgccgggcgggagggccttcgagcggtgcggcaccgacaccttccgcgtctccggggtgtgcggctacggcgtctgctacctctacctccgccgcgccggccgcgacggctgggcgcccgagtgggtccaggtcaccgagccgggccccggcgccggagagaagcccgccaccttctacttcggggcgccgctgccggacggcgtctggtacggccacaaccgctgcctcaaggccaaggccaaggcagcgggcacggcagcggcggcggctcggacaaacaccacctctgctgctgcttcgcctctgggctagcgcgacctgattcggctctacccaccgggcgcagcccctctccgtatgtaattcggcattcgtcgagaataagcagactgtgcttacagattcagaataagtaattagagaatcataatccgaaatatgatgaggccatgagggcaccttcttc

SEQ ID NO: 61780 - protein, 183 aa, Triticum aestivum
  peptide (1)..(183): Ceres Seq. ID no. 15173737
MAGPGIGAAAPRLSLLLLLLVVVFAGSSRHSRTEAAVRTCTYTVKVKTSCASPAPTSDAVSVAFGDAYRNEAYGARLPSAPGGRAFERCGTDTFRVSGVCGYGVCYLYLRRAGRDGWAPEWVQVTEPGPGAGEKPATFYFGAPLPDGVWYGHNRCLKAKAKAAGTAAAAARTNTTSAAASPLG

SEQ ID NO: 61781 - DNA, 652 bp, Triticum aestivum
  misc_feature (1)..(652): Ceres Seq. ID no. 15173713
acccaactcattcgctctctcgttctcctctccccgcaccaagagcagcaagaggcaagcgcaccccaaagctaagctctgctcagcaattttctccaaagtaacctacacacaaataccaatataccatggcgccatcagtggcctgctccttcttcttcgacgccgagctgcacggtgagcccgacatgccgtcgatggacgcgtgcgcgctctgtgccaagccgctggcgtgcgacagcgacgtcttcatgtacaaaggggacacggcctactgtagcgaggagtgccgccacgagcagatgcacctcgacaccgtctgtgccaagcaggccgcgcggaggcagcagcggttctcggcggggacagaatcccaccgtgggcagcggcagtccagcaaggtgtccgtcgcgagctaagcggccggcctggccgaggaaagttttgttcgaatagacaagatcggaattctgaagaaaacaacatctgtgggcatctgatgtctccgtctctccggccggtgctcttgcctcaaccggaggaagcatcaggtggcacgaagcataggttgttagaagggagagagaaggattgttgcgaaataattggatgtattattgagcctcgagggcgagtatatatatatgaacac

SEQ ID NO: 61782 - protein, 96 aa, Triticum aestivum
  peptide (1)..(96): Ceres Seq. ID no. 15173714
MAPSVACSFFFDAELHGEPDMPSMDACALCAKPLACDSDVFMYKGDTAYCSEECRHEQMHLDTVCAKQAARRQQRFSAGTESHRGQRQSSKVSVAS

SEQ ID NO: 61783 - protein, 76 aa, Triticum aestivum
  peptide (1)..(76): Ceres Seq. ID no. 15173715
MPSMDACALCAKPLACDSDVFMYKGDTAYCSEECRHEQMHLDTVCAKQAARRQQRFSAGTESHRGQRQSSKVSVAS

SEQ ID NO: 61784 - protein, 73 aa, Triticum aestivum
  peptide (1)..(73): Ceres Seq. ID no. 15173716
MDACALCAKPLACDSDVFMYKGDTAYCSEECRHEQMHLDTVCAKQAARRQQRFSAGTESHRGQRQSSKVSVAS

SEQ ID NO: 61785 - DNA, 624 bp, Triticum aestivum
  misc_feature (1)..(624): Ceres Seq. ID no. 15173027
acttcccccgaaaaggacctcactccccagcccagcccacccctccccgcccgctgcacagtccaaatccccgctccggcccggcgaccgaccgaggatgcccgcctccatgcccaagctgctcttcctcctgctgctcctcctcctcgccgcggccgcccactcttcaccggtcgtcccggatgcggcgggcgaggggtccgaccaggcggcggtgcgcatggtgccgatggccccggctggggggtcggggttcagcggggtggtgctgaacgagacgcggcggcggctggggagcttccagctctgcgcgccctgcacctgctgcggcgggcccaggggcgcctgcgtcctctccccgtgctgctacgctatcaactgcaacatccccaaccgcccattcggattctgctccttcacgcccaggtcttgcgactgcctccactgcaacgtctgagctctgcttctgctctgccctgctctcgagggtgatgagggcaatgttgagggcgatagtaagtattttagagtgtgggtggggaaaaaggacatgacagcatgagagttcccccaacccgaatgcttgccgatttgttattgttttagccctatagccattttgcc

SEQ ID NO: 61786 - protein, 163 aa, Triticum aestivum
  peptide (1)..(163): Ceres Seq. ID no. 15173028
TSPEKDLTPQPSPPLPARCTVQIPAPARRPTEDARLHAQAALPPAAPPPRRGRPLFTGRPGCGGRGVRPGGGAHGADGPGWGVGVQRGGAERDAAAAGELPALRALHLLRRAQGRLRPLPVLLRYQLQHPQPPIRILLLHAQVLRLPPLQRLSSASALPCSRG

SEQ ID NO: 61787 - protein, 151 aa, Triticum aestivum
  peptide (1)..(151): Ceres Seq. ID no. 15173029
LPPKRTSLPSPAHPSPPAAQSKSPLRPGDRPRMPASMPKLLFLLLLLLLAAAAHSSPVVPDAAGEGSDQAAVRMVPMAPAGGSGFSGVVLNETRRRLGSFQLCAPCTCCGGPRGACVLSPCCYAINCNIPNRPFGFCSFTPRSCDCLHCNV

SEQ ID NO: 61788 - protein, 119 aa, Triticum aestivum
  peptide (1)..(119): Ceres Seq. ID no. 15173030
MPASMPKLLFLLLLLLLAAAAHSSPVVPDAAGEGSDQAAVRMVPMAPAGGSGFSGVVLNETRRRLGSFQLCAPCTCCGGPRGACVLSPCCYAINCNIPNRPFGFCSFTPRSCDCLHCNV

SEQ ID NO: 61789 - DNA, 792 bp, Triticum aestivum
  misc_feature (1)..(792): Ceres Seq. ID no. 15173676
ttgttttcaagatatggtgtccgtggcttcccagccattcttctggcaagtgagactacaatggttcgttacaggggcacaaaagatctgaagtctctggttcagttctatcaagagactacaggcctcgacccaattacatatattgatgttgatcagcaagagagcactggaagtttaggatcagccatgccaggaggccgctctctgcgcaaaatggcgaaagacgagccctttctgtttcttggagccctttttataatcatgaagatcgcggcacacttcgtccccactgtcatctcccaactgagagccttcttgattgtgcgtgttcagaacttgaacttaagaatctgtaggggatcaagccaacttatggaacgggcattgactgtgcttgatgttcagaggctctggagcaagcttagactgagcagtaagacaagggacctaagtaaaggggcgagtaatgctcgagcttgggcttcgtcgtttgcgtccgtctcactgggtgaaccatcctccttacggcatgcctagcctcttcctcatgatgctggtcgatagtctagctgctgatatatggcccaaaattgtttggtcttgcttccccatcctgctatgtacgtgcatccgcgcatgtggggacccaggaatgtaaattttcaggatctcatcttgttgtaaataggaacgcgttttcgctttgctgacgcgatagctgatttctgacctttgtttcagttaactctttgatgtatggggaagatctgagtattttttcgatctctt

SEQ ID NO: 61790 - protein, 179 aa, Triticum aestivum
  peptide (1)..(179): Ceres Seq. ID no. 15173677
LFSRYGVRGFPAILLASETTMVRYRGTKDLKSLVQFYQETTGLDPITYIDVDQQESTGSLGSAMPGGRSLRKMAKDEPFLFLGALFIIMKIAAHFVPTVISQLRAFLIVRVQNLNLRICRGSSQLMERALTVLDVQRLWSKLRLSSKTRDLSKGASNARAWASSFASVSLGEPSSLRHA

SEQ ID NO: 61791 - protein, 159 aa, Triticum aestivum; identical to SEQ ID NO: 60924
  peptide (1)..(159): Ceres Seq. ID no. 15173678

SEQ ID NO: 61792 - protein, 116 aa, Triticum aestivum
  peptide (1)..(116): Ceres Seq. ID no. 15173679
MPGGRSLRKMAKDEPFLFLGALFIIMKIAAHFVPTVISQLRAFLIVRVQNLNLRICRGSSQLMERALTVLDVQRLWSKLRLSSKTRDLSKGASNARAWASSFASVSLGEPSSLRHA

SEQ ID NO: 61793 - DNA, 662 bp, Triticum aestivum
  misc_feature (1)..(662): Ceres Seq. ID no. 15173534
atccaaccctcctgctgctgctgtctgtgttgccgccccgaccgccgcctccaccacccacccacccccaccgcgccggcctctcccccctgtcccgtctccctcatggcctccgccgccgcttccgccgtctccttcgccaggcccgtcaagacaatcaatgccaactcggtctccttctctgctccaaggaaagacaatgtatccttccgtcttcagccagttccccagagattttctgttcgctgtgctgccaaaaaggagacagtagaaaaggtttgtgatattgtgaagagccagcttgcgcttgctgatgacactgtagtttctggctcctctacgtttgctgatcttggtgccgattctttggacacggttgagattgtcatgggcctcgaggaggctttcgggatcagcgtggaggagtcgagcgcgcagaccattgcaacggtggaggacgccgccaacctcatcgacagccttgttgcaaactaaacatatttcctggcaataatgtgctacccactgcaatcgttgctgctggagatggatcccatttgacgtgctagattttactgtggagagtcggtgacatctgtatcagtgtttttgcctgtcttgcgatattacgacattatttattaagcggttgttgaaggaat

SEQ ID NO: 61794 - protein, 164 aa, Triticum aestivum
  peptide (1)..(164): Ceres Seq. ID no. 15173535
IQPSCCCCLCCRPDRRLHHPPTPTAPASPPCPVSLMASAAASAVSFARPVKTINANSVSFSAPRKDNVSFRLQPVPQRFSVRCAAKKETVEKVCDIVKSQLALADDTVVSGSSTFADLGADSLDTVEIVMGLEEAFGISVEESSAQTIATVEDAANLIDSLVAN

SEQ ID NO: 61795 - protein, 129 aa, Triticum aestivum
  peptide (1)..(129): Ceres Seq. ID no. 15173536
MASAAASAVSFARPVKTINANSVSFSAPRKDNVSFRLQPVPQRFSVRCAAKKETVEKVCDIVKSQLALADDTVVSGSSTFADLGADSLDTVEIVMGLEEAFGISVEESSAQTIATVEDAANLIDSLVAN

SEQ ID NO: 61796 - protein, 93 aa, Triticum aestivum
  peptide (1)..(93): Ceres Seq. ID no. 15173537
PTLLLLLSVLPPRPPPPPPTHPHRAGLSPLSRLPHGLRRRFRRLLRQARQDNQCQLGLLLCSKERQCILPSSASSPEIFCSLCCQKGDSRKGL

SEQ ID NO: 61797 - DNA, 852 bp, Triticum aestivum
  misc_feature (1)..(852): Ceres Seq. ID no. 15173523
cctgcacccacccactccgccgagaaacagcaacagccacagccacacgcccacgcgcacacaccagatcgtcgacagcgatggcaacggcagcggcagcgggaacgagggaggagatggtctacatggcgaagctggcggagcaggccgagcggtacgaggagatggtcgagttcatggagaaggccgccgtcgccgtcgacgccaaggtattctacctgaatatgaagggagactaccatcgctacctcgcggagttcaagtcggccgccgagcgcaaggatgccgctgactccaccctcggtgcctaccaggccgctcaggacatagccatgaaggagctgccaccgactcaccccatcagactgggcctcgcgctcaacttctccgtgttctactatgagatcctcaactcgcctgatcgtgcgtgctcgctcgccaaacaggccttcgatgaagccatcgctgagctggattccctcggagaagattcctacaaggacagcaccctgataatgcaacttctccgtgacaatctcaccttgtggacctctgatatgcaggatgacgctggcgatgaaatgagggattcaagcaagcctgaggatgagcagtagtgaagggtcctagctactgccctctttctctcttaaccttcgggtagttatgatgcttgtacaaggaccattttcgtgtgtcctttgttgcttggtcttttacctaccctttctttcgttatattgttatacatcgccgtcctcgtgcattattttactttacaacttgaatactgctcgtgtatgcacggcttccttcagatttgaaccagagggttgtcaactcttgcttcct

SEQ ID NO: 61798 - protein, 204 aa, Triticum aestivum
  peptide (1)..(204): Ceres Seq. ID no. 15173524
CTHPLRRETATATATRPRAHTRSSTAMATAAAAGTREEMVYMAKLAEQAERYEEMVEFMEKAAVAVDAKVFYLNMKGDYHRYLAEFKSAAERKDAADSTLGAYQAAQDIAMKELPPTHPIRLGLALNFSVFYYEILNSPDRACSLAKQAFDEAIAELDSLGEDSYKDSTLIMQLLRDNLTLWTSDMQDDAGDEMRDSSKPEDEQ

SEQ ID NO: 61799 - protein, 178 aa, Triticum aestivum
  peptide (1)..(178): Ceres Seq. ID no. 15173525
MATAAAAGTREEMVYMAKLAEQAERYEEMVEFMEKAAVAVDAKVFYLNMKGDYHRYLAEFKSAAERKDAADSTLGAYQAAQDIAMKELPPTHPIRLGLALNFSVFYYEILNSPDRACSLAKQAFDEAIAELDSLGEDSYKDSTLIMQLLRDNLTLWTSDMQDDAGDEMRDSSKPEDEQ

SEQ ID NO: 61800 - protein, 166 aa, Triticum aestivum
  peptide (1)..(166): Ceres Seq. ID no. 15173526
MVYMAKLAEQAERYEEMVEFMEKAAVAVDAKVFYLNMKGDYHRYLAEFKSAAERKDAADSTLGAYQAAQDIAMKELPPTHPIRLGLALNFSVFYYEILNSPDRACSLAKQAFDEAIAELDSLGEDSYKDSTLIMQLLRDNLTLWTSDMQDDAGDEMRDSSKPEDEQ

SEQ ID NO: 61801 - DNA, 986 bp, Triticum aestivum
  misc_feature (1)..(986): Ceres Seq. ID no. 15173516
acatcggcccgtagcggaggagcctcctacagtcctactctcctcctctccccccattcactccatcgacgaagcgcacggagggtaactgcacaggaggaaaaccggcgaaggaagcggcggcggctccgggcgtggtcatggacgagaagacgcaggataaggtggaggcggcggtgctggagatcctgcggggttccgacatggagtccctgacggagtacaaggtccgcaccgccgccgccgaacgcctcggcatcgacctcgacctccccctccacaagcgcttcgtgcgacgcctcgtggaggactacctcaagtccctcgccgaagaagaagacgagaagcagaagggcggctcccgcaaggaggggaaaaagaaacagcagcgtcaggaggaggaagagcaggaagaggatgaggagaaggagggggaagaagaggaggaggaggaggacaagggaggtgaaggaaagaaagagttcgacgataatggagacctcatcctctgccgcctgtcgaagaacaggagggtgacgctgcaggagtttaagggcaaaacgctggtgtcgatccgcgagtactacatcaaggacggcaaggaaatgcccagctccaaagggatgagtatgacggtcgagcagtgggagacattcagcaaatcagtacctgcaatagaagacgccatcagaacacttggagaatcagattgaaaggatgccagaaaaacctaaaaatctcgacgctcgttctggacctctgcaagtagagtagtccatgggtgctctgagtactccatggggctactagagttcatctggacttgtataaagcttctcccttagtcaaggtaccgtacctactgatgcgtgctgggtagacagtttgggtgtgttcgcgaactagttctccgccggtatggtggaccgaagtttcatcgctgtgccatgtgatcttgtgctgttgaattgtcctttctgataccg

SEQ ID NO: 61802 - protein, 190 aa, Triticum aestivum
  peptide (1)..(190): Ceres Seq. ID no. 15173517
MDEKTQDKVEAAVLEILRGSDMESLTEYKVRTAAAERLGIDLDLPLHKRFVRRLVEDYLKSLAEEEDEKQKGGSRKEGKKKQQRQEEEEQEEDEEKEGEEEEEEEDKGGEGKKEFDDNGDLILCRLSKNRRVTLQEFKGKTLVSIREYYIKDGKEMPSSKGMSMTVEQWETFSKSVPAIEDAIRTLGESD

SEQ ID NO: 61803 - protein, 169 aa, Triticum aestivum
  peptide (1)..(169): Ceres Seq. ID no. 15173518
MESLTEYKVRTAAAERLGIDLDLPLHKRFVRRLVEDYLKSLAEEEDEKQKGGSRKEGKKKQQRQEEEEQEEDEEKEGEEEEEEEDKGGEGKKEFDDNGDLILCRLSKNRRVTLQEFKGKTLVSIREYYIKDGKEMPSSKGMSMTVEQWETFSKSVPAIEDAIRTLGESD

SEQ ID NO: 61804 - DNA, 615 bp, Triticum aestivum
  misc_feature (1)..(615): Ceres Seq. ID no. 15173484
gcgaggcaggatgctgctatgtcaaggtcagcatggatggggccccatacctgaggaaggtcgatcttaagacctactccagctatgacaacctttccctggagctggagaagatgttcagctgcttcatcactggcaaaagcagttcctgcaaaacatcgacgagagacaggctcactgatggttctagggctgatgctcttcaggaccaagagtatgtacttacctatgaggacaaggatgctgactggatgcttgttggtgatcttccttgggacttgtttaccactacttgtcggaaactgagaatcatgagaggctctgatgctgctggaatggccccaagatagctggaaccgatcggccagaacaaacaagcgtctgtccgtcctggcctctcctcctcctgaagtcttgtgtctgaatcacgcaagtgtggaattttgagttaacgctgcaaggcgccgctgaagggtgcgatggttgtctcaactctctgaaagtgtctgcgctgctgccagtttatctatctacgtgtgtagtggaatatgtgcgtcctactgtaaaacaatccgtttttgacctcgccgttgtagatggtcccttttggttcat

SEQ ID NO: 61805 - protein, 115 aa, Triticum aestivum
  peptide (1)..(115): Ceres Seq. ID no. 15173485
EAGCCYVKVSMDGAPYLRKVDLKTYSSYDNLSLELEKMFSCFITGKSSSCKTSTRDRLTDGSRADALQDQEYVLTYEDKDADWMLVGDLPWDLFTTTCRKLRIMRGSDAAGMAPR

SEQ ID NO: 61806 - protein, 105 aa, Triticum aestivum
  peptide (1)..(105): Ceres Seq. ID no. 15173486
MDGAPYLRKVDLKTYSSYDNLSLELEKMFSCFITGKSSSCKTSTRDRLTDGSRADALQDQEYVLTYEDKDADWMLVGDLPWDLFTTTCRKLRIMRGSDAAGMAPR

SEQ ID NO: 61807 - protein, 78 aa, Triticum aestivum
  peptide (1)..(78): Ceres Seq. ID no. 15173487
MFSCFITGKSSSCKTSTRDRLTDGSRADALQDQEYVLTYEDKDADWMLVGDLPWDLFTTTCRKLRIMRGSDAAGMAPR

SEQ ID NO: 61808 - DNA, 905 bp, Triticum aestivum
  misc_feature (1)..(905): Ceres Seq. ID no. 15173417
acgactccatcgcggagacaaccaaacaacctcgtacagcacaggcgatcgatcggcgcggccatggagaagccgccgatcccgagcatcatctccaccgtcacctactgctgcggggcgtgcgggtacgacctgaggctgagctcgctggcgcgggacacggcgggcggcgctggcgcgaggcggcggtgcgtgggcgcggcggaggtggtgttcgacgccatcgacgacgcgcgcttcggccacctggaggagttccggtggctggacgtgcgcgcctgcctccccttctcgcgccgcacgcgcctgctctgccgcaagtgcggcgcccgcctcggctacggctacgacgacaccgccgccgccgaccgcccgccgcgctaccacatcaagatccgggccctccagcccgcccccgatcccgcctcggaccacgcggcgccgtccgatccgtgatctgagatcctgccgtattctttgattgcctgtgcatgcagccgcatctgtctctctctcctttcaatcgaatctcctccaaagtcgctcgcttggacccgaagcaaggaatgaaacagactggttgattgatcgggatccgattttgctttctgatatttttaagcggaattattggtcttgacttggttgcgttgtggaactgtagaagtcaaaagttgtgtactgttccagtctgaacttccaatgctggtggcgacactgatcgtgcaagggggaggatcgccagcagcagctttcaaccatgcatcgtctctttgattcaaaggatcttcataggatttttgaaggattagaatccttaggaatgtttcctacgttggtcgtttgattcgtaggattgaatcttgtagaatttttttctaaggatttatttgtactacatttcg

SEQ ID NO: 61809 - protein, 152 aa, Triticum aestivum
  peptide (1)..(152): Ceres Seq. ID no. 15173418
DSIAETTKQPRTAQAIDRRGHGEAADPEHHLHRHLLLRGVRVRPEAELAGAGHGGRRWREAAVRGRGGGGVRRHRRRALRPPGGVPVAGRARLPPLLAPHAPALPQVRRPPRLRLRRHRRRRPPAALPHQDPGPPARPRSRLGPRGAVRSVI

SEQ ID NO: 61810 - protein, 151 aa, Triticum aestivum
  peptide (1)..(151): Ceres Seq. ID no. 15173419
TTPSRRQPNNLVQHRRSIGAAMEKPPIPSIISTVTYCCGACGYDLRLSSLARDTAGGAGARRRCVGAAEVVFDAIDDARFGHLEEFRWLDVRACLPFSRRTRLLCRKCGARLGYGYDDTAAADRPPRYHIKIRALQPAPDPASDHAAPSDP

SEQ ID NO: 61811 - protein, 130 aa, Triticum aestivum
  peptide (1)..(130): Ceres Seq. ID no. 15173420
MEKPPIPSIISTVTYCCGACGYDLRLSSLARDTAGGAGARRRCVGAAEVVFDAIDDARFGHLEEFRWLDVRACLPFSRRTRLLCRKCGARLGYGYDDTAAADRPPRYHIKIRALQPAPDPASDHAAPSDP

SEQ ID NO: 61812 - DNA, 1086 bp, Triticum aestivum
  misc_feature (1)..(1086): Ceres Seq. ID no. 15173410
gcattgtcgcatcgagttgcacacccactgcctgcacacgtctacgtacaccatggcagccatgcagagacttgtgctccttctgtccgtggcgatcgcggcgtcggcgcagggcccggcggtggcgcccgcggcgccgacgacgcccacggccccggcggcgcccgctccggcggccggcacgacgaacatcacgggggtgctggccaaggccgggcagttcaacaccttcatccggctgctcaagtcgacgggcgtggcggcgcagatcgacaaccagctcaacaacagcttcggcagcggcatgacggtgttcgcgcccaccgacaacgccttcacctcgctcgcctccggcacgctcaactcgctgtccgacagccagaagaacgcgctcatccagtaccacgtcctctccaccgccatccccatgtcgcagttcgacaccgtcagcaacccgctccgcacgcaggccggcagcacctcccccgcccagtacccgctcaacgtcaccgccgagggccagcaggtcaacatcaccaccggcgtcgtcaacgccaccgtcgacaacacgctctacaccggcgaccagctcgtcgtctaccaggtcaacaaggtgctcctgcccatggccatcgccggcacggccgcacccgcgcccgcgccgctcgcgcccaccaagaccaaggggaagacgcccacgtcgacggtcgccgacgcgcccgaggccgaagcgtcgacggacacgtcgctcgcggcgccggcacgggtggtcacactcacaggaggtggtgtcgtcgcggtggttcacgtgcttgccctggcctgcgtctggtgggggccgtgacagcgccgcgcccgatcagagtgtgagccccaacctgaggtctagatccatgcatcacaatctttttttgctcactttcttttcaaaggtgttggtctttttcgtttgatttgttctttttatttcagctcatttttatacctctgtaattgctagggacatgtaaagtgaaatgtactattacgggagtcacatttttatgtaatgttgttactaaataaatatacatatttttatagtgc

SEQ ID NO: 61813 - protein, 289 aa, Triticum aestivum
  peptide (1)..(289): Ceres Seq. ID no. 15173411
ALSHRVAHPLPAHVYVHHGSHAETCAPSVRGDRGVGAGPGGGARGADDAHGPGGARSGGRHDEHHGGAGQGRAVQHLHPAAQVDGRGGADRQPAQQQLRQRHDGVRAHRQRLHLARLRHAQLAVRQPEERAHPVPRPLHRHPHVAVRHRQQPAPHAGRQHLPRPVPAQRHRRGPAGQHHHRRRQRHRRQHALHRRPARRLPGQQGAPAHGHRRHGRTRARAARAHQDQGEDAHVDGRRRARGRSVDGHVARGAGTGGHTHRRWCRRGGSRACPGLRLVGAVTAPRPIRV

SEQ ID NO: 61814 - protein, 280 aa, Triticum aestivum
  peptide (1)..(280): Ceres Seq. ID no. 15173412
HCRIELHTHCLHTSTYTMAAMQRLVLLLSVAIAASAQGPAVAPAAPTTPTAPAAPAPAAGTTNITGVLAKAGQFNTFIRLLKSTGVAAQIDNQLNNSFGSGMTVFAPTDNAFTSLASGTLNSLSDSQKNALIQYHVLSTAIPMSQFDTVSNPLRTQAGSTSPAQYPLNVTAEGQQVNITTGVVNATVDNTLYTGDQLVVYQVNKVLLPMAIAGTAAPAPAPLAPTKTKGKTPTSTVADAPEAEASTDTSLAAPARVVTLTGGGVVAVVHVLALACVWWGP

SEQ ID NO: 61815 - protein, 263 aa, Triticum aestivum
  peptide (1)..(263): Ceres Seq. ID no. 15173413
MAAMQRLVLLLSVAIAASAQGPAVAPAAPTTPTAPAAPAPAAGTTNITGVLAKAGQFNTFIRLLKSTGVAAQIDNQLNNSFGSGMTVFAPTDNAFTSLASGTLNSLSDSQKNALIQYHVLSTAIPMSQFDTVSNPLRTQAGSTSPAQYPLNVTAEGQQVNITTGVVNATVDNTLYTGDQLVVYQVNKVLLPMAIAGTAAPAPAPLAPTKTKGKTPTSTVADAPEAEASTDTSLAAPARVVTLTGGGVVAVVHVLALACVWWGP

SEQ ID NO: 61816 - DNA, 728 bp, Triticum aestivum
  misc_feature (1)..(728): Ceres Seq. ID no. 15173047
gcgtgtccccattccgatccccctcccggcgccgcctccagcctagggtttcctcccgccgcccgtccgccccacccgccgccatggcccgccgcagcggaggaggaaggtcttcccgccctgctccacgtgctgctccagtgagaaacccaccagcgccagcccgtccagctcctccacctgctaccacccagagcagcggtggtggtatcatgagcgggattgggtccaccattgctcagggcatggctttcggtactggaagtgccatggcgcacagggctgttgatgctgtgatgggtccccgtaccattcagcatgagactgttgtcggtgaggctgctgcatctatgactccaatggacaatgctgctgatgacaagtgtggcaacccttccaaggccttccaagattgcatcaaccactacggaagcgatatcagcaagtgccagttctaccttgacatgctgaacgagtgccgccgtggaggagcaactctttaagctactatctttgcttgattggggcttaattgggcagaacctgttttcagtcatgatgatgatgatatatatctcctaaataattcattggcaatattatgaacctatgccacagcttgtgtctattacctaccctagttcgtggtctctgttgtcccgggagtatttccttgtattgatgttggaattaccttcatggcagtgggtttataaatatggagtttg

SEQ ID NO: 61817 - protein, 166 aa, Triticum aestivum
  peptide (1)..(166): Ceres Seq. ID no. 15173048
VSPFRSPSRRRLQPRVSSRRPSAPPAAMARRSGGGRSSRPAPRAAPVRNPPAPARPAPPPATTQSSGGGIMSGIGSTIAQGMAFGTGSAMAHRAVDAVMGPRTIQHETVVGEAAASMTPMDNAADDKCGNPSKAFQDCINHYGSDISKCQFYLDMLNECRRGGATL

SEQ ID NO: 61818 - protein, 139 aa, Triticum aestivum
  peptide (1)..(139): Ceres Seq. ID no. 15173049
MARRSGGGRSSRPAPRAAPVRNPPAPARPAPPPATTQSSGGGIMSGIGSTIAQGMAFGTGSAMAHRAVDAVMGPRTIQHETVVGEAAASMTPMDNAADDKCGNPSKAFQDCINHYGSDISKCQFYLDMLNECRRGGATL

SEQ ID NO: 61819 - protein, 96 aa, Triticum aestivum
  peptide (1)..(96): Ceres Seq. ID no. 15173050
MSGIGSTIAQGMAFGTGSAMAHRAVDAVMGPRTIQHETVVGEAAASMTPMDNAADDKCGNPSKAFQDCINHYGSDISKCQFYLDMLNECRRGGATL

SEQ ID NO: 61820 - DNA, 534 bp, Triticum aestivum
  misc_feature (1)..(534): Ceres Seq. ID no. 15173382
acagctaccaccactctatcagtctatcccgttggttctacttggcgtcagcacggcacctgccttccaagttcatccaccatgggcgactcatcctcggcttcctacatcagaatggtgcaccatctgatagagaagtgcatttgcttcaacctcaacaaggaggggtgcatggaggccctggagaagcatgccaagatcaacccggtcgtcactgccactgtgtggaaagagctggagaaggagaacaaggagttcttcgagtcttacaacagggaccgcgtggagcggaacatcgaggcggcgacgatggagcggatccagaagatgctctccgacgcggctgcctccaagacctccgacgacgatgagggctagaaggctgctgcttatgtccaagctcatgcgcatgcatcacctctagctaattaattgtatgaatagcatgtcttccgttaattggatccattatgtctaggaggatcgaatttattaattgcacctatctcataacagaccagtagcttgaaaccg

SEQ ID NO: 61821 - protein, 125 aa, Triticum aestivum
  peptide (1)..(125): Ceres Seq. ID no. 15173383
TATTTLSVYPVGSTWRQHGTCLPSSSTMGDSSSASYIRMVHHLIEKCICFNLNKEGCMEALEKHAKINPVVTATVWKELEKENKEFFESYNRDRVERNIEAATMERIQKMLSDAAASKTSDDDEG

SEQ ID NO: 61822 - protein, 122 aa, Triticum aestivum
  peptide (1)..(122): Ceres Seq. ID no. 15173384
SYHHSISLSRWFYLASARHLPSKFIHHGRLILGFLHQNGAPSDREVHLLQPQQGGVHGGPGEACQDQPGRHCHCVERAGEGEQGVLRVLQQGPRGAEHRGGDDGADPEDALRRGCLQDLRRR

SEQ ID NO: 61823 - protein, 98 aa, Triticum aestivum
  peptide (1)..(98): Ceres Seq. ID no. 15173385
MGDSSSASYIRMVHHLIEKCICFNLNKEGCMEALEKHAKINPVVTATVWKELEKENKEFFESYNRDRVERNIEAATMERIQKMLSDAAASKTSDDDEG

SEQ ID NO: 61824 - DNA, 688 bp, Triticum aestivum
  misc_feature (1)..(688): Ceres Seq. ID no. 15173348
cttgctagatactacttgaacaacttcgcagatgggacgaagcaggatgccatggatcttcttcaaggactttacatcacatctgttagtcgagacatggcacctccaacaaaagcaggatttgtagagagctatgcgtccgcccgccttgcttttgcattggtttccggagcttttatgttcatgatgatgtcactgagacatgctcggcatgatgctcgtcatttattgctgtcacttctctgggctggtctttgcatcgggatcacacactttgtgagaagcaatggccgggtattcacgaaccggccccgtgcccacaagtcgtcacacccttgatggaaagcaggcggggtgatagattatcattcgttcatcaaacaatggcagtactccacttttttctatgtagagatgtaatttgtgtccatccctttctcctgaagattgtgttctattatctatctatattctttgttcttcaagtccatatgcataatcgatctttgaccagtaaataaacagctgttgctagttgcaacaatcacattttccagtaccaggacatagttacagcttcccgcgataaaaggatatagagatacggctttccggtgtatttatgccaaagtggcgaagtgatgttgtgcagagcttttcagttatgccaattgagatttgttgttcc

SEQ ID NO: 61825 - protein, 112 aa, Triticum aestivum
  peptide (1)..(112): Ceres Seq. ID no. 15173349
LARYYLNNFADGTKQDAMDLLQGLYITSVSRDMAPPTKAGFVESYASARLAFALVSGAFMFMMMSLRHARHDARHLLLSLLWAGLCIGITHFVRSNGRVFTNRPRAHKSSHP

SEQ ID NO: 61826 - protein, 95 aa, Triticum aestivum
  peptide (1)..(95): Ceres Seq. ID no. 15173350
MDLLQGLYITSVSRDMAPPTKAGFVESYASARLAFALVSGAFMFMMMSLRHARHDARHLLLSLLWAGLCIGITHFVRSNGRVFTNRPRAHKSSHP

SEQ ID NO: 61827 - protein, 80 aa, Triticum aestivum
  peptide (1)..(80): Ceres Seq. ID no. 15173351
MAPPTKAGFVESYASARLAFALVSGAFMFMMMSLRHARHDARHLLLSLLWAGLCIGITHFVRSNGRVFTNRPRAHKSSHP

SEQ ID NO: 61828 - DNA, 818 bp, Triticum aestivum
  misc_feature (1)..(818): Ceres Seq. ID no. 15173284
actccgccacacgagtgagcagcatacgcgcgacagacgatcccgaacccagagagggggaacacggagccggccgcggagggggagcccagccaagccagccagagtgaacaaccgtcccaaccaccgacgggcgggcatgagggccaccgagatgttgaccgccgcggcgggggctgccgccgggacgacgccctccacggcctcggtggccggcctggccggggccagcgggggcgtccccgccgcgggcgccggcgggaacttccccctcggcgccgccctcctcgccttcgccttcgccaacctcgtcaacgtcctctccatctggttaaaggagaagaagtgggatgcaaggaagtttcttacatcttccggagttatttcatctctttctgcggccgtggcaagtttggctgtggcggttggccaacaagaaggcggagatagctctgtttttgcccttgcattggtttttgctgccgttgtaatgtatgatgcatcaggagttaggtttcacacaggccgccaagctgcgttgttaaatcaaatagtttctgatttatcaccggaacatccaattatctctaccttccggccgcttcgggaacctcttggacacagtccatttcaggtttttgccggagcccttgttggttgtacagtagcgtatttaatggggaattcttctgtatgagaaatactgtagttggcaatttgccttatactcagattacactacttttatacgaggaacattttttgtgcaaagtctactttgtatctctggccatataaagtgcccttctgttgaactg

SEQ ID NO: 61829 - protein, 231 aa, Triticum aestivum
  peptide (1)..(231): Ceres Seq. ID no. 15173285
LRHTSEQHTRDRRSRTQRGGTRSRPRRGSPAKPARVNNRPNHRRAGMRATEMLTAAAGAAAGTTPSTASVAGLAGASGGVPAAGAGGNFPLGAALLAFAFANLVNVLSIWLKEKKWDARKFLTSSGVISSLSAAVASLAVAVGQQEGGDSSVFALALVFAAVVMYDASGVRFHTGRQAALLNQIVSDLSPEHPIISTFRPLREPLGHSPFQVFAGALVGCTVAYLMGNSSV

SEQ ID NO: 61830 - protein, 185 aa, Triticum aestivum
  peptide (1)..(185): Ceres Seq. ID no. 15173286
MRATEMLTAAAGAAAGTTPSTASVAGLAGASGGVPAAGAGGNFPLGAALLAFAFANLVNVLSIWLKEKKWDARKFLTSSGVISSLSAAVASLAVAVGQQEGGDSSVFALALVFAAVVMYDASGVRFHTGRQAALLNQIVSDLSPEHPIISTFRPLREPLGHSPFQVFAGALVGCTVAYLMGNSSV

SEQ ID NO: 61831 - protein, 180 aa, Triticum aestivum
  peptide (1)..(180): Ceres Seq. ID no. 15173287
MLTAAAGAAAGTTPSTASVAGLAGASGGVPAAGAGGNFPLGAALLAFAFANLVNVLSIWLKEKKWDARKFLTSSGVISSLSAAVASLAVAVGQQEGGDSSVFALALVFAAVVMYDASGVRFHTGRQAALLNQIVSDLSPEHPIISTFRPLREPLGHSPFQVFAGALVGCTVAYLMGNSSV

SEQ ID NO: 61832 - DNA, 733 bp, Triticum aestivum
  misc_feature (1)..(733): Ceres Seq. ID no. 15173921
caggtgtcaactgtaagataggagtggatataaatacaacatcagctgattcagagaaaactatgccctttttcatgtcaaaaggctggagagagaccctgtgtaaatgtggaacatgcaccaacttctatgcacaacgaggcattgcacatcttactgataaggaggactctattgaggaatatgagaagatagctaagcagaaaagggagaagaagttggagcagcaggaaggagctgaagctaacttcatcaattcacttaaccatgtccagaagatagagattctgagtggcatcaatgacatgaaaaatgagtttcaatcctttatggaatcctttgatccatcaaaaccagttacatctgatgatgtaaaatctattttcgagaatcttgctaggaagaagcagaggttatcctgagcttcagttgcttcaggccttgcttgagcgggtgagcctaatgccctgctgcttctacgccaaaatttccaactgttatctggccaccactgtcttggtgggtactgttaacttatgctgtggccaccatggcgtgtttatctactgtactgtaatgctagcttcgtcgtagttctgctagatgtttcaaagtcagctcgtgatagtgatccgagcgaccagtggagtgaacagcatgtttgttcctttggatcaaaactttgtggtgattcccattacccaaaaatgtgttctccattgcgctgcccttg

SEQ ID NO: 61833 - protein, 139 aa, Triticum aestivum
  peptide (1)..(139): Ceres Seq. ID no. 15173922
GVNCKIGVDINTTSADSEKTMPFFMSKGWRETLCKCGTCTNFYAQRGIAHLTDKEDSIEEYEKIAKQKREKKLEQQEGAEANFINSLNHVQKIEILSGINDMKNEFQSFMESFDPSKPVTSDDVKSIFENLARKKQRLS

SEQ ID NO: 61834 - protein, 119 aa, Triticum aestivum
  peptide (1)..(119): Ceres Seq. ID no. 15173923
MPFFMSKGWRETLCKCGTCTNFYAQRGIAHLTDKEDSIEEYEKIAKQKREKKLEQQEGAEANFINSLNHVQKIEILSGINDMKNEFQSFMESFDPSKPVTSDDVKSIFENLARKKQRLS

SEQ ID NO: 61835 - protein, 115 aa, Triticum aestivum
  peptide (1)..(115): Ceres Seq. ID no. 15173924
MSKGWRETLCKCGTCTNFYAQRGIAHLTDKEDSIEEYEKIAKQKREKKLEQQEGAEANFINSLNHVQKIEILSGINDMKNEFQSFMESFDPSKPVTSDDVKSIFENLARKKQRLS

SEQ ID NO: 61836 - DNA, 969 bp, Triticum aestivum
  misc_feature (1)..(969): Ceres Seq. ID no. 15173146
tcgcaggaaatactcttccgtcccccatctttgaaccttcctcctcctccgcgctgacctacccctcaccctcccctcccctcccctccccggcaacaaaccaggcccctcctacatagaggcaatccgttccggcctctcagcccgcagcagcaccccggccggagctcccgcgacgccgagccggacggacgggaggagccaccgccccgcagcacgcgcgcgctggtagggcgagggaggggaggggatcgatggcgaagctgtacgtgcaggcggtgcccccgccggatctgaacaagaacaccgagtggttcatgtacccgggggtctggaccacctacatcttcatcctcttcgtctcctggctcctcatcctctccatcttcggctgcacccccggcatggcctggacgctcgtcaacctcggccacttcgcgattacataccacttcttccactggaagaagggaactccatttgctgatgaccaggggatgtataatagattgacttggtgggagcaaatggacaacggcaagcagcttactcgcaacagaaaatttcttgttgtggttcctgtagtcctgtacttgatcgcttcgcacaccacagactatcaacatcctatgctctttttgaacaccattgcagtcacagtactggttgttgcgaaactaccgaacatgcacaaggtccggatttttggaatcaatgcgggtaactaagcggcagcgtcccagggtagacagcactcaatatcatgtttcatttgaatggctggatggtgttgcacctagttctgaattcgctcctcagagtaccagtgtgtagtgtttgagagctgttagtagatgacatgtgatcattgtacagagaaacgctaaaaggcctggaaaatgatgctgttttgcaactttgcccgacacacgttctgtagactctttatgctgctatatgttttgttgc

SEQ ID NO: 61837 - protein, 157 aa, Triticum aestivum
  peptide (1)..(157): Ceres Seq. ID no. 15173147
MAKLYVQAVPPPDLNKNTEWFMYPGVWTTYIFILFVSWLLILSIFGCTPGMAWTLVNLGHFAITYHFFHWKKGTPFADDQGMYNRLTWWEQMDNGKQLTRNRKFLVVVPVVLYLIASHTTDYQHPMLFLNTIAVTVLVVAKLPNMHKVRIFGINAGN

SEQ ID NO: 61838 - protein, 136 aa, Triticum aestivum
  peptide (1)..(136): Ceres Seq. ID no. 15173148
MYPGVWTTYIFILFVSWLLILSIFGCTPGMAWTLVNLGHFAITYHFFHWKKGTPFADDQGMYNRLTWWEQMDNGKQLTRNRKFLVVVPVVLYLIASHTTDYQHPMLFLNTIAVTVLVVAKLPNMHKVRIFGINAGN

SEQ ID NO: 61839 - protein, 107 aa, Triticum aestivum
  peptide (1)..(107): Ceres Seq. ID no. 15173149
MAWTLVNLGHFAITYHFFHWKKGTPFADDQGMYNRLTWWEQMDNGKQLTRNRKFLVVVPVVLYLIASHTTDYQHPMLFLNTIAVTVLVVAKLPNMHKVRIFGINAGN

SEQ ID NO: 61840 - DNA, 975 bp, Triticum aestivum
  misc_feature (1)..(975): Ceres Seq. ID no. 15173365
ctcaggtagcgagtcagtgacgcacgctctccgtgccacaccacgaccgcaccgttctacccgcttagctacccaagagaccggcgtccggcaatggagtcgcgggtgaagcccgggttcagcggcgcgggcagcctgtccggcagccggaggagctacatgggggcggcggcgcctagcaagccggcggtggacgggtgcggcgtggcactgcgcgtgttcatcctggcggcgacgctggtcgccgccgtggtgatgggcctggaccggcagacggccaccgtgcaggtcaccatcgccgacacgctgccgccgctgcaggtccccgtcacggccaagtggtcctactcctccgccttcgtgtacttcgtggtggcgaacgcgatggcgtgcgtcttctcggcggtggcgctggcggcgtgccgcagccggagcgcggtggtgccgctgatggtcggcgacctggtggtgcaggcgctcctgttctcggcggtgggcgcgtcggcggagttcggcatcctgggcgagcgcggcaactcccacgtgcgctggggcaaggtgtgccacgtctacagcagcttttgcgagcgcgccatggccgccgtcatcgtctccctcatcgccgccttcgccaacctcgtgcacctcatgttcgccatcctagacgtccacaaaaactcctcctactactagtaactagctcagccgctgctgatccatcgtgcacgcatcggagatgcccgatcgatgcatgcagatggtatacctgatttccgtgtgaactaacggtctcggctttagacgcgttggtttgatttaacggcttattgttgtgtcgatgcattttggcactgtaatgttagctattgatacaaatgtatggaggattttacttgttatgtactaatatcgacgtattggtcatcttttcagctgatttggcatgaactaatatggatggattggtaacttttg

SEQ ID NO: 61841 - protein, 199 aa, Triticum aestivum
  peptide (1)..(199): Ceres Seq. ID no. 15173366
MESRVKPGFSGAGSLSGSRRSYMGAAAPSKPAVDGCGVALRVFILAATLVAAVVMGLDRQTATVQVTIADTLPPLQVPVTAKWSYSSAFVYFVVANAMACVFSAVALAACRSRSAVVPLMVGDLVVQALLFSAVGASAEFGILGERGNSHVRWGKVCHVYSSFCERAMAAVIVSLIAAFANLVHLMFAILDVHKNSSYY

SEQ ID NO: 61842 - protein, 177 aa, Triticum aestivum
  peptide (1)..(177): Ceres Seq. ID no. 15173367
MGAAAPSKPAVDGCGVALRVFILAATLVAAVVMGLDRQTATVQVTIADTLPPLQVPVTAKWSYSSAFVYFVVANAMACVFSAVALAACRSRSAVVPLMVGDLVVQALLFSAVGASAEFGILGERGNSHVRWGKVCHVYSSFCERAMAAVIVSLIAAFANLVHLMFAILDVHKNSSYY

SEQ ID NO: 61843 - protein, 145 aa, Triticum aestivum
  peptide (1)..(145): Ceres Seq. ID no. 15173368
MGLDRQTATVQVTIADTLPPLQVPVTAKWSYSSAFVYFVVANAMACVFSAVALAACRSRSAVVPLMVGDLVVQALLFSAVGASAEFGILGERGNSHVRWGKVCHVYSSFCERAMAAVIVSLIAAFANLVHLMFAILDVHKNSSYY

SEQ ID NO: 61844 - DNA, 728 bp, Triticum aestivum
  misc_feature (1)..(728): Ceres Seq. ID no. 15173355
aagaaagcattgtaagatggttgtgaccaatgctttgtttggacaaaagctggtgaatgctagacgactaggatttgtgtttcggcgaaagcagatattgaaaggagctgcccaggaggagcacgattgtattccggatgaacactatgtgcagacattattttctatcaaaggactggaagatgaacttgaaaggagaactttgacctatacatcatggaaccagtcaactttagatcctaaagataaaatgacttggcatccaacgacatttgaatatgacgcagcaagttctgagcagatcaatgctataaagagtatcgatcatgtgaactatgaggtggaacacaggactgagtggtgccaatccaacggcacatccgtcccatgtttcttatttgccagaaagttctcatatggcgccgcgatgcatctgttggaggatggcgcttttggtctgctaaaatctgctcaactactggttaacttttaacaaattctcttgtatacgagcaatcatttttcgtgtgggtggatcaattcatagccaggtccagcttcgttgtttgcagtagcatttgcagctgaagctactcagcgatggagtatcatagtttactgctaggatttagattgtgtatagatcatcggatcggagcagagtaggttattattgtacagagcatcattgaagtacgggaatagcatcaggatgcaatctccaactt

SEQ ID NO: 61845 - protein, 163 aa, Triticum aestivum
  peptide (1)..(163): Ceres Seq. ID no. 15173356
RKHCKMVVTNALFGQKLVNARRLGFVFRRKQILKGAAQEEHDCIPDEHYVQTLFSIKGLEDELERRTLTYTSWNQSTLDPKDKMTWHPTTFEYDAASSEQINAIKSIDHVNYEVEHRTEWCQSNGTSVPCFLFARKFSYGAAMHLLEDGAFGLLKSAQLLVNF

SEQ ID NO: 61846 - protein, 158 aa, Triticum aestivum
  peptide (1)..(158): Ceres Seq. ID no. 15173357
MVVTNALFGQKLVNARRLGFVFRRKQILKGAAQEEHDCIPDEHYVQTLFSIKGLEDELERRTLTYTSWNQSTLDPKDKMTWHPTTFEYDAASSEQINAIKSIDHVNYEVEHRTEWCQSNGTSVPCFLFARKFSYGAAMHLLEDGAFGLLKSAQLLVNF

SEQ ID NO: 61847 - DNA, 690 bp, Triticum aestivum
  misc_feature (1)..(690): Ceres Seq. ID no. 15173156
ccccacggcagcctctcctcctcctctcctccctcgccgtcgccgtcgccttcgtctccgcctccaaccggcggccgcgccaccagctcgtctcctccgatggcgactgtgccagttaaccccaagccgttcttgcaaaacctaacagggaagatggtcatcgtcaagctgaaatggggcatggagtacaaaggatatcttgtttcagtggactcctacatgaatctgcagctaagtggtactgaggaatacattgatgggcaatgctctggaaatttgggagacatactgataagatgcaacaatgtgatgtatctccgaggtgttccagaggaggacacggacattccagatgcggcctgaagagcacatggactgttcctggttgatgcttgctgttcactgctgaaaaagaacttcctagttcgtctccatttgcgcctactggactgtattacgtacaggcgttgaactcatgttaactctagttctgcatcctggatgaatgaatgattaacttgcatgtttgaaacggatgattgcttattgctgattggtcctgatcctgccgttggatatgtatggtttgctgtctgaattgcaatgatcgtatttgtgcaatttgaaccatatttgctgagttcctgagcatggactcaacatacccagcatgaagggatatttccgcac

SEQ ID NO: 61848 - protein, 120 aa, Triticum aestivum
  peptide (1)..(120): Ceres Seq. ID no. 15173157
PHGSLSSSSPPSPSPSPSSPPPTGGRATSSSPPMATVPVNPKPFLQNLTGKMVIVKLKWGMEYKGYLVSVDSYMNLQLSGTEEYIDGQCSGNLGDILIRCNNVMYLRGVPEEDTDIPDAA

SEQ ID NO: 61849 - protein, 87 aa, Triticum aestivum
  peptide (1)..(87): Ceres Seq. ID no. 15173158
MATVPVNPKPFLQNLTGKMVIVKLKWGMEYKGYLVSVDSYMNLQLSGTEEYIDGQCSGNLGDILIRCNNVMYLRGVPEEDTDIPDAA

SEQ ID NO: 61850 - protein, 69 aa, Triticum aestivum
  peptide (1)..(69): Ceres Seq. ID no. 15173159
MVIVKLKWGMEYKGYLVSVDSYMNLQLSGTEEYIDGQCSGNLGDILIRCNNVMYLRGVPEEDTDIPDAA

SEQ ID NO: 61851 - DNA, 748 bp, Triticum aestivum
  misc_feature (1)..(748): Ceres Seq. ID no. 15173531
aaatagcctcccagccctctctgcctcccgaaaaaacaaacaaacagagatcgcgcttccaatctagctctgcggctgtcgcgaggctccacatttccctccccgcagcgccgaagtaagcatgtgtcccggcggcaggtacgcgggccttgacctccccgccggcgccggcgcgggggacctgcggccggcgttcgacgtgctggacgcggaccacgacggccgcatcagccgcgacgacctcaagaccttctacgccaacgcgggcgccaccgacgagcgcttcgacgacgacgacatcgaggccatgatcaccgccgccgacgccgacctcgacggcttcgtgcagtaccacgagttcgagggcctccttggccgcgcagctaaggcgggggcggacagcggctgccgctcggcgatggaggacgccttccggctaatggaccgcgacggggacggcaaggtcgggttcgaggacctcaaggcctacctcgggtgggccgggatgccggtcgccgacgacgagatccgcgccatgataagtatggctggtgacggcgacagcggcgtggggctcgaggcgctcgccagaatactcgccgtggactttgatgccatcgtctgaagaatctaaaataatcctactgtaaagcactagacttgattttttgggactttttccccctaaaatttggttggtggggagagcaggctggcgtgagattgattgttgtgagtggttctcgtt

SEQ ID NO: 61852 - protein, 167 aa, Triticum aestivum
  peptide (1)..(167): Ceres Seq. ID no. 15173532
MCPGGRYAGLDLPAGAGAGDLRPAFDVLDADHDGRISRDDLKTFYANAGATDERFDDDDIEAMITAADADLDGFVQYHEFEGLLGRAAKAGADSGCRSAMEDAFRLMDRDGDGKVGFEDLKAYLGWAGMPVADDEIRAMISMAGDGDSGVGLEALARILAVDFDAIV

SEQ ID NO: 61853 - protein, 105 aa, Triticum aestivum
  peptide (1)..(105): Ceres Seq. ID no. 15173533
MITAADADLDGFVQYHEFEGLLGRAAKAGADSGCRSAMEDAFRLMDRDGDGKVGFEDLKAYLGWAGMPVADDEIRAMISMAGDGDSGVGLEALARILAVDFDAIV

SEQ ID NO: 61854 - DNA, 644 bp, Triticum aestivum
  misc_feature (1)..(644): Ceres Seq. ID no. 15173519
tactaacagtccaaaactcgtataacttgctgtgtcgcaattttgatgctggattggcagaatgctgccatcacgagagaatcagtttgctggcgtacagcccaatggcaatgggtatactttcagggaagtatcactcatctgatgacagcggaccgccagatgcaaggatgaatcttttcatggggagatactccgagggtgaatccagatacaatctgaagaaccccaaactggaatcggcagtgaaggaatatagaagaattggcgtcaagtatggcatttcgccatcaatcctagcagttgcatttgtactcagacacccccttgtgggttcagctgttttcggtgttactaaattatggcagctcgaggaggttcttcaggccacaggggtccatctctgtgaagaaatattggcggagatcaatgatgtacatgcaagatttcccaatccttgtccataataatgttccaaaatacgatatttttctttgtccattgcgatatccagatatgataaataggcggtagcaatttgtgcatgtcatccttgtgaatcttctttgtaccgttccaattttatcagttcatgtctgcgaagggacaatagagagtagcaattttgcaacgctgagttagtc

SEQ ID NO: 61855 - protein, 154 aa, Triticum aestivum
  peptide (1)..(154): Ceres Seq. ID no. 15173520
LTVQNSYNLLCRNFDAGLAECCHHERISLLAYSPMAMGILSGKYHSSDDSGPPDARMNLFMGRYSEGESRYNLKNPKLESAVKEYRRIGVKYGISPSILAVAFVLRHPLVGSAVFGVTKLWQLEEVLQATGVHLCEEILAEINDVHARFPNPCP

SEQ ID NO: 61856 - protein, 120 aa, Triticum aestivum
  peptide (1)..(120): Ceres Seq. ID no. 15173521
MAMGILSGKYHSSDDSGPPDARMNLFMGRYSEGESRYNLKNPKLESAVKEYRRIGVKYGISPSILAVAFVLRHPLVGSAVFGVTKLWQLEEVLQATGVHLCEEILAEINDVHARFPNPCP

SEQ ID NO: 61857 - protein, 118 aa, Triticum aestivum
  peptide (1)..(118): Ceres Seq. ID no. 15173522
MGILSGKYHSSDDSGPPDARMNLFMGRYSEGESRYNLKNPKLESAVKEYRRIGVKYGISPSILAVAFVLRHPLVGSAVFGVTKLWQLEEVLQATGVHLCEEILAEINDVHARFPNPCP

SEQ ID NO: 61858 - DNA, 917 bp, Triticum aestivum
  misc_feature (1)..(917): Ceres Seq. ID no. 15174100
ctctctcctctctacactgtgttgcgtagcccggaccgacatgaccggcggcgtgaacggcaacggcggaggcggtgggggcggcggcggggcgtgcgcggtgtgcaagcaccagcggcgcaagtgcgagcccaactgcgagctggccgcctacttcccggccaacaggatgaacgacttccgcgcgctgcacctcgtcttcggggtggccaacctcaccaagctcatcaaggccaacgccaccgaggcggcgcgccgccgcgccgccgagacgctgacgtgggaggcgcggtggcgcgagcgcgacccctccgaggggtgctaccgcgaggtctcctgcctccgccgcgagaacgccgtgctgcgcgccgagaacgccgcgctcaggcgccgggccgaccagtgcgcgtgctgtgtcaccacgttgcagcagcagcagcagcagatattgctcgtctcggcttacaacaacggcgcccggccccccggcggcgtgctgcacggggccagcgccggagtcgtgcccggcggcttctacgccggcgcgccgaggcccggggcagctggtcaggcggagcccagggagaagagcagcgcgaggtgtgacgctcagcgcacagctagctagcagtgggctatgggagaagatgaaggcagaaattcaaccgtttcatatgaaattcatgtcctgagtaggaaaaagccctaagtgttggttttggaataaaaagtactccctccgtcccataatataatagtgtcaaaaacgttcttatattatgggacgaagggaatactagctttactcttttttttcttcttctgcttgagcaggacatctaaagttcaaagtgtaaaaactcagctttgtataactggtgattcatttaattagaagccangaagatgattcatac

SEQ ID NO: 61859 - protein, 208 aa, Triticum aestivum
  peptide (1)..(208): Ceres Seq. ID no. 15174101
SLLSTLCCVARTDMTGGVNGNGGGGGGGGGACAVCKHQRRKCEPNCELAAYFPANRMNDFRALHLVFGVANLTKLIKANATEAARRRAAETLTWEARWRERDPSEGCYREVSCLRRENAVLRAENAALRRRADQCACCVTTLQQQQQQILLVSAYNNGARPPGGVLHGASAGVVPGGFYAGAPRPGAAGQAEPREKSSARCDAQRTAS

SEQ ID NO: 61860 - protein, 201 aa, Triticum aestivum
  peptide (1)..(201): Ceres Seq. ID no. 15174102
LSPLYTVLRSPDRHDRRRERQRRRRWGRRRGVRGVQAPAAQVRAQLRAGRLLPGQQDERLPRAAPRLRGGQPHQAHQGQRHRGGAPPRRRDADVGGAVARARPLRGVLPRGLLPPPRERRAARRERRAQAPGRPVRVLCHHVAAAAAADIARLGLQQRRPAPRRRAARGQRRSRARRLLRRRAEARGSWSGGAQGEEQREV

SEQ ID NO: 61861 - protein, 195 aa, Triticum aestivum
  peptide (1)..(195): Ceres Seq. ID no. 15174103
MTGGVNGNGGGGGGGGGACAVCKHQRRKCEPNCELAAYFPANRMNDFRALHLVFGVANLTKLIKANATEAARRRAAETLTWEARWRERDPSEGCYREVSCLRRENAVLRAENAALRRRADQCACCVTTLQQQQQQILLVSAYNNGARPPGGVLHGASAGVVPGGFYAGAPRPGAAGQAEPREKSSARCDAQRTAS

SEQ ID NO: 61862 - DNA, 966 bp, Triticum aestivum
  misc_feature (1)..(966): Ceres Seq. ID no. 15174225
actcgaccctgcctccagtccatagccatacaccaccaccttcctcccaagtcccaagcgaacaaacactcgatcgcttcgatggcgactctgcggcggtgctccgggctgttgctcgcggcggtggcgctggcgctggcggcggggatggcggcggcgcaggggccggccggcgcgccggcgccggcggccgggatcagctcggagtgcatgaccgcggtgctcaacatgtccgactgcctgccgtacgtggagagcgggagcaagacgcggcacccggacaaggcctgctgcccggagctggacggcctgctgcagtccaaccccgtctgcctctgccagctgctcgccggcggcgccgactcctacggaatcagcgtcgactacaagcgcgccatggcgctgcccggcgtctgccgcctcaacgcgccgcccctcagcgcctgcgcagcttttggagtccccgtggggccttcttcggcgccattaacaggagtgccctctccatccgctacaggaccactgatgcctgagaacccgccatccgcaacgccgtccaagtcgaagtcccacgccccgggccgcctcaacggccgcggcctcgtcgccctcgccgcgctgccgctggcgatcacggccgccgccatgttctagggcagcaagagttcgcggacgtgtggcattgtgccggtctcacacgcttggcccgatgagatcacattcttctccattcttgcctcacattctcattgctgtacacgagagattatttttctggttgatccatttccttgtcgcaattcccttacctgtgtgtaatctgctagagatggttgacagtctgtgtattacgtagatttgcattgctgctactaaattaattctttcgttatgtgtctcttcctcttatatataatactagcaagatgcccgtgcattgcacggaacattaagatgtattttttt

SEQ ID NO: 61863 - protein, 217 aa, Triticum aestivum
  peptide (1)..(217): Ceres Seq. ID no. 15174226
TRPCLQSIAIHHHLPPKSQANKHSIASMATLRRCSGLLLAAVALALAAGMAAAQGPAGAPAPAAGISSECMTAVLNMSDCLPYVESGSKTRHPDKACCPELDGLLQSNPVCLCQLLAGGADSYGISVDYKRAMALPGVCRLNAPPLSACAAFGVPVGPSSAPLTGVPSPSATGPLMPENPPSATPSKSKSHAPGRLNGRGLVALAALPLAITAAAMF

SEQ ID NO: 61864 - protein, 190 aa, Triticum aestivum
  peptide (1)..(190): Ceres Seq. ID no. 15174227
MATLRRCSGLLLAAVALALAAGMAAAQGPAGAPAPAAGISSECMTAVLNMSDCLPYVESGSKTRHPDKACCPELDGLLQSNPVCLCQLLAGGADSYGISVDYKRAMALPGVCRLNAPPLSACAAFGVPVGPSSAPLTGVPSPSATGPLMPENPPSATPSKSKSHAPGRLNGRGLVALAALPLAITAAAMF

SEQ ID NO: 61865 - protein, 176 aa, Triticum aestivum
  peptide (1)..(176): Ceres Seq. ID no. 15174228
STLPPVHSHTPPPSSQVPSEQTLDRFDGDSAAVLRAVARGGGAGAGGGDGGGAGAGRRAGAGGRDQLGVHDRGAQHVRLPAVRGEREQDAAPGQGLLPGAGRPAAVQPRLPLPAARRRRRLLRNQRRLQARHGAARRLPPQRAAPQRLRSFWSPRGAFFGAINRSALSIRYRTTDA

SEQ ID NO: 61866 - DNA, 780 bp, Triticum aestivum
  misc_feature (1)..(780): Ceres Seq. ID no. 15174240
gacattgcccgaccaaccaaagctcccaatccacgccgccgccgccgccgctgccgacgaaacaggtcataattctcggcgaccggcgaacgagggcaagatgcagatcttcgtgaagacgctgacggggaagacgatcacgctggaggtggagtcgtcggacacgatcgacaacgtcaaggccaagatccaggacaaggaggggatcccgccggaccagcagcggctcatcttcgccgggaagcagctggaggacgggcgcacgctggccgactacaacatccagaaggagtcgacgctgcacctggtcctccgcctgcgcggcggcgccaagaagcgcaagaagaagacctactcgacgcccaagaaggtcaagcacgagcgcgagaagaccccgctcgccgtgctcggctactacagggtggacgacgccacgggcaaggtggagaggctgcgcaaggagtgccccaacccggactgcggcgccggcaccttcatggcggcgcacgccgaccgccacgcctgcggcaagtgcggcctcacctacgcctacgcagaggcccagagcccagagatcgacagtgattgatcaggtggtctgattcgatgacggagttgattagcgccatgaattccgtgtacgtctggtaatgattttttcaatggatatttgtggttagaacaattattctggatatttttctcaattagtcatcagtaagcatgttttggtctgaattggaatgtgctttggcatgcaatcgtgacttgattggcgac

SEQ ID NO: 61867 - protein, 195 aa, Triticum aestivum
  peptide (1)..(195): Ceres Seq. ID no. 15174241
TLPDQPKLPIHAAAAAAADETGHNSRRPANEGKMQIFVKTLTGKTITLEVESSDTIDNVKAKIQDKEGIPPDQQRLIFAGKQLEDGRTLADYNIQKESTLHLVLRLRGGAKKRKKKTYSTPKKVKHEREKTPLAVLGYYRVDDATGKVERLRKECPNPDCGAGTFMAAHADRHACGKCGLTYAYAEAQSPEIDSD

SEQ ID NO: 61868 - protein, 162 aa, Triticum aestivum
  peptide (1)..(162): Ceres Seq. ID no. 15174242
MQIFVKTLTGKTITLEVESSDTIDNVKAKIQDKEGIPPDQQRLIFAGKQLEDGRTLADYNIQKESTLHLVLRLRGGAKKRKKKTYSTPKKVKHEREKTPLAVLGYYRVDDATGKVERLRKECPNPDCGAGTFMAAHADRHACGKCGLTYAYAEAQSPEIDSD

SEQ ID NO: 61869 - DNA, 981 bp, Triticum aestivum
  misc_feature (1)..(981): Ceres Seq. ID no. 15174247
atacatccatcgaggagccactccacacaggcaagcaagggtagtgagactcagaggttcaggcatggcagctccaagagcactcgccctcgccgtcctgctggcgatcgctgtcaccaacgccgaggccgcttccgtggtcgtcggcctggccaagtgcgccgactgcaccaggaggaacatcaaggccgaggaagctttcaagggtcttcaggtggcgatcaagtgcaagaacgtccacggcgactacgagagcaaggcagtgggtaccctcgaccgcaccggcgctttcagcgtgcccctggccgccgacctccacggcgccgactgcgtcgcgcagctccacagcgccgcctccagcgccccgtgccctggccaggagccgtctaagatcgtgccggtgtcggagggcaccaccttcggcgtcgtcgccggcgacaacattaccacaccttctgcagcagcgtcgccggagtgcgcgtccatgaccctgtgcgggccgatcaagaagcacatcatcgagcacttccatcacaagaagcccgtgccgcccaagccggagcccaagccccagccccaccctgactacggccccgtgcccaagcccgagcccaagccgcagccccacccggactaccaccccgtccctcccacgcccacctacggcggcggcggtggataccacggacaccactgagtccgatctaccaccgtcctgcccagcgctgaaatctcatcaccgggttcatgggcatgaactcatgatcggcgttgctatttatgatcggtttgcatgtgtgggtatcgttaggtcttctgccattcgctgcagagttgagagttcagaataacagatgtatgtgtgtcactgtgtcaaccgagtgtgaaggtgtgttgctttatcaagattttgtaatttcggtgcgtttaccgaagttattatgaatcaagtaatgtatttaaacaagtcgatttgtcaat

SEQ ID NO: 61870 - protein, 231 aa, Triticum aestivum
  peptide (1)..(231): Ceres Seq. ID no. 15174248
YIHRGATPHRQARVVRLRGSGMAAPRALALAVLLAIAVTNAEAASVVVGLAKCADCTRRNIKAEEAFKGLQVAIKCKNVHGDYESKAVGTLDRTGAFSVPLAADLHGADCVAQLHSAASSAPCPGQEPSKIVPVSEGTTFGVVAGDNITTPSAAASPECASMTLCGPIKKHIIEHFHHKKPVPPKPEPKPQPHPDYGPVPKPEPKPQPHPDYHPVPPTPTYGGGGGYHGHH

SEQ ID NO: 61871 - protein, 210 aa, Triticum aestivum
  peptide (1)..(210): Ceres Seq. ID no. 15174249
MAAPRALALAVLLAIAVTNAEAASVVVGLAKCADCTRRNIKAEEAFKGLQVAIKCKNVHGDYESKAVGTLDRTGAFSVPLAADLHGADCVAQLHSAASSAPCPGQEPSKIVPVSEGTTFGVVAGDNITTPSAAASPECASMTLCGPIKKHIIEHFHHKKPVPPKPEPKPQPHPDYGPVPKPEPKPQPHPDYHPVPPTPTYGGGGGYHGHH

SEQ ID NO: 61872 - protein, 129 aa, Triticum aestivum
  peptide (1)..(129): Ceres Seq. ID no. 15174250
IHPSRSHSTQASKGSETQRFRHGSSKSTRPRRPAGDRCHQRRGRFRGRRPGQVRRLHQEEHQGRGSFQGSSGGDQVQERPRRLREQGSGYPRPHRRFQRAPGRRPPRRRLRRAAPQRRLQRPVPWPGAV

SEQ ID NO: 61873 - DNA, 1156 bp, Triticum aestivum
  misc_feature (1)..(1156): Ceres Seq. ID no. 15174281
gacgattagaaaacatcgggaaaccccctccccgtgctccaactaccccaagcgccgccactcccaccgtaccgcggcaatgccgacgccacgaaaccggaaggtccctgcccctgccccgccgcgccggcggcctccccgcctggagtaccgcgcaaaggacggcgcgtggtacggcgcgcgcatggcgctgcagggcgactcgctgcgcgtcatgttcgaggaattccgcgaggagttcgacgagtggcacgacccaaacacggccgacctcgcctccccgggcgacgtgaccgcgctccgcaccaggttccgcccggcgagcccgcccctcgaggacgcccgctgcggcgacctccgccgcggccagctgctctgcgtcctccgcgccatgtccaacggcgagcgcaagtactacgacgccatccttgattccgtgaaaagagcggctcacgtcaccgtgggcggcgaggagcggtgcgcgtgccgcttcacagtgcggtggacggacgggccgctccgcggcggcctggacgaggtcggcgtcgacgaggtctgctgcgtgcgggactcgccggtcaacgacccggtgctgagcgagttcctggaccgcgtgacgaggtcgttcggcttcggcgacggcgaggagaacgcgaaggcggtgcaggactcgccggtccaggagccgcggctaaacgagttcctggaccgcgtgacgaaatcgttcggctactgcaacggcgaggagaaaccgaaggcggcgcctcaggggaccggggccacgttgcccccgggcggcgagcagagcgcgacggcggcccctcaggcgaccggggccacgtcgctctgcggcggcgagggggagactgccttcataatcatcgactaggtcgcggcctgcactgcattcctgcgcttctgtttcgatgtatccatgtgcctgccctgctcgacgattggtgagggtatttcgtgccttcgcgttgtttcattcagttactgtctttgtcttccttgtttcgtgtctatgtctaatcttgttcggccccgaaatggacgccatcgttggtagtagtacttggtagtcggtgcgattatgtatctctgttcctgttgccatctttccctggaacctgaaagccatattatgcattgg

SEQ ID NO: 61874 - protein, 295 aa, Triticum aestivum
  peptide (1)..(295): Ceres Seq. ID no. 15174282
TIRKHRETPSPCSNYPKRRHSHRTAAMPTPRNRKVPAPAPPRRRPPRLEYRAKDGAWYGARMALQGDSLRVMFEEFREEFDEWHDPNTADLASPGDVTALRTRFRPASPPLEDARCGDLRRGQLLCVLRAMSNGERKYYDAILDSVKRAAHVTVGGEERCACRFTVRWTDGPLRGGLDEVGVDEVCCVRDSPVNDPVLSEFLDRVTRSFGFGDGEENAKAVQDSPVQEPRLNEFLDRVTKSFGYCNGEEKPKAAPQGTGATLPPGGEQSATAAPQATGATSLCGGEGETAFIIID

SEQ ID NO: 61875 - protein, 269 aa, Triticum aestivum
  peptide (1)..(269): Ceres Seq. ID no. 15174283
MPTPRNRKVPAPAPPRRRPPRLEYRAKDGAWYGARMALQGDSLRVMFEEFREEFDEWHDPNTADLASPGDVTALRTRFRPASPPLEDARCGDLRRGQLLCVLRAMSNGERKYYDAILDSVKRAAHVTVGGEERCACRFTVRWTDGPLRGGLDEVGVDEVCCVRDSPVNDPVLSEFLDRVTRSFGFGDGEENAKAVQDSPVQEPRLNEFLDRVTKSFGYCNGEEKPKAAPQGTGATLPPGGEQSATAAPQATGATSLCGGEGETAFIIID

SEQ ID NO: 61876 - protein, 234 aa, Triticum aestivum
  peptide (1)..(234): Ceres Seq. ID no. 15174284
MALQGDSLRVMFEEFREEFDEWHDPNTADLASPGDVTALRTRFRPASPPLEDARCGDLRRGQLLCVLRAMSNGERKYYDAILDSVKRAAHVTVGGEERCACRFTVRWTDGPLRGGLDEVGVDEVCCVRDSPVNDPVLSEFLDRVTRSFGFGDGEENAKAVQDSPVQEPRLNEFLDRVTKSFGYCNGEEKPKAAPQGTGATLPPGGEQSATAAPQATGATSLCGGEGETAFIIID

SEQ ID NO: 61877 - DNA, 772 bp, Triticum aestivum
  misc_feature (1)..(772): Ceres Seq. ID no. 15174264
acacaccatctcagcccccatctcccctgcctctctccagcaaactcacgccccccaccaccgaagctcccaaccccacccgaagcggcagccatggcccccaaggcagacaagaagccggcggccgagagcaaggtggagaaggcggccgagaagacccccgcgggcaagaagcccaaggccgagaagcggctgccggcgggcaagacggcgtccaaggaggccggcggtgagggcaagacccggggccgcaagaagggcagcaaggcgaagaagggcgtggagacgtacaagatctacatcttcaaagtgctgaagcaggtgcaccccgacatcggcatctcctccaaggccatgtccatcatgaactccttcatcaacgacatcttcgagaagctcgccggggagtcggccaagctcgcccgctacaacaagaagcccaccatcacgtcccgggagatccagacctccgtccgcctcgtcctccccggggagctcgccaagcacgccgtctccgagggcaccaaggccgtcaccaagttcacctcctcctagactgacgacgcgccgcttgttgtgacagatgtggccgtctgctgtatctgtagtcgctgttgactctgcttatctccatctgcaagtagtggtagctgtagtgcgcgtgctgggtgatgattgccaacgctttgttggctggttggatgtaagaactgaacgtgttgcttttgcaaactgatgaaatctatctagaaaatgtcgcagttgtggtacc

SEQ ID NO: 61878 - protein, 184 aa, Triticum aestivum
  peptide (1)..(184): Ceres Seq. ID no. 15174265
THHLSPHLPCLSPANSRPPPPKLPTPPEAAAMAPKADKKPAAESKVEKAAEKTPAGKKPKAEKRLPAGKTASKEAGGEGKTRGRKKGSKAKKGVETYKIYIFKVLKQVHPDIGISSKAMSIMNSFINDIFEKLAGESAKLARYNKKPTITSREIQTSVRLVLPGELAKHAVSEGTKAVTKFTSS

SEQ ID NO: 61879 - protein, 153 aa, Triticum aestivum
  peptide (1)..(153): Ceres Seq. ID no. 15174266
MAPKADKKPAAESKVEKAAEKTPAGKKPKAEKRLPAGKTASKEAGGEGKTRGRKKGSKAKKGVETYKIYIFKVLKQVHPDIGISSKAMSIMNSFINDIFEKLAGESAKLARYNKKPTITSREIQTSVRLVLPGELAKHAVSEGTKAVTKFTSS

SEQ ID NO: 61880 - protein, 104 aa, Triticum aestivum
  peptide (1)..(104): Ceres Seq. ID no. 15174267
HTISAPISPASLQQTHAPHHRSSQPHPKRQPWPPRQTRSRRPRARWRRRPRRPPRARSPRPRSGCRRARRRPRRPAVRARPGAARRAARRRRAWRRTRSTSSKC

SEQ ID NO: 61881 - DNA, 825 bp, Triticum aestivum
  misc_feature (1)..(825): Ceres Seq. ID no. 15174260
aatatggctaaagttgtcgagggtcatcgcaggttcatgggtttcaagaagacaatcttgctagatcgaaaactcatcgtcgacctagcagaccagtacaacaacggctcgttgcgatgggatgagttctctttgctgatcaaggctgcccacgcagggcggatgggatcagcctcaaagcggacagtgattcccgacagacccaaggaggaggactacttctacgcgaacccccaggagtgcctgcaagaccccgaccgcctacgcacgtcatgataaccgccgccacccctgtcaatatttccacccaccttataccattcttttcacagacgcagcagccgaaccagaggccaggttcgtcgttacttcgaagaaaccaaccgaaagaggggcggctcggctcgccataggtgtaaaactcggggagggggtgggcgtgggtgttgtatatcttggatgtagctgcctagctggtaaatactctacacgttatagaaatggagggcggtttattcgttcgttccacggaaaataatgaggagtcatactgaagatactcttgtatagaagatggtgatgatagagtctactaccacgaagaggaaaggtaaatttgagtgaggggagagatggctggacccacatgtctgtctctggctggtcttcttttggttgtgtaaaacatactagcagttgttcttctccgtagcctcccccgtgctccctccccgtcagtcaggcagggcttatttttttgtcaatcaaagttgctgagagttgtatactacagtgtttatattggatcgatgtggttacctgtgc

SEQ ID NO: 61882 - protein, 91 aa, Triticum aestivum
  peptide (1)..(91): Ceres Seq. ID no. 15174261
NMAKVVEGHRRFMGFKKTILLDRKLIVDLADQYNNGSLRWDEFSLLIKAAHAGRMGSASKRTVIPDRPKEEDYFYANPQECLQDPDRLRTS

SEQ ID NO: 61883 - protein, 90 aa, Triticum aestivum
  peptide (1)..(90): Ceres Seq. ID no. 15174262
MAKVVEGHRRFMGFKKTILLDRKLIVDLADQYNNGSLRWDEFSLLIKAAHAGRMGSASKRTVIPDRPKEEDYFYANPQECLQDPDRLRTS

SEQ ID NO: 61884 - protein, 79 aa, Triticum aestivum
  peptide (1)..(79): Ceres Seq. ID no. 15174263
MGFKKTILLDRKLIVDLADQYNNGSLRWDEFSLLIKAAHAGRMGSASKRTVIPDRPKEEDYFYANPQECLQDPDRLRTS

SEQ ID NO: 61885 - DNA, 705 bp, Triticum aestivum
  misc_feature (1)..(705): Ceres Seq. ID no. 15174197
attggagagtttgcttttgttcttcttagccgtgcttcaagcatccatctgattgagggcaagctgtatctacttcttcttggaaccacagcgcttagcttggtaacaacacccctgctattcaaaatgatcccagccgtggtccaccttggtgttcttttgagatggttttccgtcgatagcaatcaggtggagttgggcctaaaaggcgaagtcctccgcaatgatagcggcaagcgcataaatttgataatccaaggcccacacgactcatgacacacttggcacaccgcaagctacttttagtatggctttaagttaacgagctctgtaaagtgtttccgcatgtaacgaagagtttatagcgcgtatgcacggccgggcgggagttggaagcagaagaaatcagatctcgttcaaagtgtgtgagatcgacccttccccgcagcgacgactggaaatgcaaggggaggatttcgccagccttgtgagcagtggatgaagcgggcagtgagtgcactgctcgcggtgtgatccctctaatgagggttttctgtagtataagaatgtaatctgattgattgattgattggattagcgtgataggatttaggcttgaccggtataccactgtattaattccacaaaatgtgcagaacgccacctgatcatgaattttgctgtgcagtgagtttgccattgtcg

SEQ ID NO: 61886 - protein, 91 aa, Triticum aestivum
  peptide (1)..(91): Ceres Seq. ID no. 15174198
IGEFAFVLLSRASSIHLIEGKLYLLLLGTTALSLVTTPLLFKMIPAVVHLGVLLRWFSVDSNQVELGLKGEVLRNDSGKRINLIIQGPHDS

SEQ ID NO: 61887 - protein, 49 aa, Triticum aestivum
  peptide (1)..(49): Ceres Seq. ID no. 15174199
MIPAVVHLGVLLRWFSVDSNQVELGLKGEVLRNDSGKRINLIIQGPHDS

SEQ ID NO: 61888 - DNA, 756 bp, Triticum aestivum
  misc_feature (1)..(756): Ceres Seq. ID no. 15174168
ccagcaaacactcggcgacacacgacaaacagcaagtactagcaatcatctagccgattcttcccttgctgcagcatctgtagcttccttctcgccttcgttcaccttccgcggctgattaatggcaaccatgatgaccatgagctccttcgccggtgccgccgtcctgccgcgtggctcggccggccacttcggtgcccagtctctgccagcactgggccgacgcgccctcatcgtcagggcacaaaccgaaggcccgagtgcaccaccgccaaacacacccaaggcgagcacctcgatctgggacgcgctggcgttcgccggacccgcgccggagcgcatcaacgggcggctggccatggtgggtttcgtgactgcgcttgccgtggaagcaggccgtggagacgggctcctctcgcagctcggcagcggcaccgggcaggcgtggttcgcctactccgtggcggtgctgtctgtggcgtcgctggtgccactgctccagggcgagagcgctgagggcagagccggtgccatcatgaacgccaacgcggagctctggaacggccgcttcgccatgctcggcctcgccgcgctcgccgccaccgagatcatcaccggcgcgcccttcatcaacgtgtaaaactagctttgtcgtggaccggataacacaacctgtacctaggacatgtaaatgatgagaattgatcatcctcatattctttgtagtgcttatactaattaaagacagttcatacc

SEQ ID NO: 61889 - protein, 172 aa, Triticum aestivum
  peptide (1)..(172): Ceres Seq. ID no. 15174169
MATMMTMSSFAGAAVLPRGSAGHFGAQSLPALGRRALIVRAQTEGPSAPPPNTPKASTSIWDALAFAGPAPERINGRLAMVGFVTALAVEAGRGDGLLSQLGSGTGQAWFAYSVAVLSVASLVPLLQGESAEGRAGAIMNANAELWNGRFAMLGLAALAATEIITGAPFINV

SEQ ID NO: 61890 - protein, 169 aa, Triticum aestivum
  peptide (1)..(169): Ceres Seq. ID no. 15174170
MMTMSSFAGAAVLPRGSAGHFGAQSLPALGRRALIVRAQTEGPSAPPPNTPKASTSIWDALAFAGPAPERINGRLAMVGFVTALAVEAGRGDGLLSQLGSGTGQAWFAYSVAVLSVASLVPLLQGESAEGRAGAIMNANAELWNGRFAMLGLAALAATEIITGAPFINV

SEQ ID NO: 61891 - protein, 168 aa, Triticum aestivum
  peptide (1)..(168): Ceres Seq. ID no. 15174171
MTMSSFAGAAVLPRGSAGHFGAQSLPALGRRALIVRAQTEGPSAPPPNTPKASTSIWDALAFAGPAPERINGRLAMVGFVTALAVEAGRGDGLLSQLGSGTGQAWFAYSVAVLSVASLVPLLQGESAEGRAGAIMNANAELWNGRFAMLGLAALAATEIITGAPFINV

SEQ ID NO: 61892 - DNA, 1020 bp, Triticum aestivum
  misc_feature (1)..(1020): Ceres Seq. ID no. 15174048
cccggttttgcccctgccaagtcaattgaccaggagagggacgcgttcgtgttccctgctcttcgtcgacgccgacggggggtctccacggcgacataccggcggacggcggcggatccctcccggtgaaggcgacgttgttacatttgcaaatgtcaaattctgtcatgaataccactcagaaagttgatccaacggaaccagctgctaagattgctcagcaagcctcacagttcaaacgatggggacgcaagcatccatttgttcgatatggccttccgctcatttctttgacagtgtttggtgcggttggtctagctcatctcatacagggaagcaaagaagtaacaaaggaaaaggaggacatggaatgggaggtcgtagagaaaacaaaagctctgagccgaacaggaccagtggaaggggcttataagcctaagaagctctcgctagaggacgaactgaaggctttgcagcaaaaggtggacataaacagctacgactacaagagaattcccaaacaaaatgaaaacaagtgaagtaaagcactgtttatcatgctaaggggtgggggattttcttaaaatccttgaagtagtttcttggtcctgtttcttcatgagttccttgggatgttgtccaagtgtcaaaatgagattgcggagacattatcatcagaactctgtgcttcgtcagccattagcagtagagagttagtcgaggatccttgtgaaggcttgaaccgtaggaataatctttgtagccatggccgatgggagataggcattttcacggtccaccaagtgagtctttttttagttgatcgaatactgccttctttaccatggggccaataaattgtaggtaacacagtactctgacgtgcgagcaatcaaattttgtatgccatttcttggaagctaattagctgtgtcacgatcactaaacaaaggggaggaaacaggaaagttcatatttcatatgtatattttgagactccgaagctcgtattcggctgac

SEQ ID NO: 61893 - protein, 128 aa, Triticum aestivum
  peptide (1)..(128): Ceres Seq. ID no. 15174049
MSNSVMNTTQKVDPTEPAAKIAQQASQFKRWGRKHPFVRYGLPLISLTVFGAVGLAHLIQGSKEVTKEKEDMEWEVVEKTKALSRTGPVEGAYKPKKLSLEDELKALQQKVDINSYDYKRIPKQNENK

SEQ ID NO: 61894 - protein, 123 aa, Triticum aestivum
  peptide (1)..(123): Ceres Seq. ID no. 15174050
MNTTQKVDPTEPAAKIAQQASQFKRWGRKHPFVRYGLPLISLTVFGAVGLAHLIQGSKEVTKEKEDMEWEVVEKTKALSRTGPVEGAYKPKKLSLEDELKALQQKVDINSYDYKRIPKQNENK

SEQ ID NO: 61895 - protein, 74 aa, Triticum aestivum
  peptide (1)..(74): Ceres Seq. ID no. 15174051
MLSKCQNEIAETLSSELCASSAISSRELVEDPCEGLNRRNNLCSHGRWEIGIFTVHQVSLFLVDRILPSLPWGQ

SEQ ID NO: 61896 - DNA, 1009 bp, Triticum aestivum
  misc_feature (1)..(1009): Ceres Seq. ID no. 15174082
attcttagcgacaacattccgtctcatcctccccagctcggtttttgggccattctaagccaccatgcctgcctccatcgccttcggtcggttcgatgactccttcagcttggcctctttcaaggcctacatcgccgagttcatctccaccctcatcttcgtcttcgccggcgtcggctctgccatcgcctactccaaggtgagcggcggcgcgccgcttgacccatccgggctgatcgccgtggccatctgccacgggttcgggctgttcgtcgcggtcgccgtcggcgccaacatctccggcggccatgtgaaccctgccgtcaccttcggcctcgccctcggcggccagatcaccatcctcaccggcatcttctactgggttgcccagctcctcggcgccatcgtcggcgccttcctcgtccagttctgcaccggcgtggcgacccctacacacgggctttccggcgtgggcgccttcgagggcgtcgtgatggagatcatcgtcaccttcgggctcgtctacaccgtgtacgccaccgccgccgaccccaagaaggggtccctcggcaccatcgctccaatcgccatcggcttcatcgtcggcgccaacatcctcgtcgccggccccttctccggcgggtccatgaaccctgcacgctccttcggccccgccgttgccagcggcgacttcaccaacatctggatctactgggccggcccgctcatcggcggtggcctcgccggcgtcgtctaccggtacctgtacatgtgcgacgaccacaccgccgtcgccggcaacgactactaagccagccatgggaagatcattcggtctttggtttccataatgtcttcggcaacataagaagtgcgtacgtggtggcactctcaggattgtctggatgatgtgaggaacgtcatgttgtttggttccgatcgaaagcccgcgaggctgtggcacttggatgatgcatgtttctgtatctgtactgtgatggatgttgtg

SEQ ID NO: 61897 - protein, 248 aa, Triticum aestivum
  peptide (1)..(248): Ceres Seq. ID no. 15174083
MPASIAFGRFDDSFSLASFKAYIAEFISTLIFVFAGVGSAIAYSKVSGGAPLDPSGLIAVAICHGFGLFVAVAVGANISGGHVNPAVTFGLALGGQITILTGIFYWVAQLLGAIVGAFLVQFCTGVATPTHGLSGVGAFEGVVMEIIVTFGLVYTVYATAADPKKGSLGTIAPIAIGFIVGANILVAGPFSGGSMNPARSFGPAVASGDFTNIWIYWAGPLIGGGLAGVVYRYLYMCDDHTAVAGNDY

SEQ ID NO: 61898 - DNA, 975 bp, Triticum aestivum
  misc_feature (1)..(975): Ceres Seq. ID no. 15174194
acaccagtcacactcacacgggttcagacacatcgcctcgcctcggcccgctgttcgccgccaccagctagctagtccagcgccaccgccaggcagcccacggccgcagcaatggcgcgtctcgccaccatcctcagcttcggggaccacgccgaggagggcgccggcgccttcacggagccgcaggaggactaccagcaagaacacgacgacgacgacgacgcggcgtcggacgccagcggcgacagcttcgagttcgcgttcgcgcggccgctggcgccggcgggcggggaggcgctggccgacgacctcttcgcgcacggccgcatcctcccggcctacccggtcttccaccgccgccaggcccacgacgacgacgcctcggcctcggccacctccgcgacggcgccgccctcgccggacacgtactgcgcgtgggcgccgcggtccgcgccggggtcgcccgcgcgcgaaccggccgccttccccaagagcgcgtccacgggcacgggcgaggccgcgcgccgcttccgcctgcgcgacatcctcggctccggcggccgctcccacagcgacggcaaggagaagttcctcttcctccagccgactcccgccaaacccaagtccaagacgagcgcattatccgccgcgtcggctccggccaacaagaagacttcgcagcagaagcagggcaagaagaagggcgcggccgccgctccgacggagatggacatggccaccgcgcacaggctcttctacagcaagcccggagccgcggccggccccggcggcgagaggacgacgacgacgacgaaaaagtcgtacctgccctaccggccggccatcgtcggcttcttcgccaccgcgcacgcgctgcgccccaagcaccacccctactagccatcacatcccatcccctgctccgctgctgccacgataaatctcatcaaattaaattagttcgttaattcgttc

SEQ ID NO: 61899 - protein, 312 aa, Triticum aestivum
  peptide (1)..(312): Ceres Seq. ID no. 15174195
HQSHSHGFRHIASPRPAVRRHQLASPAPPPGSPRPQQWRVSPPSSASGTTPRRAPAPSRSRRRTTSKNTTTTTTRRRTPAATASSSRSRGRWRRRAGRRWPTTSSRTAASSRPTRSSTAARPTTTTPRPRPPPRRRRPRRTRTARGRRGPRRGRPRANRPPSPRARPRARARPRAASACATSSAPAAAPTATARRSSSSSSRLPPNPSPRRAHYPPRRLRPTRRLRSRSRARRRARPPLRRRWTWPPRTGSSTASPEPRPAPAARGRRRRRKSRTCPTGRPSSASSPPRTRCAPSTTPTSHHIPSPAPLLPR

SEQ ID NO: 61900 - protein, 262 aa, Triticum aestivum
  peptide (1)..(262): Ceres Seq. ID no. 15174196
MARLATILSFGDHAEEGAGAFTEPQEDYQQEHDDDDDAASDASGDSFEFAFARPLAPAGGEALADDLFAHGRILPAYPVFHRRQAHDDDASASATSATAPPSPDTYCAWAPRSAPGSPAREPAAFPKSASTGTGEAARRFRLRDILGSGGRSHSDGKEKFLFLQPTPAKPKSKTSALSAASAPANKKTSQQKQGKKKGAAAAPTEMDMATAHRLFYSKPGAAAGPGGERTTTTTKKSYLPYRPAIVGFFATAHALRPKHHPY

SEQ ID NO: 61901 - DNA, 968 bp, Triticum aestivum
  misc_feature (1)..(968): Ceres Seq. ID no. 15173586
ctcttgagtttaccttattgcttctgttcttttgatgtttacgcaggagcagcggctcgtgcatggacagctaacacctgtacgcttctgaatatgagccagtaaaataccccggaaagaaataaaagttgtgcagctcccaagatcaatgagcagtaccaatcccccttccgcgaccagccatgttgccctcacacgccatccgctggagcatggatgcgggctctctgaatggcggtccagatgcagaggaactgactccacgagtttaaaaaacgggcttcttcaggcatcagctccatccatccccttgtgctgcctctgcccgatgtcgacgacggtgcaggagccgccgcacgtcctggccgtggacgacagcctcgtcgaccgcgtcgtcatctccaggctcctccgcagctccaagtacagagtgacgacggtggacagcgggaagaaggcgctggaggtgctgagcctgggccacgagagcgtgcagctgatcatcacggactactgcatgccggagatgaccggctacgacctgctgaagcgggtcaaggagtcggcagagctgcgcggcatcccggtggtgatcatgtcgtcggagaactcgccgtccaggatccgccggtgcctcgacgagggcgcggaggagttcctcatcaagccggtgcgcccctccgacgtctcccgcctctgcaaccgggccatcgccgccatgcccatgcggtagcaacggccggtcggtgccgtgctgctgatcggtgctagcctgctagcttgctaatccaatcctccctccctcctctgctgagttctcactgacgagatatccccatgtacatgcgtctgctgcagggttgcatcccatggtgaaatcaaaactgaatgaattccatgacaacccacggaatgtatgtattccttacttgccaatgtatgaaatccaccactaactgtgaaacagt

SEQ ID NO: 61902 - protein, 194 aa, Triticum aestivum
  peptide (1)..(194): Ceres Seq. ID no. 15173587
MSSTNPPSATSHVALTRHPLEHGCGLSEWRSRCRGTDSTSLKNGLLQASAPSIPLCCLCPMSTTVQEPPHVLAVDDSLVDRVVISRLLRSSKYRVTTVDSGKKALEVLSLGHESVQLIITDYCMPEMTGYDLLKRVKESAELRGIPVVIMSSENSPSRIRRCLDEGAEEFLIKPVRPSDVSRLCNRAIAAMPMR

SEQ ID NO: 61903 - protein, 134 aa, Triticum aestivum
  peptide (1)..(134): Ceres Seq. ID no. 15173588
MSTTVQEPPHVLAVDDSLVDRVVISRLLRSSKYRVTTVDSGKKALEVLSLGHESVQLIITDYCMPEMTGYDLLKRVKESAELRGIPVVIMSSENSPSRIRRCLDEGAEEFLIKPVRPSDVSRLCNRAIAAMPMR

SEQ ID NO: 61904 - DNA, 776 bp, Triticum aestivum
  misc_feature (1)..(776): Ceres Seq. ID no. 15174176
atcctacccagtgcaattgatcaccattaactacctctaattagttcttccttttacgtacgattcgagcagctttgagcgctaccaagtcgaccatctcgtccaacacgagcgccatcagctgcctgcagcagcacgaccagagcaaggcggcggcggcgaggccgatgacactcacgctcggagagccgcgggagaaggacggccgccaccagcagctcaacagcgccatgcagctccaccaccaccatcaggagcagcagcacttcatcacctcgctgctgcaccagaacaacaacggcaacggcaacaacaacatcctgtcgtgctcgtcggcgtgtgctccagcgggttgccgtctgccggggcggccaacggcgaggtctccgaccagaacaacaacagcaaccacggcggcggcaacaacaacaataacatgcatctctttgaggtggacttcatgtagacgaccgatcgacgcaggtgagcttggagatccctacatggagtcatggagtggtgaccagcctaagcctagcactgtaccaacagtgtcctttaattaatttgtgtgtaggtaaaaaaaaggagagcaaaaagaccttaagggtatagtccatagtctcaaagtgctgagatcagctagcaaaggctgtgcaacctagcatgcttgtgcttggctcaagcatgcgtatgcctttctttcaactttcttccctgcggtgctcctcctatagtgctgcaagcaagcatgcctttctgccattttctgttac

SEQ ID NO: 61905 - protein, 132 aa, Triticum aestivum
  peptide (1)..(132): Ceres Seq. ID no. 15174177
MTLTLGEPREKDGRHQQLNSAMQLHHHHQEQQHFITSLLHQNNNGNGNNNILSCSSACAPAGCRLPGRPTARSPTRTTTATTAAATTTITCISLRWTSCRRPIDAGELGDPYMESWSGDQPKPSTVPTVSFN

SEQ ID NO: 61906 - protein, 111 aa, Triticum aestivum
  peptide (1)..(111): Ceres Seq. ID no. 15174178
MQLHHHHQEQQHFITSLLHQNNNGNGNNNILSCSSACAPAGCRLPGRPTARSPTRTTTATTAAATTTITCISLRWTSCRRPIDAGELGDPYMESWSGDQPKPSTVPTVSFN

SEQ ID NO: 61907 - DNA, 933 bp, Triticum aestivum
  misc_feature (1)..(933): Ceres Seq. ID no. 15173668
atagcttggctagccagcactgtccatggccatggcatttcgcctcattatactcgcactagtaccgctgctggcgaccgtgctcgctgctccttcccttcctagcagcaatgacactgacctcgacgcgctgcttgcgttcaaggcgcagctgtccgacccactcggcgtcctccgcaacagttgggctaccaatgtgtccttctgccgctgggtaggcgtgtcatgcggccggcgccaaagccatcgcgtcaccgccctggagttgccgggcgtgcccctccatggtcagctcgcccctcaccttggaaacctctccttcctctctgttctcaacctcaccagctccaacctcgtcggctccatccccgccgacctcggccggctgcgtcgccttaggcggctcaatcttgcacacaacaacttgtctcactccattccatcgacctttgggaaccttacaggtctccaagttcttgatgtgagcggcaacatgctgtctggtcaaatcccaacggagatgcaaggattgcgcaaccttgcctacatagctctgcatgccaactacttgagtggtcagtgttggcaataatcttgtcttaaatgttttggtgtcacgtggtaagtttagttagctaggattaggaaggccgtgtagtttttggttagtcctccatgtaataggcgtgtccctatgtgtgctaaagcgcacgtagtacgagtccggtttggattagagtttagttggcgtgtctagtataggcaatactagtatgagtccgattagaatatagggtcagattaagatagagttgaacgtgagggcttggtcctgcgtgtatatatacacaggcagggctagttattgtaccgtgagtggagaaaaaccagaaaagaaataaagagaagagaggcacaacacgtgcctttggc

SEQ ID NO: 61908 - protein, 188 aa, Triticum aestivum
  peptide (1)..(188): Ceres Seq. ID no. 15173669
MAMAFRLIILALVPLLATVLAAPSLPSSNDTDLDALLAFKAQLSDPLGVLRNSWATNVSFCRWVGVSCGRRQSHRVTALELPGVPLHGQLAPHLGNLSFLSVLNLTSSNLVGSIPADLGRLRRLRRLNLAHNNLSHSIPSTFGNLTGLQVLDVSGNMLSGQIPTEMQGLRNLAYIALHANYLSGQCWQ

SEQ ID NO: 61909 - protein, 186 aa, Triticum aestivum
  peptide (1)..(186): Ceres Seq. ID no. 15173670
MAFRLIILALVPLLATVLAAPSLPSSNDTDLDALLAFKAQLSDPLGVLRNSWATNVSFCRWVGVSCGRRQSHRVTALELPGVPLHGQLAPHLGNLSFLSVLNLTSSNLVGSIPADLGRLRRLRRLNLAHNNLSHSIPSTFGNLTGLQVLDVSGNMLSGQIPTEMQGLRNLAYIALHANYLSGQCWQ

SEQ ID NO: 61910 - DNA, 619 bp, Triticum aestivum
  misc_feature (1)..(619): Ceres Seq. ID no. 15174172
cctgctaagggatggtcagattacagaacccctgtgaaggggctgtacctctgcggcagcggtgcgcacccaggcggcggggtgatgggtgccccgggccgcaatgctgctgccgtggttttggatgatctcaaggcaagatagatgcaattaatggaagatggaaatggcagctgacactagggtagcattttcaagcacaaggctgcaaaagcagcaccagtgtgtaatctcttgtacggaaatgcaaaccttgtcgttaagccatctggtagagaccattttgtcatgcatacttacatgataaaaaagatgagacatgagaagcattttctgaatgaattgttgcagctgttctcattttggctctcttatcggagggctcaaagggattaattctcagttatgcggttacatctattttcttctgtacgaagtagtttctcaatgcagtctgccgaaccttcaatttggttaaatgtgaagaggagtagagtttgcgaagtatagttagatattaactgtgagtgctatgctcatctgtacatttgaactgccatccagtaatctgtgtcgcctagcttgtctgcagacttgaactgcgacctaggtaccttat

SEQ ID NO: 61911 - protein, 47 aa, Triticum aestivum
  peptide (1)..(47): Ceres Seq. ID no. 15174173
PAKGWSDYRTPVKGLYLCGSGAHPGGGVMGAPGRNAAAVVLDDLKAR

SEQ ID NO: 61912 - protein, 47 aa, Triticum aestivum
  peptide (1)..(47): Ceres Seq. ID no. 15174174
MEMAADTRVAFSSTRLQKQHQCVISCTEMQTLSLSHLVETILSCILT

SEQ ID NO: 61913 - protein, 46 aa, Triticum aestivum
  peptide (1)..(46): Ceres Seq. ID no. 15174175
MNCCSCSHFGSLIGGLKGINSQLCGYIYFLLYEVVSQCSLPNLQFG

SEQ ID NO: 61914 - DNA, 689 bp, Triticum aestivum
  misc_feature (1)..(689): Ceres Seq. ID no. 15173785
acctcccacaaccgctccgctacctcctcttcttgattcctgccactgtccgcctctcccgcccggccctcgccatggacggcgccgacagcatgcggttccagcggcaggcctcctgctcctgcgccccctccatgtcccgcggctacgtccgcagcggcttcgacctcgacgacgacgacttcgacggcttcgccgacgggcacttcgacaaggccggcgtcgtccagcacgggagggcgccgcccaccgccgcgtcgcgcgggtgcggcacgaagctgaggggcctgtggcggaagatcgtccgggagaagaagaggatactgctctgctccaccggctgcgtgcccgtcggcggggcctcggcggcggcgcgggagccctacgacgcgtacagctacgcgcagaacttcgacgacggcgcggcctgggtggagcccgacaacctctcgcgctccttctccgcgcgcttcgccgtcccctccagggtcctgcagcgggtcgccgtgtagacacgacacgacacgacccgccgccggcggctgcgaccgcggccgaccgtcgtttctttcttttgttttcgttctttgtttcttgttcttctcatctctgtctcagttttggagtcgtcaacaactgtgaaaaaggaatgttctttgcccgcctgtaaatggtagcccctcaatccc

SEQ ID NO: 61915 - protein, 222 aa, Triticum aestivum
  peptide (1)..(222): Ceres Seq. ID no. 15173786
PPTTAPLPPLLDSCHCPPLPPGPRHGRRRQHAVPAAGLLLLRPLHVPRLRPQRLRPRRRRLRRLRRRALRQGRRRPAREGAAHRRVARVRHEAEGPVAEDRPGEEEDTALLHRLRARRRGLGGGAGALRRVQLRAELRRRRGLGGARQPLALLLRALRRPLQGPAAGRRVDTTRHDPPPAAATAADRRFFLLFSFFVSCSSHLCLSFGVVNNCEKGMFFARL

SEQ ID NO: 61916 - protein, 169 aa, Triticum aestivum
  peptide (1)..(169): Ceres Seq. ID no. 15173787
LPQPLRYLLFLIPATVRLSRPALAMDGADSMRFQRQASCSCAPSMSRGYVRSGFDLDDDDFDGFADGHFDKAGVVQHGRAPPTAASRGCGTKLRGLWRKIVREKKRILLCSTGCVPVGGASAAAREPYDAYSYAQNFDDGAAWVEPDNLSRSFSARFAVPSRVLQRVAV

SEQ ID NO: 61917 - protein, 145 aa, Triticum aestivum
  peptide (1)..(145): Ceres Seq. ID no. 15173788
MDGADSMRFQRQASCSCAPSMSRGYVRSGFDLDDDDFDGFADGHFDKAGVVQHGRAPPTAASRGCGTKLRGLWRKIVREKKRILLCSTGCVPVGGASAAAREPYDAYSYAQNFDDGAAWVEPDNLSRSFSARFAVPSRVLQRVAV

SEQ ID NO: 61918 - DNA, 1021 bp, Triticum aestivum
  misc_feature (1)..(1021): Ceres Seq. ID no. 15173688
catttaagcttaaacccatgtcccctaacccccccgtaggtctccgtcccgaattccccattccccatctccctccctctccatggccgccgccgccgcttccatggcccgcaggctgctctcccccaccacctcctcgccgtccaccgccatacgcctcctcatctcccgccgcatcgcctccgccccgtccatcccgcacgccccggccgcggcggcgagggagatgctgcgcccggcggccgtcgcctcctcgtcctccttcctcctccgcggcgccgggggcgccaggggaatggcgcggcggccggggggcgacgggtactcccccgcgcggggcgggggcgggggcggggccggaggggaccgcgcgcccacggagatggcgccgctgttccccgggtgcgactacaagcactggctgatcgtcatggacaagcccggcggcgagggcgcctccaagcaccagatgatcgactgctacgtccagaccctcgccaaggtcctcggaagcgaggaggaggccaagaggaagatttacaacgtctcgtgcgagcgctacttcgggttcgggtgtgagattgatgaggagacatccaacaagcttgaagggattcctggtgttctgtttgtactccccgattcctatgtggaccctgaacacaaggactatggagccgagctgtttgtgaatggggagattgtgcagagatcacccgagaggcagaggagggtggagcccgttccgcagagagcgtcggacaggccgaggtacaacgacaggacccggtacgcgcgccggagggagaaccagcagcagcagcagcagcgatgatccaccacacgaccgagctagaggcaacctgctgtgctgttttcatcccctcgacacagcaagtagctggtattgcttggttttagcaatccgtttcatgttgctactactctgttatgtgtatgtatttgacgacttggagcttgaaactaagaagcttgatagcataaaagaattttagagctg

SEQ ID NO: 61919 - protein, 250 aa, Triticum aestivum
  peptide (1)..(250): Ceres Seq. ID no. 15173689
MAAAAASMARRLLSPTTSSPSTAIRLLISRRIASAPSIPHAPAAAAREMLRPAAVASSSSFLLRGAGGARGMARRPGGDGYSPARGGGGGGAGGDRAPTEMAPLFPGCDYKHWLIVMDKPGGEGASKHQMIDCYVQTLAKVLGSEEEAKRKIYNVSCERYFGFGCEIDEETSNKLEGIPGVLFVLPDSYVDPEHKDYGAELFVNGEIVQRSPERQRRVEPVPQRASDRPRYNDRTRYARRRENQQQQQQR

SEQ ID NO: 61920 - protein, 243 aa, Triticum aestivum
  peptide (1)..(243): Ceres Seq. ID no. 15173690
MARRLLSPTTSSPSTAIRLLISRRIASAPSIPHAPAAAAREMLRPAAVASSSSFLLRGAGGARGMARRPGGDGYSPARGGGGGGAGGDRAPTEMAPLFPGCDYKHWLIVMDKPGGEGASKHQMIDCYVQTLAKVLGSEEEAKRKIYNVSCERYFGFGCEIDEETSNKLEGIPGVLFVLPDSYVDPEHKDYGAELFVNGEIVQRSPERQRRVEPVPQRASDRPRYNDRTRYARRRENQQQQQQR

SEQ ID NO: 61921 - protein, 202 aa, Triticum aestivum
  peptide (1)..(202): Ceres Seq. ID no. 15173691
MLRPAAVASSSSFLLRGAGGARGMARRPGGDGYSPARGGGGGGAGGDRAPTEMAPLFPGCDYKHWLIVMDKPGGEGASKHQMIDCYVQTLAKVLGSEEEAKRKIYNVSCERYFGFGCEIDEETSNKLEGIPGVLFVLPDSYVDPEHKDYGAELFVNGEIVQRSPERQRRVEPVPQRASDRPRYNDRTRYARRRENQQQQQQR

SEQ ID NO: 61922 - DNA, 658 bp, Triticum aestivum
  misc_feature (1)..(658): Ceres Seq. ID no. 15173842
tctccacatcaacgccagcaagaacaaatgatgcaactgatacaacaacttcagcagagaggattgaatcgccagcagattgcgcaggcgctgcagcgacttccccatcttaatgcccaacatctgaaccagcagcaacggcaacaacagcaagcatctccaaggatgccagcatctgcagcagggaagcccgcaaacacggcaggatcgcagccggcgacaccttcctcaggcggaaccgcggcgggtgcaaatgcgccgcatcaaggagggggaaattgcagccaacttattgggaagagaaagatacatgatttggtggcgcaggtggatccacagtgcgaggttgatccagaggtggaagatttgattctggagattgccgacgacttcattaacacagcggctgattttgcgtgcaggcttgcaaagcacaggaaatcgtcggttgtggaagccaaggatgtgctactgcacctgcagaagaattgtcacctgtccgctcctggtttctcacaggagaggatgtgaatgaatctgcagagaaattcagtgtaggctttggtagaattgtggcatttactttgaaaagcgtgaattgtatttgagatagatacttataccattataggtaaatgagaactgctatacggacgac

SEQ ID NO: 61923 - protein, 176 aa, Triticum aestivum
  peptide (1)..(176): Ceres Seq. ID no. 15173843
SPHQRQQEQMMQLIQQLQQRGLNRQQIAQALQRLPHLNAQHLNQQQRQQQQASPRMPASAAGKPANTAGSQPATPSSGGTAAGANAPHQGGGNCSQLIGKRKIHDLVAQVDPQCEVDPEVEDLILEIADDFINTAADFACRLAKHRKSSVVEAKDVLLHLQKNCHLSAPGFSQERM

SEQ ID NO: 61924 - protein, 167 aa, Triticum aestivum
  peptide (1)..(167): Ceres Seq. ID no. 15173844
MMQLIQQLQQRGLNRQQIAQALQRLPHLNAQHLNQQQRQQQQASPRMPASAAGKPANTAGSQPATPSSGGTAAGANAPHQGGGNCSQLIGKRKIHDLVAQVDPQCEVDPEVEDLILEIADDFINTAADFACRLAKHRKSSVVEAKDVLLHLQKNCHLSAPGFSQERM

SEQ ID NO: 61925 - protein, 166 aa, Triticum aestivum
  peptide (1)..(166): Ceres Seq. ID no. 15173845
MQLIQQLQQRGLNRQQIAQALQRLPHLNAQHLNQQQRQQQQASPRMPASAAGKPANTAGSQPATPSSGGTAAGANAPHQGGGNCSQLIGKRKIHDLVAQVDPQCEVDPEVEDLILEIADDFINTAADFACRLAKHRKSSVVEAKDVLLHLQKNCHLSAPGFSQERM

SEQ ID NO: 61926 - protein, 121 aa, Triticum aestivum
  peptide (1)..(121): Ceres Seq. ID no. 15173846
MPASAAGKPANTAGSQPATPSSGGTAAGANAPHQGGGNCSQLIGKRKIHDLVAQVDPQCEVDPEVEDLILEIADDFINTAADFACRLAKHRKSSVVEAKDVLLHLQKNCHLSAPGFSQERM

SEQ ID NO: 61927 - DNA, 636 bp, Triticum aestivum
  misc_feature (1)..(636): Ceres Seq. ID no. 15173826
gcagcgaagcgcccgaaccgattcgagtgacactcctcttttttacctccctccctccctcccaaagtccaaaccctagccggctagacctcgcgatccaatccacatctaacccacccgtagagatttcggcggccgatgtctccgctgtcgccgccgcggtctccacgccccctcttgtactagcagtcagccagcgacctccctcacagcctaaaaatccacgccgtagcgacgactcgagggtcggacggcaggcggccatgagcagcgcgttcagcgaggagatactcgccgacaagctcgccaagctcaacaacacgcagcagtgcatcgaaacgctgtcgcattggtgcatttaccatcggaaggatgcagagctaattgtccaaacatgggccaagcagttccataattctggaaatgaacagaaggtccctttcctttatctggctaatgacatcctacagaacagtaagcgcatctacaaagttgaatcctcgatgttgattttgtatttgaactaagttcatgcccatgattcggtggatttgccatgaatttggttaagcttgcagtgatgtggcctcctgtttggaaaaattgaatattctgcctatcagtggtttcaaactc

SEQ ID NO: 61928 - protein, 174 aa, Triticum aestivum
  peptide (1)..(174): Ceres Seq. ID no. 15173827
SEAPEPIRVTLLFFTSLPPSQSPNPSRLDLAIQSTSNPPVEISAADVSAVAAAVSTPPLVLAVSQRPPSQPKNPRRSDDSRVGRQAAMSSAFSEEILADKLAKLNNTQQCIETLSHWCIYHRKDAELIVQTWAKQFHNSGNEQKVPFLYLANDILQNSKRIYKVESSMLILYLN

SEQ ID NO: 61929 - protein, 87 aa, Triticum aestivum
  peptide (1)..(87): Ceres Seq. ID no. 15173828
MSSAFSEEILADKLAKLNNTQQCIETLSHWCIYHRKDAELIVQTWAKQFHNSGNEQKVPFLYLANDILQNSKRIYKVESSMLILYLN

SEQ ID NO: 61930 - DNA, 920 bp, Triticum aestivum
  misc_feature (1)..(920): Ceres Seq. ID no. 15173858
aaagtaaccgtagtggaatggggtggagtagtggtggctagagtgtgccgggttcgttgcggagctcgcgaccagctctgccaaaagcgatccatgtctctttgaccccccacaccccacccccgtatactcccttcccttctcccatcacacttccattcgagacacactcacccttcgacctgtccgcctctcctatataaacgcacgtccaccgctccctgttcctcatcctcgttcccttgcactgcgccaacaaacaattaactacactctcactagctagctaggctaggccggggagggagaaggaggcgccaagatgttgaggatgcagcagcaggtggagggcgtggtgggcggcggcatcatggcggaggcggaggaggcggcggtgtacgagcgggtggctcgcatggccagcggcaacgcggtggtcgtcttcagcgccagcggctgctgcatgtgccacgtcgtcaagcgcctcctgcttggcctgggggtcggccccaccgtctacgagttggaccagatgggcggcgccgggcgagagatccaggcggcgctggcgcagctgctgccccccggacccggcgccggccaccaccagcagccgccagtgcccgtggtgttcgtcggcgggaggctcctgggcggcgtggagaaggtgatggcgtgccacatcaacggcacgctcgtcccgctcctcaaggacgccggcgcgctctggctctgagccgcgagctgcattgctttgctgtctcgccggccggccggaactgatggtggtggtgatcaacgacggcgtttactttgtgtgttggtcgtcttttcttttcttgtgccgtgcctgtggctgtggctgtgcgttgcatggtgtgttgagcttcactggctagtgagatgtagatatagttagc

SEQ ID NO: 61931 - protein, 137 aa, Triticum aestivum
  peptide (1)..(137): Ceres Seq. ID no. 15173859
MLRMQQQVEGVVGGGIMAEAEEAAVYERVARMASGNAVVVFSASGCCMCHVVKRLLLGLGVGPTVYELDQMGGAGREIQAALAQLLPPGPGAGHHQQPPVPVVFVGGRLLGGVEKVMACHINGTLVPLLKDAGALWL

SEQ ID NO: 61932 - protein, 134 aa, Triticum aestivum
  peptide (1)..(134): Ceres Seq. ID no. 15173860
MQQQVEGVVGGGIMAEAEEAAVYERVARMASGNAVVVFSASGCCMCHVVKRLLLGLGVGPTVYELDQMGGAGREIQAALAQLLPPGPGAGHHQQPPVPVVFVGGRLLGGVEKVMACHINGTLVPLLKDAGALWL

SEQ ID NO: 61933 - protein, 121 aa, Triticum aestivum
  peptide (1)..(121): Ceres Seq. ID no. 15173861
MAEAEEAAVYERVARMASGNAVVVFSASGCCMCHVVKRLLLGLGVGPTVYELDQMGGAGREIQAALAQLLPPGPGAGHHQQPPVPVVFVGGRLLGGVEKVMACHINGTLVPLLKDAGALWL

SEQ ID NO: 61934 - DNA, 738 bp, Triticum aestivum
  misc_feature (1)..(738): Ceres Seq. ID no. 15173940
ggccaaggccgtttgcaccttatttcgccttacacctcaccatcgacttacatacttctgttggccggagccacacgagctagcaccaccgacaaacaataccttgctgttctgagctcgccgtcccgatggcaagcaccaacatggcgtcggccacctccagattcatgctggcggcgggcatccccagcggctccaacggcggcgtgggcagccgcgtcagcttcgtcccgtccaaccggctcggctggaagctcgtggcccgcgccgaggaggagccgactgccgccgcaccggcggaaccagcaccggccgcggaggagaaaccggaagccgccgtggccaccaaagagcccgccaaagccaagccgccgccaaggggacccaagaggggaaccaaggtgaagattctgaggagggagtcctactggtacaacgggaccggatccgtcgtcacggttgatcaggatcccaacacccgttacccggtggtggtgcgtttcgccaaggtgaactacgccggcgtgtcgaccaacaactacgccctggacgagatcaaggaggttgctgcttaagcgaacgaggctagctgccatgtgctccatccaatgtttgtatcagtagctcgtcgagtgacgatgtgaatgttagcctctcacaaaccttatgtgtaatacctctgcgattatatgtatttgcctgcttcctcatggacctaataatctccttctgttgctt

SEQ ID NO: 61935 - protein, 148 aa, Triticum aestivum; identical to SEQ ID NO: 56332
  peptide (1)..(148): Ceres Seq. ID no. 15173941

SEQ ID NO: 61936 - protein, 143 aa, Triticum aestivum; identical to SEQ ID NO: 56333
  peptide (1)..(143): Ceres Seq. ID no. 15173942

SEQ ID NO: 61937 - protein, 135 aa, Triticum aestivum; identical to SEQ ID NO: 56334
  peptide (1)..(135): Ceres Seq. ID no. 15173943

SEQ ID NO: 61938 - DNA, 726 bp, Triticum aestivum
  misc_feature (1)..(726): Ceres Seq. ID no. 15172609
ttggatgatggaaaaaccagcaagcagcaagcgtagttagaaaagttgccgtagcgcgccctacggagttgtacaaagtcagcaaccgttttggggcgcaagcataggcaacacaggactgatgacggggtggggcgcgcagtgaactggttttctaaaaagattggaagatccggccaaagaaggtgatagccctgttcattcgttcccatggttcgatccttcccagtaaaacgcggcgtgttcgaatgatgatcgcttttacgcgagaaagggggaccaccctctaagcctaagtattcctcaatgaccgatagcgtacaagtatcgagagggataggcggaggaaggacaaccctgaagccatggaggaggacgatgttgatgaggttgctgagatcagggctgcccacttcgaggagtcgatgaagtatgcgcgccggagcgtgagcgacgccgacatccgcaagtaccaggcctttgcccagactctgcagcagtctcgtggattcggcagcgagttccgtttccctgatcagccggctgcgggcgcttcctctgccgctgcggccgacccttttgcttccgctgctgcagcagctgacgatgatgatttatatagctaaatcctttcgcgttcgtagatgttgtgctccggtacgcagtacacggaagaactatgttcttaagttaatattgtgatgcacagttaatcgttctgcccgc

SEQ ID NO: 61939 - protein, 86 aa, Triticum aestivum
  peptide (1)..(86): Ceres Seq. ID no. 15172610
MEEDDVDEVAEIRAAHFEESMKYARRSVSDADIRKYQAFAQTLQQSRGFGSEFRFPDQPAAGASSAAAADPFASAAAAADDDDLYS

SEQ ID NO: 61940 - protein, 66 aa, Triticum aestivum
  peptide (1)..(66): Ceres Seq. ID no. 15172611
MKYARRSVSDADIRKYQAFAQTLQQSRGFGSEFRFPDQPAAGASSAAAADPFASAAAAADDDDLYS

SEQ ID NO: 61941 - DNA, 603 bp, Triticum aestivum
  misc_feature (1)..(603): Ceres Seq. ID no. 15172643
atcgatatctctccccgctccgctccccatcacgaacagctggtctatcaatggcggaggagaccgagaccgagaagccgctcttctctccgacagatgtctcgctccacgcatccacgaaggactgctgggtcgtcatccatggcaaggtgtacgatgtgaccaagttcttggaggaccaccccggcggagaggatgtcctgctccatgcatctgcctctggggatgctacggaggcttttgaagatgtgggacacagcacatcagccatcagcatgatgagcagctacctgatcggaagcatcgaggactatgtgcctcccagtgcaacgaaggacgccacagctattggcagtgatgtgctgccagattccagaacaatgcagaggaacaaaggctctcccgctccaaacacatttctggacttcgtgctccctttatgtatgcttggcatggcctttgcagcttggtactacctaacattcgtggccgagagctagtgaattcggacaagattcatatcattgcacatttttacgttaatagtgttgctgcatcgatacattgagggaacataaacttggtcacagaaccatttgcttt

SEQ ID NO: 61942 - protein, 165 aa, Triticum aestivum
  peptide (1)..(165): Ceres Seq. ID no. 15172644
RYLSPLRSPSRTAGLSMAEETETEKPLFSPTDVSLHASTKDCWVVIHGKVYDVTKFLEDHPGGEDVLLHASASGDATEAFEDVGHSTSAISMMSSYLIGSIEDYVPPSATKDATAIGSDVLPDSRTMQRNKGSPAPNTFLDFVLPLCMLGMAFAAWYYLTFVAES

SEQ ID NO: 61943 - protein, 149 aa, Triticum aestivum
  peptide (1)..(149): Ceres Seq. ID no. 15172645
MAEETETEKPLFSPTDVSLHASTKDCWVVIHGKVYDVTKFLEDHPGGEDVLLHASASGDATEAFEDVGHSTSAISMMSSYLIGSIEDYVPPSATKDATAIGSDVLPDSRTMQRNKGSPAPNTFLDFVLPLCMLGMAFAAWYYLTFVAES

SEQ ID NO: 61944 - DNA, 982 bp, Triticum aestivum
  misc_feature (1)..(982): Ceres Seq. ID no. 15172622
acgggcaatccacgccgcggattgggaaacggtgaccgacgaccccatccggccatcttattagtagcacctacggcacaaggcaacaacgcacgcctctcccagcgcccaaacactccgctcggctgctagctgcgcgtccatacaaacgcagttacgcgcacaagtacagaaccgccccctcctcttccgggaggccggccggccggccagcccgctcctcccctcccatccacctctgtccttagcatggtgagggacaccggcggcgccctgcagctgctggcggtgcttctcctcgtcctggcgtccgagctcgccaccttcagctgcggccacaggatccccagggcggacgtcgccgcctggaagcgcggggcgacgccgacgggacgcacggcgtccaccacgacgacgacgacggccactcgtgccggcggcgcggcggcggcggcgctcggcgactccaagaggctggtgccgcaggggccgaacccgctgcacaactagcgccgcgcaggttcttcctcgctcccatttttctcgcgcggaagaacgccggctatctagcgagcgactgagtagtgtgtggacgatacaatcacatatgcagtgatgtaactgtaattagctagcccattagatcgagctccggagattgcatccaaagaaatagtgtaaattacatgtacgatgtatcttcttcttcctccatgattttcactacttctttggagcaaagatctgaaacagcaggacaattattgattgactgattgattgattgggagcttgctgcagccctgtccctgcgagagcttggagcggtcaatggctgtcctcagtgtttaatttcggagggcgtttagggtcatttcgcgttggccaaggcgtggcaagcggacaagggcgccacgacaagcgggtgctttgtcacgccatggctaaaatatgattgatcctcactagcctttttgtttgc

SEQ ID NO: 61945 - protein, 86 aa, Triticum aestivum
  peptide (1)..(86): Ceres Seq. ID no. 15172623
MVRDTGGALQLLAVLLLVLASELATFSCGHRIPRADVAAWKRGATPTGRTASTTTTTTATRAGGAAAAALGDSKRLVPQGPNPLHN

SEQ ID NO: 61946 - protein, 43 aa, Triticum aestivum
  peptide (1)..(43): Ceres Seq. ID no. 15172624
TGNPRRGLGNGDRRPHPAILLVAPTAQGNNARLSQRPNTPLGC

SEQ ID NO: 61947 - DNA, 863 bp, Triticum aestivum
  misc_feature (1)..(863): Ceres Seq. ID no. 12624376
aaagatcggtcttttcaacagtcagtgagtggtgaaagaaaacaaaagaggtttaactatggtgatggtgacgactcatcttcgtttcactcttcttctcgccgtcatcgggatcttcttctcctcttctcaggttcgcgcagccattgtcaggatcaaaccattctcctcgcctttcgctaccaatcttgcaacgctgcaatctcaaattggctacaacttcaccaacatcaacctccttcgccgtgccatgactcatgcttccttctctcgagagaacaacaaagccctcagtatctttgggttccatctcattgaaacctctgtttcccttcagcttctctccaaagatatcgatacctcctccaaagccttgacccgtttgatagcagaggtttcaaatgtggaatcctcgtgtgctcttgatgggaaccggttgggtttggagagggttatcagggtttctcccaagactgatgcgtccaactcggggatcgtttgtggtgggttcagggcaatctttggagctgttgctactgattctggaacggttgatgaggctattaaggttttctggaaagtacatggagctggagctgcaagacttgtgtctgtgctgtaaattagtgtatggtagtagtttgcttccgatggtaaaagttccaagagactcgtctttaaggcttatatctgtctctctttttttttctctcgtgttgtgtgatgagtcagtcactcagagtgaccgatgaccaaacataataatattggttgatgttatggaccaattgataaggtaccactgattgtttcaattttcaactaaagaggctgagagttagtaggttttgtgttgagaagct

SEQ ID NO: 61948 - protein, 187 aa, Triticum aestivum
  peptide (1)..(187): Ceres Seq. ID no. 12624377
MVMVTTHLRFTLLLAVIGIFFSSSQVRAAIVRIKPFSSPFATNLATLQSQIGYNFTNINLLRRAMTHASFSRENNKALSIFGFHLIETSVSLQLLSKDIDTSSKALTRLIAEVSNVESSCALDGNRLGLERVIRVSPKTDASNSGIVCGGFRAIFGAVATDSGTVDEAIKVFWKVHGAGAARLVSVL

SEQ ID NO: 61949 - protein, 185 aa, Triticum aestivum
  peptide (1)..(185): Ceres Seq. ID no. 12624378
MVTTHLRFTLLLAVIGIFFSSSQVRAAIVRIKPFSSPFATNLATLQSQIGYNFTNINLLRRAMTHASFSRENNKALSIFGFHLIETSVSLQLLSKDIDTSSKALTRLIAEVSNVESSCALDGNRLGLERVIRVSPKTDASNSGIVCGGFRAIFGAVATDSGTVDEAIKVFWKVHGAGAARLVSVL

SEQ ID NO: 61950 - protein, 123 aa, Triticum aestivum
  peptide (1)..(123): Ceres Seq. ID no. 12624379
MTHASFSRENNKALSIFGFHLIETSVSLQLLSKDIDTSSKALTRLIAEVSNVESSCALDGNRLGLERVIRVSPKTDASNSGIVCGGFRAIFGAVATDSGTVDEAIKVFWKVHGAGAARLVSVL

SEQ ID NO: 61951 - DNA, 1001 bp, Triticum aestivum
  misc_feature (1)..(1001): Ceres Seq. ID no. 13662009
acatttgaggtctgagaagaatctcaggaacagaacctattgtgtgtgtttcttgtttctctctctctctacaatggctgcttttgcgtgcactactcgtccgccgatttctctccggtcagagatgaggatcgcatcctcaacgaaagtttcactctccactcgacaaatgttctccgtgggaggattgaggactcgcgtctctctatcatcggtctccaagaattctagcgcttctcgattacgacgacgaggagggttcatcatctgtgaagctcaggacactgctacagggattccaatggtgaacgattcaacgtgggagtcactagtactcaaggctgatgagcctgttgttgtggacttttgggcaccatggtgtggaccctgcaaaatgattgatcccattgtcaacgaactagcacagcagtacactgggaagatcaagttcttcaaactaaacactgacgattctccggcgaccccgggaaagtacggtgtgagaagcataccaaccatcatgatcttcgttaagggagagaagaaggatacaatcatcggtgcagtgcctaaaaccacattagcaacaagcattgataaattcttgcagtgaagcatgtggatggatcactctcttttatttctctatagtcctgttcgtttaacgaacgctgcgttcgatatctgcgtctgaaatttgttcataagttgattaaatgaaatgaaaacaagagacgcagcgtcaaaaaaacgaagctttccggtgttgccgctgacgtcaaaaaaagtagcgaccattgttcctcatttctctctcctctctgcgactgaaatcagaaacgcggcgtcacctgttcttctctctttctctttggatacccttttttctctatgtgtatttggacttaacttatctactactccttctcatttagacatgtataatgataataatataatgttgggtttaagaaatcgtgtttatgatggtgactttatct

SEQ ID NO: 61952 - protein, 203 aa, Triticum aestivum
  peptide (1)..(203): Ceres Seq. ID no. 13662010
HLRSEKNLRNRTYCVCFLFLSLSTMAAFACTTRPPISLRSEMRIASSTKVSLSTRQMFSVGGLRTRVSLSSVSKNSSASRLRRRGGFIICEAQDTATGIPMVNDSTWESLVLKADEPVVVDFWAPWCGPCKMIDPIVNELAQQYTGKIKFFKLNTDDSPATPGKYGVRSIPTIMIFVKGEKKDTIIGAVPKTTLATSIDKFLQ

SEQ ID NO: 61953 - protein, 179 aa, Triticum aestivum
  peptide (1)..(179): Ceres Seq. ID no. 13662011
MAAFACTTRPPISLRSEMRIASSTKVSLSTRQMFSVGGLRTRVSLSSVSKNSSASRLRRRGGFIICEAQDTATGIPMVNDSTWESLVLKADEPVVVDFWAPWCGPCKMIDPIVNELAQQYTGKIKFFKLNTDDSPATPGKYGVRSIPTIMIFVKGEKKDTIIGAVPKTTLATSIDKFLQ

SEQ ID NO: 61954 - protein, 162 aa, Triticum aestivum
  peptide (1)..(162): Ceres Seq. ID no. 13662012
MRIASSTKVSLSTRQMFSVGGLRTRVSLSSVSKNSSASRLRRRGGFIICEAQDTATGIPMVNDSTWESLVLKADEPVVVDFWAPWCGPCKMIDPIVNELAQQYTGKIKFFKLNTDDSPATPGKYGVRSIPTIMIFVKGEKKDTIIGAVPKTTLATSIDKFLQ

SEQ ID NO: 61955 - DNA, 866 bp, Triticum aestivum
  misc_feature (1)..(866): Ceres Seq. ID no. 14301765
atagatctctacttagcttctccgcgatacaagcccatttaaattcacatccaaccggatcgaggatttagggttcgcgaaaaaaatggcgcaacaacaatcgttgatctacagcttcgtcgctcgcgggacggtgatcctcgccgagttcactgatttcaaaggcaacttcacctccgtcgctgcacagtgcctccagaagctcccctcttccaacaacaagttcacctacacctgcgacggccacaccttcagttacctcgtcgaagatggattcacgtactgtgttgttgcggttgattctgctgggaggcagattccgatggcgtttttggagagagtgaaagaggattttagcaagagatatggtggtgggaaggctgctactgctcaggctaacagcttcaataaagagtttggctctaagctgaaagagcacatgcagtattgtatggatcaccctgatgagattagcaagcttgctaaggtgaaggctcaagtctctgaagttaaaggtgttatgatggaaaacatcgagaaggttcttgaccgtggtgagaaaattgagcttctggtggacaaaaccgagaaccttcgctctcaggcacaagacttcagaacaacggggacacagatgagaagaaagatgtggcttcagaacatgaagattaaactcatagttctcgccatcatcgtcgcactgattctcatcatcgtgctctcagtttgccatggcttcaagtgttaaagagccccatcaaagttaaaaaaactctcttgaaatctttttctcactcggtcttcgtaatctatatataatagcaaaccatttttattaatctgatgatgtcatcattttttataag

SEQ ID NO: 61956 - protein, 220 aa, Triticum aestivum
  peptide (1)..(220): Ceres Seq. ID no. 14301766
MAQQQSLIYSFVARGTVILAEFTDFKGNFTSVAAQCLQKLPSSNNKFTYTCDGHTFSYLVEDGFTYCVVAVDSAGRQIPMAFLERVKEDFSKRYGGGKAATAQANSFNKEFGSKLKEHMQYCMDHPDEISKLAKVKAQVSEVKGVMMENIEKVLDRGEKIELLVDKTENLRSQAQDFRTTGTQMRRKMWLQNMKIKLIVLAIIVALILIIVLSVCHGFKC

SEQ ID NO: 61957 - protein, 141 aa, Triticum aestivum
  peptide (1)..(141): Ceres Seq. ID no. 14301767
MAFLERVKEDFSKRYGGGKAATAQANSFNKEFGSKLKEHMQYCMDHPDEISKLAKVKAQVSEVKGVMMENIEKVLDRGEKIELLVDKTENLRSQAQDFRTTGTQMRRKMWLQNMKIKLIVLAIIVALILIIVLSVCHGFKC

SEQ ID NO: 61958 - DNA, 835 bp, Triticum aestivum
  misc_feature (1)..(835): Ceres Seq. ID no. 12624657
cccctttcccttggcgtgaaccaactttcaagtgcttccgttcttgcctcccgtgccgccgccgcctccaatcttgcctccgacctcgtcgtccggcctcgcggcgccggagcccggccggatggagtacccacggtcaccgggcgccccatatcatgcgccgccacctccaatgtcgtcgcttcgtccgcctacgccttcctcggcagttcatgccgtcgccgccccaactccttccgcagacgccatgaagaggaagcgacaggggaaccacctcatccaagggggcccagccgatgcagcaccaccctctttcgggcccgcttcggttcctcccgtcaaggccgccggcgggaggaagaagaccggctccaccagcccaaccggtgcatgtgcgaagtccccgaggaagaatgcaatcacagcaagaggtcgggctcctcctccgcctacggctggccacaacctccccattcacggcgactccaccggccacgcctaccatgtgttcgatgaaacgaccgggagccaaagtgtgccttccacatataccgaaatgttggccgagagtatagtggatttgagtgctcactctccgatcaatgtggatgatggcgatggtgctaggggcggcgatggtggcgacgatcttcacaacaatgaggattttgcttgatttctccatgactggtggtcatttgagcaacttttgttttgtttgatcgcgcatttataaggctaaacttgctacctcgtatgttgcgcttgattttgaatgtgatgaattagtatgatgatgaactagcgatgtttatataataaattttatgtattt

SEQ ID NO: 61959 - protein, 184 aa, Triticum aestivum
  peptide (1)..(184): Ceres Seq. ID no. 12624658
MEYPRSPGAPYHAPPPPMSSLRPPTPSSAVHAVAAPTPSADAMKRKRQGNHLIQGGPADAAPPSFGPASVPPVKAAGGRKKTGSTSPTGACAKSPRKNAITARGRAPPPPTAGHNLPIHGDSTGHAYHVFDETTGSQSVPSTYTEMLAESIVDLSAHSPINVDDGDGARGGDGGDDLHNNEDFA

SEQ ID NO: 61960 - protein, 171 aa, Triticum aestivum
  peptide (1)..(171): Ceres Seq. ID no. 12624659
PLSLGVNQLSSASVLASRAAAASNLASDLVVRPRGAGARPDGVPTVTGRPISCAATSNVVASSAYAFLGSSCRRRPNSFRRRHEEEATGEPPHPRGPSRCSTTLFRARFGSSRQGRRREEEDRLHQPNRCMCEVPEEECNHSKRSGSSSAYGWPQPPHSRRLHRPRLPCVR

SEQ ID NO: 61961 - protein, 167 aa, Triticum aestivum
  peptide (1)..(167): Ceres Seq. ID no. 12624660
MSSLRPPTPSSAVHAVAAPTPSADAMKRKRQGNHLIQGGPADAAPPSFGPASVPPVKAAGGRKKTGSTSPTGACAKSPRKNAITARGRAPPPPTAGHNLPIHGDSTGHAYHVFDETTGSQSVPSTYTEMLAESIVDLSAHSPINVDDGDGARGGDGGDDLHNNEDFA

SEQ ID NO: 61962 - DNA, 1533 bp, Triticum aestivum
  misc_feature (1)..(1533): Ceres Seq. ID no. 13583262
aaaaaacctagatgccacaccctatcccagccgcagccgccgccgccgtcgccgccgccgccgctgcaaccgccgccttcgattccgtgaaattggaggggaagacaattggatctgtctgccgcaggaggagtggggagaaatagaatgaaggcgcgacagttcctgaatgttgtgatggagaggtatggcactggcggtgccggtggcagcttgtatacggtcagtcgcatcgacgccaaggaacacctcttctaccgatccacggccgaagcacaggcagcagaaaaatcaaggttcgatatggagtgcccatcatcagccgttgtgccaccatggatggagaccatctcgcggatgcctccgtccaagctcagattcgagcggtccacctcagacaacaaaagactggatttcctgcccttccatgaacgaggcagcggtgctgcgagcaagatcctctgcgtggacgccgctggccacaccgccctatacgacatggacgccggttcggtccagccaattccatgcctcaacagtcccaaggggagcaggcccatcagcttctccaccaccaatcccgaagcctctgaccgtgaacgtgctgatgccttctacgttatgggaaggttcccttccagctatgacccctacaacttcgaggtactcatgtacagtaacccttctaatggcaggacgatgaaaggctggaattggctcaagctaccaacaccacctgcctatgctgacaattgcattgtcaattcccatgcgctgcttgaaattgaaggtgactcaattcttgttgtctcctccggagaagaaagccttggcacctactgcttcaacacagccagtcgcaagtggtttaaggctggctcctggacactgccattcctcagtcgtgctgtgcatgtaccagagctggacaacctcttatttggcattgccagcgatgcacccaaccacttttgtgcaatgggtatctcccgtcttctctcgaagaggtgtccacctttagtgtacagttggccacaccttgatctgcccgaggactggataatgcaagattgcagctttgtgtacttgggaaatgggaggttttgcatcaccaaagtctttgagtttggtctggacgaagacactggcaacacgactgatatgggtgctgtgatgtctggcgtggaggtagtgcatcacaagaagtctggactcatcatggtcaaccataggtccaaattctacaggttcttcagggatgacatccaatgtgtcttgtaaggtaacttggtgaaaggggagcaacacgggtttttccaggaggattggaattgtctgtcttcccctttccatcagtatctagtagctacaacttctgctatgttagtttttgggcagtagtgctcatttccttcagtatgttgtatcactatatttgctgccgttgctgtatacatagcttcttaggtgcttttattttattattagatggactagtatcttgatgaaattatgatatggtttataactggt

SEQ ID NO: 61963 - protein, 377 aa, Triticum aestivum
  peptide (1)..(377): Ceres Seq. ID no. 13583263
MKARQFLNVVMERYGTGGAGGSLYTVSRIDAKEHLFYRSTAEAQAAEKSRFDMECPSSAVVPPWMETISRMPPSKLRFERSTSDNKRLDFLPFHERGSGAASKILCVDAAGHTALYDMDAGSVQPIPCLNSPKGSRPISFSTTNPEASDRERADAFYVMGRFPSSYDPYNFEVLMYSNPSNGRTMKGWNWLKLPTPPAYADNCIVNSHALLEIEGDSILVVSSGEESLGTYCFNTASRKWFKAGSWTLPFLSRAVHVPELDNLLFGIASDAPNHFCAMGISRLLSKRCPPLVYSWPHLDLPEDWIMQDCSFVYLGNGRFCITKVFEFGLDEDTGNTTDMGAVMSGVEVVHHKKSGLIMVNHRSKFYRFFRDDIQCVL

SEQ ID NO: 61964 - protein, 367 aa, Triticum aestivum
  peptide (1)..(367): Ceres Seq. ID no. 13583264
MERYGTGGAGGSLYTVSRIDAKEHLFYRSTAEAQAAEKSRFDMECPSSAVVPPWMETISRMPPSKLRFERSTSDNKRLDFLPFHERGSGAASKILCVDAAGHTALYDMDAGSVQPIPCLNSPKGSRPISFSTTNPEASDRERADAFYVMGRFPSSYDPYNFEVLMYSNPSNGRTMKGWNWLKLPTPPAYADNCIVNSHALLEIEGDSILVVSSGEESLGTYCFNTASRKWFKAGSWTLPFLSRAVHVPELDNLLFGIASDAPNHFCAMGISRLLSKRCPPLVYSWPHLDLPEDWIMQDCSFVYLGNGRFCITKVFEFGLDEDTGNTTDMGAVMSGVEVVHHKKSGLIMVNHRSKFYRFFRDDIQCVL

SEQ ID NO: 61965 - protein, 325 aa, Triticum aestivum
  peptide (1)..(325): Ceres Seq. ID no. 13583265
MECPSSAVVPPWMETISRMPPSKLRFERSTSDNKRLDFLPFHERGSGAASKILCVDAAGHTALYDMDAGSVQPIPCLNSPKGSRPISFSTTNPEASDRERADAFYVMGRFPSSYDPYNFEVLMYSNPSNGRTMKGWNWLKLPTPPAYADNCIVNSHALLEIEGDSILVVSSGEESLGTYCFNTASRKWFKAGSWTLPFLSRAVHVPELDNLLFGIASDAPNHFCAMGISRLLSKRCPPLVYSWPHLDLPEDWIMQDCSFVYLGNGRFCITKVFEFGLDEDTGNTTDMGAVMSGVEVVHHKKSGLIMVNHRSKFYRFFRDDIQCVL

SEQ ID NO: 61966 - DNA, 866 bp, Triticum aestivum
  misc_feature (1)..(866): Ceres Seq. ID no. 13596404
aaacactagccacactcgctgacagagtcactgggaagaggcgattcctcccaccaccaggttcccccaaatcgctcgcacccgccactaaccctagcgacatctgcgctcccaatcgctcggcctctcgccggagctccagatccgcggccgcttcctcccgcgctggtggtgaccttcccggatcggagccaagatgacggagtcgatggtgcggaacaagccggggatggcgagcgtcaaggacatgccggtgctgcaggacgggccgccgccgggcgggttcgcgcccgtgcgctacgcgcgccgcatccccaacaagggccccagcgccatcgccctcttcctcaccaccttcggcgccttctcctggggcatgtaccaggtcggacaggggaacaaggtccgccgtgcactcaaggaggagaaaattgctgcccgtagtgctatactgccgatgctccaagctgaagaggatgaaagatttgtcaaagaatggaagaagtatcttgaggaggaagcgaggatcatgaaaaatgttcctggatggaaagttggtgagagcgtgtacaattctgggaaatggatgcctcctgcaaccggtgagctgcgtccggaggtttggtaaggtccaaggtcttgcttcagcccatcgaggatggcatcgtgccttgagggcatgaataaggctttcagacctggatacccaaaatttgctacgaggaatacatacttgagcattcgtcgtgtatttcttctgttgacggaatttgaatggctaataattggacagagcaagccgactttggtctttatatgaaccatcttcttttgttgatgtaacgtgtctttgtattgctacggct

SEQ ID NO: 61967 - protein, 143 aa, Triticum aestivum
  peptide (1)..(143): Ceres Seq. ID no. 13596405
MTESMVRNKPGMASVKDMPVLQDGPPPGGFAPVRYARRIPNKGPSAIALFLTTFGAFSWGMYQVGQGNKVRRALKEEKIAARSAILPMLQAEEDERFVKEWKKYLEEEARIMKNVPGWKVGESVYNSGKWMPPATGELRPEVW

SEQ ID NO: 61968 - protein, 139 aa, Triticum aestivum
  peptide (1)..(139): Ceres Seq. ID no. 13596406
MVRNKPGMASVKDMPVLQDGPPPGGFAPVRYARRIPNKGPSAIALFLTTFGAFSWGMYQVGQGNKVRRALKEEKIAARSAILPMLQAEEDERFVKEWKKYLEEEARIMKNVPGWKVGESVYNSGKWMPPATGELRPEVW

SEQ ID NO: 61969 - protein, 132 aa, Triticum aestivum
  peptide (1)..(132): Ceres Seq. ID no. 13596407
MASVKDMPVLQDGPPPGGFAPVRYARRIPNKGPSAIALFLTTFGAFSWGMYQVGQGNKVRRALKEEKIAARSAILPMLQAEEDERFVKEWKKYLEEEARIMKNVPGWKVGESVYNSGKWMPPATGELRPEVW

SEQ ID NO: 61970 - DNA, 1116 bp, Triticum aestivum
  misc_feature (1)..(1116): Ceres Seq. ID no. 12614847
cccaaattcctcctcctgcctgcctgctgccgcgagagtcctccactccacaacaaccttcgagaacgagcgcgcgcacggaggcggccgcgatctctcgcccaccaacccaccacccgcgccatggcttccaccaatggcggctttgtcagtcctcttgcagcggccgttccagttgaggcggttttgtttgacattgatggtaccttgtgcgactcggatcctcttcatcacatcgctttccaagaattgcttcttgcgattgggtacaacaatggtgtgcctattgacgacgagttcttcataaacaacatcgctggaagaagcgatgctgaagctgcccagaatttgttcccagactggcccctcgaaaaggggctgaaattcctagaggacaaagacgtcaaatacagaagtttggcgatggagcgcctagagcctgtaaagggccttcacaaagtggttcagtgggtgaaagatcacggctacaagcgtgccgcagtaaccaatgccccaaggatcaatgcagagctcatgatcaaacttcttggtctatcagacttcttccaggctgtcattgttggaggcgaatgtgagaagccaaaacccgccccctttccatacctgaaggccctcaaggagctcgaagtgtccgcagcacacaccttcatcttcgaggattccgcttcagggacacgcgcaggtgttgccgcgggaatgcccgtcgtcgccgtctcgacgaggaacccggagaagtccctacaggaagctggggccgcattgatcatcagtgactatgaagaccagaaactgtggaacgcgctcgaggagattgatagggaggaagcgaagctaaagactggtggggcgtgagacttttgatggggatgaacagttgattagaccactgcaaatttatccattcttattatttataagggattctacaccctgaagttattatggtaggatagtttgatatatgtttcttttggttctctagtagagaatcaaataaaaaactttagtgcccaacacatgagatttgtttggttgacgggacctatgaaaatggcatatctgtcaggctcattgcctaccagaattttgactgtt

SEQ ID NO: 61971 - protein, 290 aa, Triticum aestivum
  peptide (1)..(290): Ceres Seq. ID no. 12614848
PKFLLLPACCRESPPLHNNLRERARARRRPRSLAHQPTTRAMASTNGGFVSPLAAAVPVEAVLFDIDGTLCDSDPLHHIAFQELLLAIGYNNGVPIDDEFFINNIAGRSDAEAAQNLFPDWPLEKGLKFLEDKDVKYRSLAMERLEPVKGLHKVVQWVKDHGYKRAAVTNAPRINAELMIKLLGLSDFFQAVIVGGECEKPKPAPFPYLKALKELEVSAAHTFIFEDSASGTRAGVAAGMPVVAVSTRNPEKSLQEAGAALIISDYEDQKLWNALEEIDREEAKLKTGGA

SEQ ID NO: 61972 - protein, 249 aa, Triticum aestivum
  peptide (1)..(249): Ceres Seq. ID no. 12614849
MASTNGGFVSPLAAAVPVEAVLFDIDGTLCDSDPLHHIAFQELLLAIGYNNGVPIDDEFFINNIAGRSDAEAAQNLFPDWPLEKGLKFLEDKDVKYRSLAMERLEPVKGLHKVVQWVKDHGYKRAAVTNAPRINAELMIKLLGLSDFFQAVIVGGECEKPKPAPFPYLKALKELEVSAAHTFIFEDSASGTRAGVAAGMPVVAVSTRNPEKSLQEAGAALIISDYEDQKLWNALEEIDREEAKLKTGGA

SEQ ID NO: 61973 - protein, 149 aa, Triticum aestivum
  peptide (1)..(149): Ceres Seq. ID no. 12614850
MERLEPVKGLHKVVQWVKDHGYKRAAVTNAPRINAELMIKLLGLSDFFQAVIVGGECEKPKPAPFPYLKALKELEVSAAHTFIFEDSASGTRAGVAAGMPVVAVSTRNPEKSLQEAGAALIISDYEDQKLWNALEEIDREEAKLKTGGA

SEQ ID NO: 61974 - DNA, 1781 bp, Triticum aestivum
  misc_feature (1)..(1781): Ceres Seq. ID no. 14303615
tcactccgccactccggccccattcgacagagacatcaccggcagcaggttaataatggcgcttcgcgcggcggagctccggcgactcctcctcctccgcggcggggcggtcctcccgctcccgctcgcgtcgcgctgccggccggcgagcacggccgcccgtgacgacgagggagcagggggcaacgcctacgacgtgctcggggtgggagagacgagctcctccgcggagatcaaggcctccttccaccgcctcgccaaggagacccaccccgacgtcgctgccgccgccggttcccgacggttccttcagatcctcgcggcctacgagatcctatccgattcccagcgaagggcgcactatgatagcttcctgcgctcgcagaggctagttatacagaagcatcccaggccatcgcaatatgtatatccatatccatatagttcaggcattgtgatgcctagagaaagtaatgttgtcgagtggcttaaatggtacaggcttactgttgatgacattgttacaaaaaagagaatcgcgacgggttcaggttatttcgatagacttgagagtgaactgtactctgcagtccatgctgcatactatggccccgaggttgagtccatggatctccttcctgattgctttgaagccgaggagaggtctgtgtatgagacatctgagctattgcaccttgtatctggccgtgatctgcttggtattgtcagtctagtcgatagcgtccgagagcggtctgatgcttgtcgtgagaagctgacacattctggttctgcaacctgcggcgttagtccaaatgttgcagtaaacggggagaaatgttcaatacctaggcatgcagatattcacaagcaagagaatgaggatagtgacagtatcccatcagatgcctacaaggacattgaattgcagatatgtgagagagtagtggccactgcaaataggaggctcaagtgcaattgcattgacaattcagacatggaagatcacatacatgtatttcttgttccaaatgaggtggttgcacctgatgtgatgcaagagcatctcctccttggaacaatcactgggttagacaccagtggagaggaaggatcttgctgtgtctatgatggccatggaataaagacccatgtaattgttaagcacaggacactgatggttaaacacatgcactggtatcaatttggagatgaagtttcaccctgcgagtgtcgatgtagcagggctcggttgccacccagcaggttttggctttttgagccacggtgttatatgcatgacactggcggttggtacatcgagacatttgggagagacaagaaagggaggacaactccatcgccgagacattggcatggtgtcaatgaacattctgaaaaccatgctctttcatcatattctggcgtggcgcctggcgaagaaagtgaggtgccagtttaatggcatattaattttaccactagagcagtagacaacaggtggtggcacttgctggctgtgctatattcggcaagacaaggcaaagctggctgagctattattaacatcctaaggtagtatgccacttcgaaagtcattgcattctccgctgctataaaagtttggtttttagcatttctggagtgcctagggttaggtttatctatttcccttcccgcaaaaaaaaggtttatctgtttcccaaagtataatgagtttttttttcgacaaagggtggattcaaagtataatgagtacataaagtaatatgtctgatggc

SEQ ID NO: 61975 - protein, 486 aa, Triticum aestivum
  peptide (1)..(486): Ceres Seq. ID no. 14303616
HSATPAPFDRDITGSRLIMALRAAELRRLLLLRGGAVLPLPLASRCRPASTAARDDEGAGGNAYDVLGVGETSSSAEIKASFHRLAKETHPDVAAAAGSRRFLQILAAYEILSDSQRRAHYDSFLRSQRLVIQKHPRPSQYVYPYPYSSGIVMPRESNVVEWLKWYRLTVDDIVTKKRIATGSGYFDRLESELYSAVHAAYYGPEVESMDLLPDCFEAEERSVYETSELLHLVSGRDLLGIVSLVDSVRERSDACREKLTHSGSATCGVSPNVAVNGEKCSIPRHADIHKQENEDSDSIPSDAYKDIELQICERVVATANRRLKCNCIDNSDMEDHIHVFLVPNEVVAPDVMQEHLLLGTITGLDTSGEEGSCCVYDGHGIKTHVIVKHRTLMVKHMHWYQFGDEVSPCECRCSRARLPPSRFWLFEPRCYMHDTGGWYIETFGRDKKGRTTPSPRHWHGVNEHSENHALSSYSGVAPGEESEVPV

SEQ ID NO: 61976 - protein, 468 aa, Triticum aestivum
  peptide (1)..(468): Ceres Seq. ID no. 14303617
MALRAAELRRLLLLRGGAVLPLPLASRCRPASTAARDDEGAGGNAYDVLGVGETSSSAEIKASFHRLAKETHPDVAAAAGSRRFLQILAAYEILSDSQRRAHYDSFLRSQRLVIQKHPRPSQYVYPYPYSSGIVMPRESNVVEWLKWYRLTVDDIVTKKRIATGSGYFDRLESELYSAVHAAYYGPEVESMDLLPDCFEAEERSVYETSELLHLVSGRDLLGIVSLVDSVRERSDACREKLTHSGSATCGVSPNVAVNGEKCSIPRHADIHKQENEDSDSIPSDAYKDIELQICERVVATANRRLKCNCIDNSDMEDHIHVFLVPNEVVAPDVMQEHLLLGTITGLDTSGEEGSCCVYDGHGIKTHVIVKHRTLMVKHMHWYQFGDEVSPCECRCSRARLPPSRFWLFEPRCYMHDTGGWYIETFGRDKKGRTTPSPRHWHGVNEHSENHALSSYSGVAPGEESEVPV

SEQ ID NO: 61977 - protein, 334 aa, Triticum aestivum
  peptide (1)..(334): Ceres Seq. ID no. 14303618
MPRESNVVEWLKWYRLTVDDIVTKKRIATGSGYFDRLESELYSAVHAAYYGPEVESMDLLPDCFEAEERSVYETSELLHLVSGRDLLGIVSLVDSVRERSDACREKLTHSGSATCGVSPNVAVNGEKCSIPRHADIHKQENEDSDSIPSDAYKDIELQICERVVATANRRLKCNCIDNSDMEDHIHVFLVPNEVVAPDVMQEHLLLGTITGLDTSGEEGSCCVYDGHGIKTHVIVKHRTLMVKHMHWYQFGDEVSPCECRCSRARLPPSRFWLFEPRCYMHDTGGWYIETFGRDKKGRTTPSPRHWHGVNEHSENHALSSYSGVAPGEESEVPV

SEQ ID NO: 61978 - DNA, 1391 bp, Triticum aestivum
  misc_feature (1)..(1391): Ceres Seq. ID no. 13503476
accaaagcattagcacgctcctccacagcccactgctctgcctgtttgtggctttgccgtttcctgttccccactcatcgtcggcgatacaatcttctcgtggattgtctcgtggaggcgggagcgatggggcgtccgtgcgtcggcgctctcctggcgtgcgccgccgttgcagcttcttgctgcggctgcttccagttccagggtgctgctgcggcggcgaccccgtcgttcggggacaacttcgacatcaccggcgccgaggaccacgtcaagacctcccccgacggccagacctggtacctctccctcgacaacaagacgggcgttgggttccagacgaagcagaagtacctgttcgggtggttcagcatgaagctcaagctcgtcgggaacgactccgccggcgtcgtcaccgcctactacatgtgctcggacctggacgcggcgccggagcgcgacgagctggacttcgagttcctgggcaaccgcaccggcgagccgtacatcatccagacgaacgtgtaccgcagcggcgtaggcgggcgggagatgcggcactcgctgtggttcgaccccaccgccgagttccacagctactccatcctctggaaccccaagcagatcgtgtttttcgtggacaaggtgccgatcagggagtaccgcaactcggacaagcccaacaggttcttcccgatcatgaagcccatgtacgtcttctccagcatctggaacgccgacgactgggccacgcgcggggggctggagaagacggactggaccaaggggcccttcgtctcctcctacagcgacttcaccgccgacgcctgcgcctgggccaccggcccggccccgccggcgtgcgcggccgccacggggaacagctggtgggaccagccgccggcgtgggcgctcgacgacggccagcgccgggactcgggctgggtggccaggaacctcgtgatatacgactactgcgacgaccgcaagaggttcccggccgtgccggaggagtgcgcgctcaggaccaagactagctagtagctcctcatggatgggccgccctaggtctcgcttcacatgcatcgttcttttttgggggttcgatcgagtacgtggtgtggtgtagctatcaattggtggatggatttttttttcttttctcttctcttgttttgtgatgatgagatgcacatgcggacgtgcatgtgcacggtgatgcggcattgattgcccggggtggctgtgctctcatgtgagtgatagccctttcggaggaaaatgatgacatttttgttccgatgccttccatgctgcacgacacgagcatggatgggccaaaacttcatagaaatggtcccacgtatacgcatgataatcggcttcgactt

SEQ ID NO: 61979 - protein, 346 aa, Triticum aestivum
  peptide (1)..(346): Ceres Seq. ID no. 13503477
TKALARSSTAHCSACLWLCRFLFPTHRRRYNLLVDCLVEAGAMGRPCVGALLACAAVAASCCGCFQFQGAAAAATPSFGDNFDITGAEDHVKTSPDGQTWYLSLDNKTGVGFQTKQKYLFGWFSMKLKLVGNDSAGVVTAYYMCSDLDAAPERDELDFEFLGNRTGEPYIIQTNVYRSGVGGREMRHSLWFDPTAEFHSYSILWNPKQIVFFVDKVPIREYRNSDKPNRFFPIMKPMYVFSSIWNADDWATRGGLEKTDWTKGPFVSSYSDFTADACAWATGPAPPACAAATGNSWWDQPPAWALDDGQRRDSGWVARNLVIYDYCDDRKRFPAVPEECALRTKTS

SEQ ID NO: 61980 - protein, 344 aa, Triticum aestivum
  peptide (1)..(344): Ceres Seq. ID no. 13503478
QSISTLLHSPLLCLFVALPFPVPHSSSAIQSSRGLSRGGGSDGASVRRRSPGVRRRCSFLLRLLPVPGCCCGGDPVVRGQLRHHRRRGPRQDLPRRPDLVPLPRQQDGRWVPDEAEVPVRVVQHEAQARRERLRRRRHRLLHVLGPGRGAGARRAGLRVPGQPHRRAVHHPDERVPQRRRRAGDAALAVVRPHRRVPQLLHPLEPQADRVFRGQGADQGVPQLGQAQQVLPDHEAHVRLLQHLERRRLGHARGAGEDGLDQGALRLLLQRLHRRRLRLGHRPGPAGVRGRHGEQLVGPAAGVGARRRPAPGLGLGGQEPRDIRLLRRPQEVPGRAGGVRAQDQD

SEQ ID NO: 61981 - protein, 304 aa, Triticum aestivum
  peptide (1)..(304): Ceres Seq. ID no. 13503479
MGRPCVGALLACAAVAASCCGCFQFQGAAAAATPSFGDNFDITGAEDHVKTSPDGQTWYLSLDNKTGVGFQTKQKYLFGWFSMKLKLVGNDSAGVVTAYYMCSDLDAAPERDELDFEFLGNRTGEPYIIQTNVYRSGVGGREMRHSLWFDPTAEFHSYSILWNPKQIVFFVDKVPIREYRNSDKPNRFFPIMKPMYVFSSIWNADDWATRGGLEKTDWTKGPFVSSYSDFTADACAWATGPAPPACAAATGNSWWDQPPAWALDDGQRRDSGWVARNLVIYDYCDDRKRFPAVPEECALRTKTS

SEQ ID NO: 61982 - DNA, 1392 bp, Triticum aestivum
  misc_feature (1)..(1392): Ceres Seq. ID no. 13598294
ctagaacatcctaatcgaaaaacaatccacatcaaccttccagttcgtccgtaagcctcagcgccggaagtaccgcgatcgagcgagcgagtttcccgggcccacactgatggctctggttccctcgggctcaggcagcgcgccggtgatcgccgaggtggagatgaacggcggcgccgaccagagcgccaccaccgtgcgagccaccgtcgtgcaggcctccaccgtcttctacgacacccccgccactctcgataaagcagagagattaatagcagaggctgctggatatggttcacagttggtggtgttcccggaagcttttgttggtggttatcctcgtggatccacctttggatttgggatcagtattagtatcactaatccaaaagacaagggaaagggtgaattccagaagtattatgcagccgccatagacgtgcctggtccagaggtcacactcttagctgctatggctgggaaatataaggtctttctggtaatgggtgtgattgagagagaaggttacacactatattgttcagtgctcttctttgaccctctaggtcggtacctgggtaagcaccgcaagctcatgccgacggcattagaacggataatatggggatttggagatggatcaacaattcctgtttatgacactccacttggaaagattggagcccttatttgctgggaaaataagatgccactcttgaggacagcactgtatggtaaaggtattgagatatactgcgctcccacggccgattcaaggccagtgtggcaagcttccatgacacacatcgccatggaggggggatgctttgtgctgtcggcgaaccagttctgccgcagacaggactaccctccgccgtccgagtacgcctttgccggtttaggagaagagccttccccagacaccgtcgtttgccctggaggcagcgttatcatttcgccgtcaggcgaagtcctggcaggtcccaactacgacggagaggcgctgatcacagccgaccttgacatgggagagatcgtccgggccaagtttgattttgacgtggtgggccactactctcggcctgaggtgctgagcttggtggtggatgaccagccgcaccgcccggtgtccttcacctctgccgctgagaaggctccggctgccaagagcgacgacaccgcaaagccctgacgaccttcagctcagtcacaagcagttgatttctatcgatggttctcttttttgtgtgaactgcgaaaagatttctgtcgatagcttaataaagccgatgaaatgtaggctcgggtcgcccgcatgtctgaccgacgcccctgtaactttggctgcttgtaaaaaaaatgccttccggaacaatcagccgaggtccgttc

SEQ ID NO: 61983 - protein, 360 aa, Triticum aestivum
  peptide (1)..(360): Ceres Seq. ID no. 13598295
MALVPSGSGSAPVIAEVEMNGGADQSATTVRATVVQASTVFYDTPATLDKAERLIAEAAGYGSQLVVFPEAFVGGYPRGSTFGFGISISITNPKDKGKGEFQKYYAAAIDVPGPEVTLLAAMAGKYKVFLVMGVIEREGYTLYCSVLFFDPLGRYLGKHRKLMPTALERIIWGFGDGSTIPVYDTPLGKIGALICWENKMPLLRTALYGKGIEIYCAPTADSRPVWQASMTHIAMEGGCFVLSANQFCRRQDYPPPSEYAFAGLGEEPSPDTVVCPGGSVIISPSGEVLAGPNYDGEALITADLDMGEIVRAKFDFDVVGHYSRPEVLSLVVDDQPHRPVSFTSAAEKAPAAKSDDTAKP

SEQ ID NO: 61984 - protein, 342 aa, Triticum aestivum
  peptide (1)..(342): Ceres Seq. ID no. 13598296
MNGGADQSATTVRATVVQASTVFYDTPATLDKAERLIAEAAGYGSQLVVFPEAFVGGYPRGSTFGFGISISITNPKDKGKGEFQKYYAAAIDVPGPEVTLLAAMAGKYKVFLVMGVIEREGYTLYCSVLFFDPLGRYLGKHRKLMPTALERIIWGFGDGSTIPVYDTPLGKIGALICWENKMPLLRTALYGKGIEIYCAPTADSRPVWQASMTHIAMEGGCFVLSANQFCRRQDYPPPSEYAFAGLGEEPSPDTVVCPGGSVIISPSGEVLAGPNYDGEALITADLDMGEIVRAKFDFDVVGHYSRPEVLSLVVDDQPHRPVSFTSAAEKAPAAKSDDTAKP

SEQ ID NO: 61985 - protein, 239 aa, Triticum aestivum
  peptide (1)..(239): Ceres Seq. ID no. 13598297
MAGKYKVFLVMGVIEREGYTLYCSVLFFDPLGRYLGKHRKLMPTALERIIWGFGDGSTIPVYDTPLGKIGALICWENKMPLLRTALYGKGIEIYCAPTADSRPVWQASMTHIAMEGGCFVLSANQFCRRQDYPPPSEYAFAGLGEEPSPDTVVCPGGSVIISPSGEVLAGPNYDGEALITADLDMGEIVRAKFDFDVVGHYSRPEVLSLVVDDQPHRPVSFTSAAEKAPAAKSDDTAKP

SEQ ID NO: 61986 - DNA, 1255 bp, Triticum aestivum
  misc_feature (1)..(1255): Ceres Seq. ID no. 12614972
cgaaaaagcctgctctcacttgattgagcacactacacttttctgctcgcgcgcgacgccgcgtgcggacagtcagtctgtttccatccatctccaatggccgccatcgccaccaagtggacttccggccctgttccgttcacggacgtcgacgacggcacggtgccgaagcggccagccaaggaggagttcgggagcctcgtggcagcgctgccgcgcaagaatcaggccggcctggagctgcgcctgtaccagggcttctggctgccggaccactgggtggcgggcaccgtcgtcttccagcggcgcttcgtcccacgcgccgacgacgtgatcctcgccagctaccccaagtgcggcaccacgtggctcaaggcgctggccttcgccaccatgacgcgcgacgcgtacccggcgccggcgcagcacccgctcctccgcctcaacccgcacgactgcatcccgttcctggacgagatcttcgcggacgggcaggaggccaagctggagaggctcccgtcgccgcgcctcatgaacacgcacatgccgcacaccctgctccccgagtcggtcaccggcgcggacgtcgccggctgtaaggtcgtgtacgtctgcagggaccccaaggacatggtcgtgtcgctgtggcacttcctccggcgccggcagccggacctcccgttcgcggagctgttcgagcacgtctgcgacggcgccgtggccgtcggcccgatctgggaccacgtgctcagctactggcgcgcgagcctcgcgcggcctgacagggtgctcttcctcaggtacgaagacctgctgctggacacgggcaagcacgtgaggcggctggcggagttcatgggccggccgttctcgcccgccgaggagggcgccggcgccgtggaggcggtggtggagctgtgcagcttcgagaagatgaaggggctggaggtgaacaagaagggatcggcgggggcgtaccacgccatgccccgggactctttcttcaggaaaggggtcgccggcgactgggtgaaccacatgacgccggagatggcgacgcggctggatgaggtcgtccgtgacaagttccgcggcacggggctcgcggctccgtgatctggacaatctgcatgcgtgattcgattgtactgtatgcttggctgctggtgcccgttgatttagaataaagatgctgttctcggcacaatcactgcttacatcatcgaataaaggtttaactacgattgtcgattgc

SEQ ID NO: 61987 - protein, 339 aa, Triticum aestivum
  peptide (1)..(339): Ceres Seq. ID no. 12614973
MAAIATKWTSGPVPFTDVDDGTVPKRPAKEEFGSLVAALPRKNQAGLELRLYQGFWLPDHWVAGTVVFQRRFVPRADDVILASYPKCGTTWLKALAFATMTRDAYPAPAQHPLLRLNPHDCIPFLDEIFADGQEAKLERLPSPRLMNTHMPHTLLPESVTGADVAGCKVVYVCRDPKDMVVSLWHFLRRRQPDLPFAELFEHVCDGAVAVGPIWDHVLSYWRASLARPDRVLFLRYEDLLLDTGKHVRRLAEFMGRPFSPAEEGAGAVEAVVELCSFEKMKGLEVNKKGSAGAYHAMPRDSFFRKGVAGDWVNHMTPEMATRLDEVVRDKFRGTGLAAP

SEQ ID NO: 61988 - protein, 240 aa, Triticum aestivum
  peptide (1)..(240): Ceres Seq. ID no. 12614974
MTRDAYPAPAQHPLLRLNPHDCIPFLDEIFADGQEAKLERLPSPRLMNTHMPHTLLPESVTGADVAGCKVVYVCRDPKDMVVSLWHFLRRRQPDLPFAELFEHVCDGAVAVGPIWDHVLSYWRASLARPDRVLFLRYEDLLLDTGKHVRRLAEFMGRPFSPAEEGAGAVEAVVELCSFEKMKGLEVNKKGSAGAYHAMPRDSFFRKGVAGDWVNHMTPEMATRLDEVVRDKFRGTGLAAP

SEQ ID NO: 61989 - protein, 194 aa, Triticum aestivum
  peptide (1)..(194): Ceres Seq. ID no. 12614975
MNTHMPHTLLPESVTGADVAGCKVVYVCRDPKDMVVSLWHFLRRRQPDLPFAELFEHVCDGAVAVGPIWDHVLSYWRASLARPDRVLFLRYEDLLLDTGKHVRRLAEFMGRPFSPAEEGAGAVEAVVELCSFEKMKGLEVNKKGSAGAYHAMPRDSFFRKGVAGDWVNHMTPEMATRLDEVVRDKFRGTGLAAP

SEQ ID NO: 61990 - DNA, 1728 bp, Triticum aestivum
  misc_feature (1)..(1728): Ceres Seq. ID no. 13596013
attacctagagcatcctaatcgaaaaattgtcgattcccctcaaccctagccgccagcggcggccagattttgctagtaacaagtgcttattagcttcacctccccctccagctgccgccgcctgccatctccggcgacgagcagggcggagaaggagaactagccatggcctcggtggcgccggaggttgagaagaaggaggaggaggagcaggtggtgaacccgtgggaggtgtcggcggggaagggcggcatcgactacgacaagctggtcgaccagttcggctgccagcgcctggacgccccgctcatcgaccgcatcgcgcgactcaccggccgccccccgcaccgcttcctccgccgcggcctcttcttcgcccaccgggatttgaacgagatactggacatctacgagaagggggacaagttctacctctacacggggagagggccctcctcagaggcgttgcatctcggacacctcgtccccttcatgttcaccaaatatttgcaggatgctttcaaggttcctctggtgatacagctaactgatgatgagaagttcctgtggaaaaatttgacggtagaggaaagtaaaaggcttgcgcgtgaaaatgcaaaagacattatagcatgcggatttgatgttgaaaggacttttatattctctgattttaattttgttggcggtgccttttacgaaaacatggttaaagtggccagatgtgtgacatataataaagttgtcggaatatttggattcactccagaggatcacattggaaagattagctttcctcctgtgcaagcagttccatcattcccttcttcatttcccaaacacttttctggcaatgaccaactacggtgcctgataccttgtgcaatagaccaggatccttatttcaggatgacccgtgatgttgctccaagaattggttaccagaagccagcactgattgagtcaagatttttccctgcccttcagggggagaacacgaaaatgtcagctagtgatccaaattctgctatatatgtgaccgatagtactaaatatataaagacaaaggtgaataaatatgcattctcaggtggccaggactctgtagaacttcatagaaaacttggagctaaccttgaggttgatgtctcaattaagtacctgaacttcttccttgaagacgatgatgagctcgagcgcataaagaaggcgtacaaggaaggaaggatgctgacgggtgaagtgaagcagcttctggttacggttctttctgagatggttgaaaggcacaaaagagctagagctcgagttaccgaggagatggtcgacgccttcatggctgtgaggcctcttcccaacatgtttggctgagcattgggtgggaagttcataccctttctgtgtggattttattgaattccaggagcaacatatgaagtttcaggatttagttgtaactattaatgtcaacctggccgctcaatcctgtatggcagccactgattttgcaaaatcagcatgtgatatgtttgttttcaagcttgctcgatcactgcaaagatttctatttattggaattagggaacacacacgtgttttttttgaaaccgaggcaaaagatttgcctcgtatattaattaagaggggagagagtacaacacatggcagttacaactttgcttgtcagattgggacatacaacgtaaaaagactactctcgcggcatc

SEQ ID NO: 61991 - protein, 401 aa, Triticum aestivum
  peptide (1)..(401): Ceres Seq. ID no. 13596014
MASVAPEVEKKEEEEQVVNPWEVSAGKGGIDYDKLVDQFGCQRLDAPLIDRIARLTGRPPHRFLRRGLFFAHRDLNEILDIYEKGDKFYLYTGRGPSSEALHLGHLVPFMFTKYLQDAFKVPLVIQLTDDEKFLWKNLTVEESKRLARENAKDIIACGFDVERTFIFSDFNFVGGAFYENMVKVARCVTYNKVVGIFGFTPEDHIGKISFPPVQAVPSFPSSFPKHFSGNDQLRCLIPCAIDQDPYFRMTRDVAPRIGYQKPALIESRFFPALQGENTKMSASDPNSAIYVTDSTKYIKTKVNKYAFSGGQDSVELHRKLGANLEVDVSIKYLNFFLEDDDELERIKKAYKEGRMLTGEVKQLLVTVLSEMVERHKRARARVTEEMVDAFMAVRPLPNMFG

SEQ ID NO: 61992 - protein, 292 aa, Triticum aestivum
  peptide (1)..(292): Ceres Seq. ID no. 13596015
MFTKYLQDAFKVPLVIQLTDDEKFLWKNLTVEESKRLARENAKDIIACGFDVERTFIFSDFNFVGGAFYENMVKVARCVTYNKVVGIFGFTPEDHIGKISFPPVQAVPSFPSSFPKHFSGNDQLRCLIPCAIDQDPYFRMTRDVAPRIGYQKPALIESRFFPALQGENTKMSASDPNSAIYVTDSTKYIKTKVNKYAFSGGQDSVELHRKLGANLEVDVSIKYLNFFLEDDDELERIKKAYKEGRMLTGEVKQLLVTVLSEMVERHKRARARVTEEMVDAFMAVRPLPNMFG

SEQ ID NO: 61993 - protein, 221 aa, Triticum aestivum
  peptide (1)..(221): Ceres Seq. ID no. 13596016
MVKVARCVTYNKVVGIFGFTPEDHIGKISFPPVQAVPSFPSSFPKHFSGNDQLRCLIPCAIDQDPYFRMTRDVAPRIGYQKPALIESRFFPALQGENTKMSASDPNSAIYVTDSTKYIKTKVNKYAFSGGQDSVELHRKLGANLEVDVSIKYLNFFLEDDDELERIKKAYKEGRMLTGEVKQLLVTVLSEMVERHKRARARVTEEMVDAFMAVRPLPNMFG

SEQ ID NO: 61994 - DNA, 1122 bp, Triticum aestivum
  misc_feature (1)..(1122): Ceres Seq. ID no. 14301614
gaaatccccggcttaaacccacgccttcccttcctccccccgcctccgactgcgtccaagaaacccaatcccattcccacctgctgcggctgctccgggatcgaggcgcgcggcggcgatggcgatcgagaagaaggggatgtcggcgtacgaggcggagcgggagaggacggtggaggagaacaagcgcaagatggaggcgctcaacctgcgccacctctccgccgccgtcgccacctacgcccccaagaccccctcccccatgaagcacaagaggcgcaggatcatcgaggcggcgacccccgtcccgtcgccgcccaggaggtcccgccggctcgcccacctccccgaggtcaagtacgccgacgcctgcgcggaggtgggagaagatagtgagagagcgggaaggtggtctcctagaagacgaagtggcagcatctacttagcaggaggtggaggtggaccaatttccatgaaagctaggatggaggcagcaagcaaagcagaggagttagaatcacaacttgaccctgaatttccatccttcatgaagcggatgctacattcacatgtggtgcgagggttctggttgggtctcccaagccatttctgtgacacgtacctgccaaagaatgactgcactatcactttggtggatgagaaagatgaagagttcgagtccaaataccttgcctacaagaaggggctaagtggtggctgggctggttttgctctggatcatgtgattcgggatggagactcgacggtctttcagctgatcaagcctacaaccttcaaggtgcatatcatccgagctgctgttggtgatgatgacaacgaggaaatggagtgagcacaccgtgcagcttcactgctaagaactaacctatcagtggtagatggactagttaggagttgggtatggtttaagctttatctatctggatcgctggtgcggttatgcattttgttggtatgtccaccagtggcttacaagatggcaagtaggatttggggcgtggtgtaggcttttgtgtatcaggattacccgcgcagctatgtactaatatgttcccatgtccaccaatactgataatgagatcagatggcaagtaatcagcc

SEQ ID NO: 61995 - protein, 244 aa, Triticum aestivum
  peptide (1)..(244): Ceres Seq. ID no. 14301615
MAIEKKGMSAYEAERERTVEENKRKMEALNLRHLSAAVATYAPKTPSPMKHKRRRIIEAATPVPSPPRRSRRLAHLPEVKYADACAEVGEDSERAGRWSPRRRSGSIYLAGGGGGPISMKARMEAASKAEELESQLDPEFPSFMKRMLHSHVVRGFWLGLPSHFCDTYLPKNDCTITLVDEKDEEFESKYLAYKKGLSGGWAGFALDHVIRDGDSTVFQLIKPTTFKVHIIRAAVGDDDNEEME

SEQ ID NO: 61996 - protein, 237 aa, Triticum aestivum
  peptide (1)..(237): Ceres Seq. ID no. 14301616
MSAYEAERERTVEENKRKMEALNLRHLSAAVATYAPKTPSPMKHKRRRIIEAATPVPSPPRRSRRLAHLPEVKYADACAEVGEDSERAGRWSPRRRSGSIYLAGGGGGPISMKARMEAASKAEELESQLDPEFPSFMKRMLHSHVVRGFWLGLPSHFCDTYLPKNDCTITLVDEKDEEFESKYLAYKKGLSGGWAGFALDHVIRDGDSTVFQLIKPTTFKVHIIRAAVGDDDNEEME

SEQ ID NO: 61997 - protein, 219 aa, Triticum aestivum
  peptide (1)..(219): Ceres Seq. ID no. 14301617
MEALNLRHLSAAVATYAPKTPSPMKHKRRRIIEAATPVPSPPRRSRRLAHLPEVKYADACAEVGEDSERAGRWSPRRRSGSIYLAGGGGGPISMKARMEAASKAEELESQLDPEFPSFMKRMLHSHVVRGFWLGLPSHFCDTYLPKNDCTITLVDEKDEEFESKYLAYKKGLSGGWAGFALDHVIRDGDSTVFQLIKPTTFKVHIIRAAVGDDDNEEME

SEQ ID NO: 61998 - DNA, 1004 bp, Triticum aestivum
  misc_feature (1)..(1004): Ceres Seq. ID no. 13654659
ctgtcctcgttgtcattattgatcttcgtcttggtcgccctcccttcgcctgcgctcgcgcagcagcaacccgccgctccctccggctggccgtcgtccgtcccgctcccggcgcccgcaaattcttcctcccccctcgacatggcgtcctgcccttcggtcaagaacatcctcgtgctggacgcggaggggaagcgcgtggccgtcaagtactatgccgatgactggccctccgcgtcctccaagctggctttcgagaagtcgctcttcgtgaagacccagaagaccagcgccagagcagaggctgatgtggtaatgttcgatggctacatcattgtgtacaagttcatccaagatctccatttttttgtaactggaggagatgaggagaatgagctcattttagcgtcagttcttcagggattttctgatgctgttggcattcttctcagaaacaatgtagacaaaaggaccgcacttgaaaatctggatctcatctttttgtgccttgacgaagttgttgatggagggattgttctggaaacagatggaaatgtgatagccgagaaggtgtcaggccatggattggaaggagctgggtcgttcactgagcagacgataagccaagccctagcgacagcaagagagcacttcgcgaggtctcttctgaagtagtgtgtgtaggcatctttcgggttggcgatgcgcccagcattgaactcgtgtgtttcctcttgtagcacagtgcacctagtttgcaagaaagaaagaaagagcgagaaaatgacttgaatctttgcacgtgagttcgttcgttcgtctattgttgtggtgctcgtcgacattttgtcgcagagatgtactccctccgttcgaaattacttgtcttgaaaatggatgtatctagaactaaaattccgaacggagggagtatgtgcggcctaagtgcctaactggttaccagattcccttctaaggtctgtataagaaacttgtgatggtgc

SEQ ID NO: 61999 - protein, 224 aa, Triticum aestivum
  peptide (1)..(224): Ceres Seq. ID no. 13654660
LSSLSLLIFVLVALPSPALAQQQPAAPSGWPSSVPLPAPANSSSPLDMASCPSVKNILVLDAEGKRVAVKYYADDWPSASSKLAFEKSLFVKTQKTSARAEADVVMFDGYIIVYKFIQDLHFFVTGGDEENELILASVLQGFSDAVGILLRNNVDKRTALENLDLIFLCLDEVVDGGIVLETDGNVIAEKVSGHGLEGAGSFTEQTISQALATAREHFARSLLK

SEQ ID NO: 62000 - protein, 177 aa, Triticum aestivum
  peptide (1)..(177): Ceres Seq. ID no. 13654661
MASCPSVKNILVLDAEGKRVAVKYYADDWPSASSKLAFEKSLFVKTQKTSARAEADVVMFDGYIIVYKFIQDLHFFVTGGDEENELILASVLQGFSDAVGILLRNNVDKRTALENLDLIFLCLDEVVDGGIVLETDGNVIAEKVSGHGLEGAGSFTEQTISQALATAREHFARSLLK

SEQ ID NO: 62001 - protein, 119 aa, Triticum aestivum
  peptide (1)..(119): Ceres Seq. ID no. 13654662
MFDGYIIVYKFIQDLHFFVTGGDEENELILASVLQGFSDAVGILLRNNVDKRTALENLDLIFLCLDEVVDGGIVLETDGNVIAEKVSGHGLEGAGSFTEQTISQALATAREHFARSLLK

SEQ ID NO: 62002 - DNA, 1299 bp, Triticum aestivum
  misc_feature (1)..(1299): Ceres Seq. ID no. 13662173
attcattcattctccctcccctccttccttcctacctaatcctagaggagcatagctagggttcctccccgcagccgtcgcctcctctcctctcctcaccccgccgccgccggccaacgagatccagccagcgagatccgaccgacgccgtctccgtctccgtctccgcctcgccgccgccgcctgcttcggcatgtcgcattccaacgaagtaaggtacaccgcgcgctccatcacgcctccggcagacagggacagcggctccaagtcgcccccaccacggaggcgcgcggcttccaagtcgcctcccctgcctccccctccccctttccctcccaagggggtgcgcaccatctcgaggtcgcctccacctagtagtagaagacgcagcgtctcgaggtcccctccaccaaagaggcgcggcaggtccaggtccaggtccaggtccaggaacaggagccgctccaggagcagagacaaagacgatgtgaggaatcctggcaacaacctctatgtcactggactgtccacacggacgcaggaaactgacctggagaagttcttcagcaaagagggcaaggttaaagactgccgtgtcgttatcgatcctcgtacgaaagaatcacgtggctttgcgttcgtgaccatggagaatgttgaggatgcaaggcgctgcatcaagtacctgcaccgtactgtacttgaaggccgcctcatcagtgtggcaaaggcaaagagaactcgtgagaggacccctacccctggagaatactgtggtccgagaggcgggcgctcccgggtggagccgcggcggagccgttctccacgccgttccagcaggtcgtcgagggaccggtcaaggtcgccggccgcaaggagggacagggacagcagggacaggaagcgcgactgaatgaaacaaggcaaggggagaaacaaaatgatgctaaaatcacatatcgccgcgagttgtcgagtatgaatgtgtcttggattctttgttgctgaatgaatgtttgtttgatgaaggaggactctagtcagtatttctgctggatgctttctttagataagcagctgatttgtcttgtctttctgttttatcagaggagaggatttccctaacattcatttctttttaggttttgtgttgtgtatggacgatgaaggcgcatttcgtgtttttaaggtttctcgctatcgaatcggatgcgtctatttggttgtatgagcacctttgtcttgtcttggctggatgctaacattattattattattattatgtctgtgatggtatgc

SEQ ID NO: 62003 - protein, 239 aa, Triticum aestivum
  peptide (1)..(239): Ceres Seq. ID no. 13662174
MSHSNEVRYTARSITPPADRDSGSKSPPPRRRAASKSPPLPPPPPFPPKGVRTISRSPPPSSRRRSVSRSPPPKRRGRSRSRSRSRNRSRSRSRDKDDVRNPGNNLYVTGLSTRTQETDLEKFFSKEGKVKDCRVVIDPRTKESRGFAFVTMENVEDARRCIKYLHRTVLEGRLISVAKAKRTRERTPTPGEYCGPRGGRSRVEPRRSRSPRRSSRSSRDRSRSPAARRDRDSRDRKRD

SEQ ID NO: 62004 - DNA, 1610 bp, Triticum aestivum
  misc_feature (1)..(1610): Ceres Seq. ID no. 13596509
ataatctaatcaccaaataaaactagtactactcctcggagcagcagcactgcagcagtggtggtattaattaatcgaacccatcccagcggagaagaagaaaagaagaaggctctccttctcctttaagcttcgaatcatccttccttcccccctccccctccctccctcccacttcatctctccgcgacgaagcttccaaaacccccaaaaggatcccccaatcttcgcctctgcctccggcccgatcaagctctcagcagcggctgccgcgcggctcggcccgggatccatggagaggtacgagctgctcaaggacatcggcgccggcaacttcggcgtcgcgcggctgatgcgcaacaaggagaccaaggagctcgtcgccatgaagtacatcccacggggcctcaagattgacgagaatgtggcgagggagatcataaaccaccggtcgctgcggcaccccaacataatccgattcaaggaggtggtggtcacgccgacgcacctggcgattgtgatggagtacgcggcgggcggcgagctcttcgaccggatctgcaacgccgggaggttcagcgaggacgaggccaggtacttcttccagcagctcatctgcggcgtgagttactgccacttcatgcaaatttgccaccgggacctgaagctggagaacactctgctggacggcagcccggcgccccgcctcaagatctgcgacttcggttattcaaagtcgtcgttgctgcactcgaagcccaagtcgacggtcggcacgccggcgtacatcgccccggaggtgctctcccgccgggaatacgacggcaagacagccgatgtgtggtcttgtggagtgaccctttatgtgatgctagtcggcggttacccttttgaggatcctgatgaccccaagaacttcagaaagaccattgggagaataatgtcaatccaatacaaaataccggagtatgtccacgtatcccaagactgcaagcaactccttgccagtatttttgtcgcaaaccctgcaaagagaataacaatgagggagatcaggaaccacccttggttcttgaagaacttaccaagagagctcacggaagctgcccaagcaatgtactacaagagagacaacagcgccccgacctactcggtccagtccgtggaggggatcatgaagatcgtggaggaggcgcagaaaccgcctccttccaccactccggtggcgggtttcgggtgggcggaggaggacgagcaggaggatggcaagaagccagaggaggaagcggaggaggaagacgaagaaaatgagtatgagaagcagttgaatgaggtccgtgccagcggcgagttccacatcagctagctgatgggggtgcttcactggcgtgagaaggccacagaccggggataaaatttgtcatatagtttgtagtttgtgttttgttctcgagtttttctcttcattctcgtctccggttctgcaacagtgtaaattaccaaagtggttccgtcgctgtctttacaatgactgattaagctagcattgcggaaacataatgtatggaataaatcatcttattgagcatgttcttacaaaaaaaaaaaaa

SEQ ID NO: 62005 - protein, 357 aa, Triticum aestivum
  peptide (1)..(357): Ceres Seq. ID no. 15221902
MERYELLKDIGAGNFGVARLMRNKETKELVAMKYIPRGLKIDENVAREIINHRSLRHPNIIRFKEVVVTPTHLAIVMEYAAGGELFDRICNAGRFSEDEARYFFQQLICGVSYCHFMQICHRDLKLENTLLDGSPAPRLKICDFGYSKSSLLHSKPKSTVGTPAYIAPEVLSRREYDGKTADVWSCGVTLYVMLVGGYPFEDPDDPKNFRKTIGRIMSIQYKIPEYVHVSQDCKQLLASIFVANPAKRITMREIRNHPWFLKNLPRELTEAAQAMYYKRDNSAPTYSVQSVEGIMKIVEEAQKPPPSTTPVAGFGWAEEDEQEDGKKPEEEAEEEDEENEYEKQLNEVRASGEFHIS

SEQ ID NO: 62006 - protein, 337 aa, Triticum aestivum
  peptide (1)..(337): Ceres Seq. ID no. 15221903
MRNKETKELVAMKYIPRGLKIDENVAREIINHRSLRHPNIIRFKEVVVTPTHLAIVMEYAAGGELFDRICNAGRFSEDEARYFFQQLICGVSYCHFMQICHRDLKLENTLLDGSPAPRLKICDFGYSKSSLLHSKPKSTVGTPAYIAPEVLSRREYDGKTADVWSCGVTLYVMLVGGYPFEDPDDPKNFRKTIGRIMSIQYKIPEYVHVSQDCKQLLASIFVANPAKRITMREIRNHPWFLKNLPRELTEAAQAMYYKRDNSAPTYSVQSVEGIMKIVEEAQKPPPSTTPVAGFGWAEEDEQEDGKKPEEEAEEEDEENEYEKQLNEVRASGEFHIS

SEQ ID NO: 62007 - protein, 326 aa, Triticum aestivum
  peptide (1)..(326): Ceres Seq. ID no. 15221904
MKYIPRGLKIDENVAREIINHRSLRHPNIIRFKEVVVTPTHLAIVMEYAAGGELFDRICNAGRFSEDEARYFFQQLICGVSYCHFMQICHRDLKLENTLLDGSPAPRLKICDFGYSKSSLLHSKPKSTVGTPAYIAPEVLSRREYDGKTADVWSCGVTLYVMLVGGYPFEDPDDPKNFRKTIGRIMSIQYKIPEYVHVSQDCKQLLASIFVANPAKRITMREIRNHPWFLKNLPRELTEAAQAMYYKRDNSAPTYSVQSVEGIMKIVEEAQKPPPSTTPVAGFGWAEEDEQEDGKKPEEEAEEEDEENEYEKQLNEVRASGEFHIS

SEQ ID NO: 62008 - DNA, 759 bp, Triticum aestivum
  misc_feature (1)..(759): Ceres Seq. ID no. 12584578
gccagcgctgtacgagccgggcagccacacgcggatccagcgcgggttcggagtcgccctcgcctccgcccgcgaaccagctccgacgcctcaacctcggctcctcgtcgcagctcgccgtcttccacgccaaggtcgacgagatctcgctcctcgccgtcagcaccgccacagtccacaggcgtcagccccacgagcgctatatttttagatgaagcacatattcaagatcatcgcggtactggcggcaatctccgccgtctgggttgcgctccttgaaacctcgacagtccctcgcagttttacttggttgcttcccatctacttggtagtggcgcttggatgctatggcctttttatggttggatatgggctcatgttcttcccaacctgccctcaagaagtggtattactacagcaggatatcatggaggcaaaggatttcctatcaaaaagaggtgttgatgtgagctctgattgaggtcaataccaatgatttatgtttcgtgaccagtttgaagcttcctggatactggatagaaaaaattatgacatttcactgtgtctagatatttgttactaatgcagtctttgtgagtggcgtgttacagttctacattttgttagttcagtggatggtttgtcaggatattagttatgtcaggaaaacagtgtgagaatagctaaatagctaattaatggtttgttaacaagtccatcaatgttcagacatgtttgctatttaacaatctggttttc

SEQ ID NO: 62009 - protein, 92 aa, Triticum aestivum
  peptide (1)..(92): Ceres Seq. ID no. 12584579
ASAVRAGQPHADPARVRSRPRLRPRTSSDASTSAPRRSSPSSTPRSTRSRSSPSAPPQSTGVSPTSAIFLDEAHIQDHRGTGGNLRRLGCAP

SEQ ID NO: 62010 - protein, 89 aa, Triticum aestivum
  peptide (1)..(89): Ceres Seq. ID no. 12584580
MKHIFKIIAVLAAISAVWVALLETSTVPRSFTWLLPIYLVVALGCYGLFMVGYGLMFFPTCPQEVVLLQQDIMEAKDFLSKRGVDVSSD

SEQ ID NO: 62011 - protein, 70 aa, Triticum aestivum
  peptide (1)..(70): Ceres Seq. ID no. 12584581
QRCTSRAATRGSSAGSESPSPPPANQLRRLNLGSSSQLAVFHAKVDEISLLAVSTATVHRRQPHERYIFR

SEQ ID NO: 62012 - DNA, 1138 bp, Triticum aestivum
  misc_feature (1)..(1138): Ceres Seq. ID no. 13596017
gtcaataagtttttctccgccattttccccgtcctccgcgagaagcgcctcgaggtccccgtgtgcggctagctagatcggtggcgcctcccctccctcctcccccgcggaaggcgctcgcccccttcattcccggaaccgattctcgcaagggattcctcgctgctcggctcttcttgaggcatgcagagccagatcgtgtgccatgggtgcaggagcgttctactctaccccagaggggcccccagcgtgtgctgcgccgtgtgccacgccgtcaccagcgcgccgcctccaggaatggagatggctcagcttatatgcgtcggctgtcgaactttattgatgtatactcgcaatgcaactactgtcagatgctcatgttgtgatacagtcaaccttgccagaccagcaccgccagtgaatagtatagctcatgtgaactgtggccagtgccagacggtgttaatgtatccatacggagcatcttctgtcaaatgtgctatctgcaattttattacgaacatcggaatgaacaccgtgagacctttgccacctacaatgcatgcaccaaacggaatttcatatagtgtcccatcgacctctgcgccatccgctcaatcgcagaatgtaacggtggtcgtcgaaaacccaatgacagtagatgacaagggaaaattggtgagcaacgtcgtagtcggggttacgtccggcgggaaaaagtagcaaaacatgtcagcgcttgtaccaagtgatgccctgttctgtgtcttataatctggagttgggaacactttgtattatactcgtgtctggtgatcgaccgatcggtcgcatagaagaaaaccccgaagcgcgtaaacggactgcgccaacaaaaaaagagagtgcgggtgtggataatacggaaaaaaactgtattttgcttaccccctagattcttttgtatgtaaaatgtgggcactgtcagacctcactgcgtgatcaaatcctctctgtcctgtcctgtgtcctgtcctggaggggcctctcgttctggatgaataacagcaaataactttgcatatggctggccccacctgtcaatgattggtaattaaacgactgtaattattgtgatgaataattctttgaaggctgt

SEQ ID NO: 62013 - protein, 179 aa, Triticum aestivum
  peptide (1)..(179): Ceres Seq. ID no. 13596018
MQSQIVCHGCRSVLLYPRGAPSVCCAVCHAVTSAPPPGMEMAQLICVGCRTLLMYTRNATTVRCSCCDTVNLARPAPPVNSIAHVNCGQCQTVLMYPYGASSVKCAICNFITNIGMNTVRPLPPTMHAPNGISYSVPSTSAPSAQSQNVTVVVENPMTVDDKGKLVSNVVVGVTSGGKK

SEQ ID NO: 62014 - protein, 141 aa, Triticum aestivum
  peptide (1)..(141): Ceres Seq. ID no. 13596019
MEMAQLICVGCRTLLMYTRNATTVRCSCCDTVNLARPAPPVNSIAHVNCGQCQTVLMYPYGASSVKCAICNFITNIGMNTVRPLPPTMHAPNGISYSVPSTSAPSAQSQNVTVVVENPMTVDDKGKLVSNVVVGVTSGGKK

SEQ ID NO: 62015 - protein, 139 aa, Triticum aestivum
  peptide (1)..(139): Ceres Seq. ID no. 13596020
MAQLICVGCRTLLMYTRNATTVRCSCCDTVNLARPAPPVNSIAHVNCGQCQTVLMYPYGASSVKCAICNFITNIGMNTVRPLPPTMHAPNGISYSVPSTSAPSAQSQNVTVVVENPMTVDDKGKLVSNVVVGVTSGGKK

SEQ ID NO: 62016 - DNA, 1906 bp, Triticum aestivum
  misc_feature (1)..(1906): Ceres Seq. ID no. 15179739
ccccgccgcctcgtccacctgtcgccggcgcgccgccactgccaccgccagcgagattgcgacctgagaggtcccgcgtcgtcgtgctgttcccggctctaccttcgccgcggccaccatgatctgtgcaatctccggcgaggtgccggatgagccggtggtatcaaagaggtcggggctcctctttgagcggcggctcatcgagcgctacattgaggaccatggaaagtgtccagttacgaaggaggaactctccatggacgacatcgtgctggtgaagaccaacaaggtcgtgaggcccaggcctctgcaggctgcaagcattcccggactccttggaatctttcaaaacgagtgggatgctcttatgctttctaattttgctttggagcagcagcttcacacagcaagacaagaacttagtcatgcgttataccagcatgatgctgcctgccgtgttatagccagattaaagaaggaaagagatgagtctagagcacttttggctctagctgagagacagattcccgcttcgatggcaggagttgcacctgcagctgttgtttccaatggaaaaagagcaatggaggatgaaattggccctgatgggaagaagatacgccctggtatcaatcctgtcatgatcgatgaactaacagagtgtaataccatgctttctgcccagcgtaagaaacgacaggtaccaccaagtttggcatcaattgatgaactggagagatatactcagatctctagtcatccactccacaagacaaacaagccgggcattttgtctatggatatccatccgtcaaaggacatagttgcaactgggggtattgatacgaatgcagtgctatttgataggacatctggtcaaatcctgtgtacacttgctggtcactccaagaagataaccactttgaaatttgttccacgggatgagctcgtggtaactggatcagcagataagactgttcggatttggcaagggggtgaggagggaaactatagttgcatccatactttgaaagatcataccgctgaggtcgaagctgttactgtgcatgcgactcagaagtactttgtgaccgcggccaaggataatacttggtgcttctatgatatttcaactgggtcttgcctctcacaggttggcgaggcttcaggacaagagggatatacatctgcgtctttccacccagatggtcttatccttggaacaggaactactgaagctgttgtcaaaatttgggatgtgaaaactcagtccaatgttgcaaagtttgaggggcatgctggacctgtcactgctatgtccttctctgaaaatggttacttcctggcgactgctgctcttgatggtgtcaagctttgggatctaaggaaattgagaaattttaggactttctcgccatatgattcggatacgccgacaaattctgtggaatttgattttagcggtacctatcttgctgttgctggttcagatataagggtttaccaagtagccaacgtcaagacggaatggaatcttatcaagaccttgccagatttgtcaggaacagggaaagtgacctctgcgaagtttggcactgatgccaaatatatcgccgtcggctctatggaccgtaacctgaggatatttgggcctcctggagatgatcaaatggatgatgatgcaaaaccatcggccgagtgaggaaatgcagtgtacctggttttacttgtttgatgctccctgtgctctcttttggcagtgaatggatgggttgcgtatgaggaaaagcagggtcctcagggagcaatggcgtgggcgtccgccgatgtaaagacattattgtattgtaggcttcactaattttctaatgaggatataatttgttttgaagaggaatacaatccc

SEQ ID NO: 62017 - protein, 527 aa, Triticum aestivum
  peptide (1)..(527): Ceres Seq. ID no. 15179740
MICAISGEVPDEPVVSKRSGLLFERRLIERYIEDHGKCPVTKEELSMDDIVLVKTNKVVRPRPLQAASIPGLLGIFQNEWDALMLSNFALEQQLHTARQELSHALYQHDAACRVIARLKKERDESRALLALAERQIPASMAGVAPAAVVSNGKRAMEDEIGPDGKKIRPGINPVMIDELTECNTMLSAQRKKRQVPPSLASIDELERYTQISSHPLHKTNKPGILSMDIHPSKDIVATGGIDTNAVLFDRTSGQILCTLAGHSKKITTLKFVPRDELVVTGSADKTVRIWQGGEEGNYSCIHTLKDHTAEVEAVTVHATQKYFVTAAKDNTWCFYDISTGSCLSQVGEASGQEGYTSASFHPDGLILGTGTTEAVVKIWDVKTQSNVAKFEGHAGPVTAMSFSENGYFLATAALDGVKLWDLRKLRNFRTFSPYDSDTPTNSVEFDFSGTYLAVAGSDIRVYQVANVKTEWNLIKTLPDLSGTGKVTSAKFGTDAKYIAVGSMDRNLRIFGPPGDDQMDDDAKPSAE

SEQ ID NO: 62018 - protein, 481 aa, Triticum aestivum
  peptide (1)..(481): Ceres Seq. ID no. 15179741
MDDIVLVKTNKVVRPRPLQAASIPGLLGIFQNEWDALMLSNFALEQQLHTARQELSHALYQHDAACRVIARLKKERDESRALLALAERQIPASMAGVAPAAVVSNGKRAMEDEIGPDGKKIRPGINPVMIDELTECNTMLSAQRKKRQVPPSLASIDELERYTQISSHPLHKTNKPGILSMDIHPSKDIVATGGIDTNAVLFDRTSGQILCTLAGHSKKITTLKFVPRDELVVTGSADKTVRIWQGGEEGNYSCIHTLKDHTAEVEAVTVHATQKYFVTAAKDNTWCFYDISTGSCLSQVGEASGQEGYTSASFHPDGLILGTGTTEAVVKIWDVKTQSNVAKFEGHAGPVTAMSFSENGYFLATAALDGVKLWDLRKLRNFRTFSPYDSDTPTNSVEFDFSGTYLAVAGSDIRVYQVANVKTEWNLIKTLPDLSGTGKVTSAKFGTDAKYIAVGSMDRNLRIFGPPGDDQMDDDAKPSAE

SEQ ID NO: 62019 - protein, 444 aa, Triticum aestivum
  peptide (1)..(444): Ceres Seq. ID no. 15179742
MLSNFALEQQLHTARQELSHALYQHDAACRVIARLKKERDESRALLALAERQIPASMAGVAPAAVVSNGKRAMEDEIGPDGKKIRPGINPVMIDELTECNTMLSAQRKKRQVPPSLASIDELERYTQISSHPLHKTNKPGILSMDIHPSKDIVATGGIDTNAVLFDRTSGQILCTLAGHSKKITTLKFVPRDELVVTGSADKTVRIWQGGEEGNYSCIHTLKDHTAEVEAVTVHATQKYFVTAAKDNTWCFYDISTGSCLSQVGEASGQEGYTSASFHPDGLILGTGTTEAVVKIWDVKTQSNVAKFEGHAGPVTAMSFSENGYFLATAALDGVKLWDLRKLRNFRTFSPYDSDTPTNSVEFDFSGTYLAVAGSDIRVYQVANVKTEWNLIKTLPDLSGTGKVTSAKFGTDAKYIAVGSMDRNLRIFGPPGDDQMDDDAKPSAE

SEQ ID NO: 62020 - DNA, 1798 bp, Triticum aestivum
  misc_feature (1)..(1798): Ceres Seq. ID no. 13596021
cacacaaacccgcaaaaacaatccatcccccaaaaccccaccgccccgcggcggcggcggcggcgtcgcgatggacccttcctcggccggcgctggcggcaactcgctgccgtcggtcggccccgacgggcagaagcggcgcgtgtgctacttctacgactcggaggtgggcaactactactacgggcagggccacccgatgaagccgcaccgcatccgcatgacccactcgctgctggcgcagtacggcctcctcgaccagatgcaggtgctgcgccccaaccccgcccgcgaccgcgacctctgccgcttccacgccgacgactacatctccttcctccgctccgtcacgcccgagacgcagcaggaccagatccgggccctcaagcgcttcaacgtcggcgaggactgccccgtcttcgacggcctctacagcttctgccagacctacgcgggggcctccgtcggcggcgccgtcaagctcaaccacggccttgacatcgccatcaactggtcggggggcctgcaccacgcgaagaagtgcgaggcctcagggttctgctacgtcaacgacatcgtactcgccatactcgagctcctcaagcaccaccagcgagttctctatgtcgatattgatatccaccatggtgacggagttgaggaggcattctacacgacagacagggttatgacagtctcattccacaagtttggggattatttcccaggtacaggggatgtccgtgatattgggcattcaaaaggaaagtattactcccttaatgtccctctggatgatgggattgacgacgaaagctaccagtccctgtttaagcctataatggccaaagttatggaggttttccagcctggtgcagttgtttttcaatgtggcgccgattcgttatctggggataggttgggttgcttcaatctttcgatcagaggtcatgcagaatgcgtgaagtacatgaggtctttcaatgttccattgttgcttcttggcggtggtggctataccataagaaatgtcgcacgatgttggtgttatgagacaggagttgcacttggccaagagctcgaggataagatgcctgtcaatgagtactatgaatacttcggtccagattacactcttcatgtggcaccaagtaacatggagaacaaaaatacacgctacgaactggataatataagaaccaaacttcttgacaatctttcaaaacttcgacatgcccctagcgttcagtttcaagagcgacctcctgatactgagttccctgagccgggtgaagatgaagacgatcaggatgaaaggcatgatgaccctgattctgatatggaaatggattatcacacacctttggaagactcagcaaggagaatcactattcaaggtacaagagttaagagagaatcagctggagctgagacaaaagatcagcaggatggtagcagagtaacaggtgaacatagaggaccagaacctatggcagaagacatgggtccctccaagcaagctcatgtcgacgctaatgccatgaccgtggatgagcccggaattgtcaagaccgaatcaggaagctctaccaagttgcctgacccaccagccatctaccagaagccatgattgtaagcattcggaccgtgcggcttcttgcatgtgtttttgacagtaaaaagacgaagtgacgagtggtagctcgagtgtctgacccatgtatacatgtagcatggattattaagctgtaatatgtatagtcgattaaatgagccgcgaggcagaattttcttggcc

SEQ ID NO: 62021 - protein, 542 aa, Triticum aestivum
  peptide (1)..(542): Ceres Seq. ID no. 13596022
TQTRKNNPSPKTPPPRGGGGGVAMDPSSAGAGGNSLPSVGPDGQKRRVCYFYDSEVGNYYYGQGHPMKPHRIRMTHSLLAQYGLLDQMQVLRPNPARDRDLCRFHADDYISFLRSVTPETQQDQIRALKRFNVGEDCPVFDGLYSFCQTYAGASVGGAVKLNHGLDIAINWSGGLHHAKKCEASGFCYVNDIVLAILELLKHHQRVLYVDIDIHHGDGVEEAFYTTDRVMTVSFHKFGDYFPGTGDVRDIGHSKGKYYSLNVPLDDGIDDESYQSLFKPIMAKVMEVFQPGAVVFQCGADSLSGDRLGCFNLSIRGHAECVKYMRSFNVPLLLLGGGGYTIRNVARCWCYETGVALGQELEDKMPVNEYYEYFGPDYTLHVAPSNMENKNTRYELDNIRTKLLDNLSKLRHAPSVQFQERPPDTEFPEPGEDEDDQDERHDDPDSDMEMDYHTPLEDSARRITIQGTRVKRESAGAETKDQQDGSRVTGEHRGPEPMAEDMGPSKQAHVDANAMTVDEPGIVKTESGSSTKLPDPPAIYQKP

SEQ ID NO: 62022 - protein, 519 aa, Triticum aestivum
  peptide (1)..(519): Ceres Seq. ID no. 13596023
MDPSSAGAGGNSLPSVGPDGQKRRVCYFYDSEVGNYYYGQGHPMKPHRIRMTHSLLAQYGLLDQMQVLRPNPARDRDLCRFHADDYISFLRSVTPETQQDQIRALKRFNVGEDCPVFDGLYSFCQTYAGASVGGAVKLNHGLDIAINWSGGLHHAKKCEASGFCYVNDIVLAILELLKHHQRVLYVDIDIHHGDGVEEAFYTTDRVMTVSFHKFGDYFPGTGDVRDIGHSKGKYYSLNVPLDDGIDDESYQSLFKPIMAKVMEVFQPGAVVFQCGADSLSGDRLGCFNLSIRGHAECVKYMRSFNVPLLLLGGGGYTIRNVARCWCYETGVALGQELEDKMPVNEYYEYFGPDYTLHVAPSNMENKNTRYELDNIRTKLLDNLSKLRHAPSVQFQERPPDTEFPEPGEDEDDQDERHDDPDSDMEMDYHTPLEDSARRITIQGTRVKRESAGAETKDQQDGSRVTGEHRGPEPMAEDMGPSKQAHVDANAMTVDEPGIVKTESGSSTKLPDPPAIYQKP

SEQ ID NO: 62023 - protein, 476 aa, Triticum aestivum
  peptide (1)..(476): Ceres Seq. ID no. 13596024
MKPHRIRMTHSLLAQYGLLDQMQVLRPNPARDRDLCRFHADDYISFLRSVTPETQQDQIRALKRFNVGEDCPVFDGLYSFCQTYAGASVGGAVKLNHGLDIAINWSGGLHHAKKCEASGFCYVNDIVLAILELLKHHQRVLYVDIDIHHGDGVEEAFYTTDRVMTVSFHKFGDYFPGTGDVRDIGHSKGKYYSLNVPLDDGIDDESYQSLFKPIMAKVMEVFQPGAVVFQCGADSLSGDRLGCFNLSIRGHAECVKYMRSFNVPLLLLGGGGYTIRNVARCWCYETGVALGQELEDKMPVNEYYEYFGPDYTLHVAPSNMENKNTRYELDNIRTKLLDNLSKLRHAPSVQFQERPPDTEFPEPGEDEDDQDERHDDPDSDMEMDYHTPLEDSARRITIQGTRVKRESAGAETKDQQDGSRVTGEHRGPEPMAEDMGPSKQAHVDANAMTVDEPGIVKTESGSSTKLPDPPAIYQKP

SEQ ID NO: 62024 - DNA, 1584 bp, Triticum aestivum
  misc_feature (1)..(1584): Ceres Seq. ID no. 13596025
ttwcctaraacatyctaattgaaaaaagtgacaaggaaatcaagaacagctcaagaccatggaggcaccgagaaatcacggcgcgccatgcctgctccttctgctggcactagctgcccaatggtgcagtgtctcgacggcgagctgcagcttcacgatatccaactactgcactcacaccatctggccggggacgatggccggcgcgggcacgccgcagctgcccacgacggggttcaggctagaccccgggcagaccgtgcggatcccggcgccggccggttggtccggccggatatgggcgcgcacggggtgcaacttcagcaccgacggctcaggcgcggccgccggcgcggtcgcgtgccagaccggcgactgcggtggtggacacatggagtgcggcggcacgggcgggaagccgccagcgacgctcttcgagatcacgctggggaagggcggccccgccgaccaggacttctatgacgtgagcctcgtcgacgggtacaacctgcccgtcgtcgccgtcccgcgggcgcggcagggcagctgcaatgccaccggctgcgccgccgacctcaacctctcatgtcccaaggagctgcaggtggccggcggcaatggtggcggcccggtggcatgccagagcgcgtgcgaggcgttcacgcaggacaagtactgctgcagtggcgcctacgcgacgccagacacctgcagcccgacggcctactcgtccgtcttcaagtcggcgtgcccgcgggcctacagctacgcctacgacgacggcagcagcctcttcacctgcaacgccgtcgactacaccatcgcgttctgcctccctccagccgggttgaacatgcctgctgatgctaacggtgctcctcctgctgacaacaatggtggtggaagcgcatacgtgccgcccccgacaggcaacagcggggctgggagcgtctaccagccaccccctgcaggtaacaatggtgccggaagtgcctaccagccgcctccaacaggcaacaatggcgtcggaagtgcctaccagacacctccgactggcaccaatggcattggaagcacctacgagacacccttggctagcagcaatggcgtcggaagtgccttccagccgcccctgacgggcgacgacaatggcgtgagaagcgcctaccagccggggatgaccccgtcgtcggcgagcacgcgatacggtcagctatggtttctgctacctgcagcgctcgtgttctttaaatgatcaatctccatgaaaggccagccagtgtttcatgtcgagccggccttcgagcttccgaatacatgagggattggatgatcttaggcgcggaagaaagaagaggctcgaagcagagtacatccaagcatagatcttgtaggagtttctgacagattcacagtagtcgcaacttaaaaccctcctgtattcagtaactagatagtactggtggtgcagattgggggagatgtaaatattggcttctttcatgtagaccaacaatgaaatctactccagtagtacaaattgtatactcattaattccattattaataaggaatggtatactc

SEQ ID NO: 62025 - protein, 398 aa, Triticum aestivum
  peptide (1)..(398): Ceres Seq. ID no. 15221740
MEAPRNHGAPCLLLLLALAAQWCSVSTASCSFTISNYCTHTIWPGTMAGAGTPQLPTTGFRLDPGQTVRIPAPAGWSGRIWARTGCNFSTDGSGAAAGAVACQTGDCGGGHMECGGTGGKPPATLFEITLGKGGPADQDFYDVSLVDGYNLPVVAVPRARQGSCNATGCAADLNLSCPKELQVAGGNGGGPVACQSACEAFTQDKYCCSGAYATPDTCSPTAYSSVFKSACPRAYSYAYDDGSSLFTCNAVDYTIAFCLPPAGLNMPADANGAPPADNNGGGSAYVPPPTGNSGAGSVYQPPPAGNNGAGSAYQPPPTGNNGVGSAYQTPPTGTNGIGSTYETPLASSNGVGSAFQPPLTGDDNGVRSAYQPGMTPSSASTRYGQLWFLLPAALVFFK

SEQ ID NO: 62026 - protein, 352 aa, Triticum aestivum
  peptide (1)..(352): Ceres Seq. ID no. 15221741
MAGAGTPQLPTTGFRLDPGQTVRIPAPAGWSGRIWARTGCNFSTDGSGAAAGAVACQTGDCGGGHMECGGTGGKPPATLFEITLGKGGPADQDFYDVSLVDGYNLPVVAVPRARQGSCNATGCAADLNLSCPKELQVAGGNGGGPVACQSACEAFTQDKYCCSGAYATPDTCSPTAYSSVFKSACPRAYSYAYDDGSSLFTCNAVDYTIAFCLPPAGLNMPADANGAPPADNNGGGSAYVPPPTGNSGAGSVYQPPPAGNNGAGSAYQPPPTGNNGVGSAYQTPPTGTNGIGSTYETPLASSNGVGSAFQPPLTGDDNGVRSAYQPGMTPSSASTRYGQLWFLLPAALVFFK

SEQ ID NO: 62027 - protein, 287 aa, Triticum aestivum
  peptide (1)..(287): Ceres Seq. ID no. 15221742
MECGGTGGKPPATLFEITLGKGGPADQDFYDVSLVDGYNLPVVAVPRARQGSCNATGCAADLNLSCPKELQVAGGNGGGPVACQSACEAFTQDKYCCSGAYATPDTCSPTAYSSVFKSACPRAYSYAYDDGSSLFTCNAVDYTIAFCLPPAGLNMPADANGAPPADNNGGGSAYVPPPTGNSGAGSVYQPPPAGNNGAGSAYQPPPTGNNGVGSAYQTPPTGTNGIGSTYETPLASSNGVGSAFQPPLTGDDNGVRSAYQPGMTPSSASTRYGQLWFLLPAALVFFK

SEQ ID NO: 62028 - DNA, 1338 bp, Triticum aestivum
  misc_feature (1)..(1338): Ceres Seq. ID no. 13596408
ttacctagaacatcctaatcgaaaaaatttactcccaaaccaagccaaacgaaccagcgccgcagcccgcagcgcacccatcccaccaaacaaacagctagcaggcgaggcgacccgctccgacctcgagccgatgccgacgccgtacagcgcggcggcgctgcagcagcaccagcgtctggtctcctcctccggcggcctggcggcgacgggggcccacaggtgcggcgagcacgacgggacggtgccgccggaggtggcgcggcaccacgagcacgcggcgccgggggggcgctgctgctgctcggcggtggtgcagcgcgtggcggcgccggcggcggacgtgtgggccgtggtccggcgcttcgaccagccgcaggcgtacaagagcttcgtgcgcagctgcgcgctgctggacggcgacggcggcgtgggcacgctgcgcgaggtgcgcgtggtgtcgggcctccccgcggcgtccagccgggagcggctggagatcctggacgacgagcggcacgtgctgagcttcagcgtggtgggcggcgagcaccggctccgcaactaccggtcggtgaccacggtgcacccggcgccgggggagagcgcgtcggcgacgctggtggtggagtcgtacgtggtggacgtgccccccgggaacacccccgaggacacccgcgtcttcgtggacaccatcgtcaagtgcaacctccagtccctcgcccgcaccgccgagaagctcgccggccggggggcggcctacggcgcgctgccgtgatcgatcgatccgaccggaacccgcagtcgccggcccgcgcctccctccggtggtcaactcgagcccggccctcccggctcggccgcaggggcgtttcggtaaaatcgcgcaccgattttccgattaatgaatccaaatccatggtggtggtggtgcgcgggtggtggcgaccgattatttttctcttgttctttctggcgtgaaggcgaggggtcggtgggtcggttcggaccggtcggtgcgctttcgcggctggcccctcgctgtttctccttatcgcgagacacacccccctgtagtagtggtagctctagtttttgttcgttcccctttgtttgatctcgggtaagatgatgataagatttgacaggaattgaggagtaaaaactagcttcgaccgatgcaaggctcatcgacatctctgtatatatacttttagtttcccgttccattgtgtgtgttgtcatcatcaccattttggtcgtgacatttcatcaatcaaatttacaagatgttcaacgaggcacaacggaccagagccgtcacggtcttgttggacc

SEQ ID NO: 62029 - protein, 258 aa, Triticum aestivum
  peptide (1)..(258): Ceres Seq. ID no. 13596409
YLEHPNRKNLLPNQAKRTSAAARSAPIPPNKQLAGEATRSDLEPMPTPYSAAALQQHQRLVSSSGGLAATGAHRCGEHDGTVPPEVARHHEHAAPGGRCCCSAVVQRVAAPAADVWAVVRRFDQPQAYKSFVRSCALLDGDGGVGTLREVRVVSGLPAASSRERLEILDDERHVLSFSVVGGEHRLRNYRSVTTVHPAPGESASATLVVESYVVDVPPGNTPEDTRVFVDTIVKCNLQSLARTAEKLAGRGAAYGALP

SEQ ID NO: 62030 - protein, 214 aa, Triticum aestivum
  peptide (1)..(214): Ceres Seq. ID no. 13596410
MPTPYSAAALQQHQRLVSSSGGLAATGAHRCGEHDGTVPPEVARHHEHAAPGGRCCCSAVVQRVAAPAADVWAVVRRFDQPQAYKSFVRSCALLDGDGGVGTLREVRVVSGLPAASSRERLEILDDERHVLSFSVVGGEHRLRNYRSVTTVHPAPGESASATLVVESYVVDVPPGNTPEDTRVFVDTIVKCNLQSLARTAEKLAGRGAAYGALP

SEQ ID NO: 62031 - DNA, 1082 bp, Triticum aestivum
  misc_feature (1)..(1082): Ceres Seq. ID no. 12592832
actctccaccgatcccctcacccccaccggcggcgcacagctcgacgacccgcgcgatcctgcggaggcggcagtcatggtgcacgtcaacttctaccgcaactatgggaagaccttcaagaagccaaggcgtccgtatgagaaggagcgtcttgacgctgagctgaagctggttggggagtacggtctgcgggccaagcgtgagctctatcgtgtgcagtacgccctcagccgcatccgaaatgctgccagggagctgctcaccctggatgagaagaacccccgccgtatctttgagggtgcagcgctcctgcgccgcatgaaccgctacggtcttctcactgaggaacagaacaagcttgattacgtgcttgccctcactgttgacaacttcctccagcgccgtctccagaccatcgtcttcaagaatggcatggccaagtcaatccatcatgctcgtgtcctcatcagacagcgccacatcagggttggaaagcagctcgtcaacattccttctttcatggtgagggtggacactgagaaacacgtcgacttctcgctcaccagccccctgggtggtggccaacctggaagagtgaagcggaagaaccagaagaaggcctcaggtggtggtggtgacgacggcgaggaggaggaagactaagcgctcagcctcgacccgcataacttccgttgcagaaatgttgagattgccttgtggaacttgcaacgtgaaatgattcaaactttggttcgttcttagaaacttagtggtgtagagctttcgttgcttcagctatcgattctaaaattaaacttatggttgtcagttttgcttggttagtgaccaccgagcataagaagtgaactcagtgaggctgcttcgttttttgtgaaccaaacgtatcttgttatcggtttgacagccctggttctgagttattttactctgcatgaagtgttactgttgtccttgctatccttctcttttgtctggttggctaggttggtgtgtcgaccgaatgatcacaataagtgctatatagtactctttccaaggctataattccaattgtagtatt

SEQ ID NO: 62032 - protein, 220 aa, Triticum aestivum
  peptide (1)..(220): Ceres Seq. ID no. 12592833
LSTDPLTPTGGAQLDDPRDPAEAAVMVHVNFYRNYGKTFKKPRRPYEKERLDAELKLVGEYGLRAKRELYRVQYALSRIRNAARELLTLDEKNPRRIFEGAALLRRMNRYGLLTEEQNKLDYVLALTVDNFLQRRLQTIVFKNGMAKSIHHARVLIRQRHIRVGKQLVNIPSFMVRVDTEKHVDFSLTSPLGGGQPGRVKRKNQKKASGGGGDDGEEEED

SEQ ID NO: 62033 - protein, 195 aa, Triticum aestivum
  peptide (1)..(195): Ceres Seq. ID no. 12592834
MVHVNFYRNYGKTFKKPRRPYEKERLDAELKLVGEYGLRAKRELYRVQYALSRIRNAARELLTLDEKNPRRIFEGAALLRRMNRYGLLTEEQNKLDYVLALTVDNFLQRRLQTIVFKNGMAKSIHHARVLIRQRHIRVGKQLVNIPSFMVRVDTEKHVDFSLTSPLGGGQPGRVKRKNQKKASGGGGDDGEEEED

SEQ ID NO: 62034 - protein, 114 aa, Triticum aestivum
  peptide (1)..(114): Ceres Seq. ID no. 12592835
MNRYGLLTEEQNKLDYVLALTVDNFLQRRLQTIVFKNGMAKSIHHARVLIRQRHIRVGKQLVNIPSFMVRVDTEKHVDFSLTSPLGGGQPGRVKRKNQKKASGGGGDDGEEEED

SEQ ID NO: 62035 - DNA, 869 bp, Triticum aestivum
  misc_feature (1)..(869): Ceres Seq. ID no. 12587306
acccccatcccacatccaagacaagaagcgcctggagcttgccatggctgccaatccagatcgggaggtgtgccaccgggcagggagaggagggaagatgctgctgccggtgatggccgtcttggcggcggtggtgctggcgtcgctgccgtcggcggcggtggcgaccaactacacggtgggcgacgagaaggggtggaaccccaaggtggactacacctcctgggtgaagaagcaccgccccttctacaagggcgactggctcctgttcgagtaccagaatgggcggtcggacgtggtgcaggtggacgaggtcgggtacgacaactgcgacaaggagagcgccatcagcagccacagcaaggggaccagctacgcgttccagctcaaggaggccaaggactacttcttcatctgcagctacggctactgctactccggcatgaagctcgccgtcaccgccaagaagggccccgcctcttcctcccccgactccggctcatcctcctcctcctcctcctcgccggccgccaagtcatcctccaaatccgccgccccccccatcgccgcccgcaacgccgctcccctcgccgccgccgtgggcgccgcggccatgctactcaggatgctctgatcagttgatctggcttgcaattccgttctccattaagtccagtttggctcagatcttgtcagattttctcttctctgttaatttattcctccccctcctccttggttaagcttaaacattggttcttgtgcgcttgattgttccattttcctttttcttattttgtcgattttgatccgaatggtgtctggtcgatggttgtagtcgaggtgccaaattaaagattttaagtgtg

SEQ ID NO: 62036 - protein, 213 aa, Triticum aestivum
  peptide (1)..(213): Ceres Seq. ID no. 12587307
TPIPHPRQEAPGACHGCQSRSGGVPPGRERREDAAAGDGRLGGGGAGVAAVGGGGDQLHGGRREGVEPQGGLHLLGEEAPPLLQGRLAPVRVPEWAVGRGAGGRGRVRQLRQGERHQQPQQGDQLRVPAQGGQGLLLHLQLRLLLLRHEARRHRQEGPRLFLPRLRLILLLLLLAGRQVILQIRRPPHRRPQRRSPRRRRGRRGHATQDALIS

SEQ ID NO: 62037 - protein, 210 aa, Triticum aestivum
  peptide (1)..(210): Ceres Seq. ID no. 12587308
PPSHIQDKKRLELAMAANPDREVCHRAGRGGKMLLPVMAVLAAVVLASLPSAAVATNYTVGDEKGWNPKVDYTSWVKKHRPFYKGDWLLFEYQNGRSDVVQVDEVGYDNCDKESAISSHSKGTSYAFQLKEAKDYFFICSYGYCYSGMKLAVTAKKGPASSSPDSGSSSSSSSSPAAKSSSKSAAPPIAARNAAPLAAAVGAAAMLLRML

SEQ ID NO: 62038 - protein, 196 aa, Triticum aestivum
  peptide (1)..(196): Ceres Seq. ID no. 12587309
MAANPDREVCHRAGRGGKMLLPVMAVLAAVVLASLPSAAVATNYTVGDEKGWNPKVDYTSWVKKHRPFYKGDWLLFEYQNGRSDVVQVDEVGYDNCDKESAISSHSKGTSYAFQLKEAKDYFFICSYGYCYSGMKLAVTAKKGPASSSPDSGSSSSSSSSPAAKSSSKSAAPPIAARNAAPLAAAVGAAAMLLRML

SEQ ID NO: 62039 - DNA, 1039 bp, Triticum aestivum
  misc_feature (1)..(1039): Ceres Seq. ID no. 13596425
atcgcccccacctttttcatcgcactctacgagacccgcagcctcgtctcttcctcctctcacccgacccgatctcctcctaggtttcgctccccaccaccgcggaacgaaccggaaatggcggcgcggcacctcagatccggcctcccgctcctccaagcccgcctcgcggctaacgaatccgcggccgtcgctcaggtgtcgagggggcttgcaacggaggcggataagcctaaggagaacaagatcaaggttccaaaagctctgtatggtggcacgggcaactacgctagtgcgttgttccttgcagcagccaactcaaattcgttggaaaaagttgaatctgagattctcgatgttgtaggggcagccaagaagagccctatgttttctcaattcatgaaggacacatcagtgcctaaagaaaccagggtgaaggctataactgaaatattctctgaagccgggtttactgacatcacaaagaaattcttgtctgcactggcatccaatggaagactgaaatatgttgaacgcattgctgagagatttgttgatttgaccatggcacataggggggaggtgaaagttgttgtcaggactgttgttccacttcctgagaaggaggagaaagaacttaaggagaccttgcgtgatatccttgggaaagacaaaaccatcttggttgaacaaaagattgaccagagtatcatgggaggactggtgattgaatttgggcagaaggtgtttgacatgtcgatcaggactagggcgaagcaaatggaggcgttcttgaggcaaccctttgacatctaactgcctttcggatccagtgcagtggctgtgctgctgaaggttccctcgtgaaataaaagctttcctttacaagagaacggcactctgttttattttgtcttgtgggttaggaagaagcccactgaacaatctttaatttcctttctaccgaaaaaaacatggataaaaacatgaagagaggtcatggaaagtttttaattcaagtgtttgtaattttcggtcg

SEQ ID NO: 62040 - protein, 271 aa, Triticum aestivum
  peptide (1)..(271): Ceres Seq. ID no. 15221869
IAPTFFIALYETRSLVSSSSHPTRSPPRFRSPPPRNEPEMAARHLRSGLPLLQARLAANESAAVAQVSRGLATEADKPKENKIKVPKALYGGTGNYASALFLAAANSNSLEKVESEILDVVGAAKKSPMFSQFMKDTSVPKETRVKAITEIFSEAGFTDITKKFLSALASNGRLKYVERIAERFVDLTMAHRGEVKVVVRTVVPLPEKEEKELKETLRDILGKDKTILVEQKIDQSIMGGLVIEFGQKVFDMSIRTRAKQMEAFLRQPFDI

SEQ ID NO: 62041 - protein, 232 aa, Triticum aestivum
  peptide (1)..(232): Ceres Seq. ID no. 15221870
MAARHLRSGLPLLQARLAANESAAVAQVSRGLATEADKPKENKIKVPKALYGGTGNYASALFLAAANSNSLEKVESEILDVVGAAKKSPMFSQFMKDTSVPKETRVKAITEIFSEAGFTDITKKFLSALASNGRLKYVERIAERFVDLTMAHRGEVKVVVRTVVPLPEKEEKELKETLRDILGKDKTILVEQKIDQSIMGGLVIEFGQKVFDMSIRTRAKQMEAFLRQPFDI

SEQ ID NO: 62042 - protein, 143 aa, Triticum aestivum
  peptide (1)..(143): Ceres Seq. ID no. 15221871
MFSQFMKDTSVPKETRVKAITEIFSEAGFTDITKKFLSALASNGRLKYVERIAERFVDLTMAHRGEVKVVVRTVVPLPEKEEKELKETLRDILGKDKTILVEQKIDQSIMGGLVIEFGQKVFDMSIRTRAKQMEAFLRQPFDI

SEQ ID NO: 62043 - DNA, 1407 bp, Triticum aestivum
  misc_feature (1)..(1407): Ceres Seq. ID no. 13596030
aaaataaaaagaatccccgcagcctcctcctatctcctcctcgcgcacacgccaagcgaccgaatcgccgccgcagccgcctagggcttcgccgccgtcgcagatccctacttccggccgtctgctgcgggtcctccgtgttcgtggctgctgtgccggcgccgacagaaatttccctgccgtcagattttgtgagtgttcgagcttctgcaatgggtggaagcaactatgatgacgactgggtgttgcccggtgctgacatcactcttgttcttgttggaaaacttggctatggcaagagtgcaactggcaatagtatccttggacgggaagcatttgtatcagaatactctcatgccagtgtgacaaacacttgtcagatgggaagcaccatgctgacggatggccgcaccatcaatgttattgatacaccaggattatttgacatgaccgtaactcctgaggatgctggcaaagaaattgttaagtgcatgaacatggctaaagatgggatacatgctgtgttgatggttttttctgctacgtctcgattttctcgagaagattctagtacaattgagactatcaaagtgttttttggagagaaaatcgttgatcacttggtcttagttttcacttatggagatttagttggtgaaaatttattgaagaacatgttaagtaatgccccagactatctgcagaaagttgttcagctatgcaaaaatagagtggttctttttgataacaagaccaaggaccctaggattcgaactaagcagctcgaaacgttgcttgatgtggttgattctgttagtgcaaataatggaggaaacccatttacagatcaaatgctcactcgccttaaggaggtgcatgatagagagaaggaggttcatgatgctctcggatattcagaggaccaaatatctgaattgaagaaggagatccacagaactcgggatgaacagcttgcaaacattactgccatggtggaggaaaagctgaatatcacggtggagaagctgcaagttcaactcatggaagaacagaatgcaaggctggaagcagagagggtggcggcggaggccaggctgaaatccgacgaggagatccgcaagctcaaggagaggctcgagaaggctcaggaggaaaacgaggagttccggaggctggcggcgaacaagtgcaccattctgtaaacagtagtctcttgggaaagagttgtcggatgtcttgttaataggagggggtgaacttaagtctgtctagtagcaacagatatactgtacttggttgcatcgtctcgtatattggtagaacttgaatgcttggggagtcggataactatatgttagtgacagttatacttgtcgtctcgtatattagtagcacttgcgacttgcg

SEQ ID NO: 62044 - protein, 399 aa, Triticum aestivum
  peptide (1)..(399): Ceres Seq. ID no. 13596031
NKKNPRSLLLSPPRAHAKRPNRRRSRLGLRRRRRSLLPAVCCGSSVFVAAVPAPTEISLPSDFVSVRASAMGGSNYDDDWVLPGADITLVLVGKLGYGKSATGNSILGREAFVSEYSHASVTNTCQMGSTMLTDGRTINVIDTPGLFDMTVTPEDAGKEIVKCMNMAKDGIHAVLMVFSATSRFSREDSSTIETIKVFFGEKIVDHLVLVFTYGDLVGENLLKNMLSNAPDYLQKVVQLCKNRVVLFDNKTKDPRIRTKQLETLLDVVDSVSANNGGNPFTDQMLTRLKEVHDREKEVHDALGYSEDQISELKKEIHRTRDEQLANITAMVEEKLNITVEKLQVQLMEEQNARLEAERVAAEARLKSDEEIRKLKERLEKAQEENEEFRRLAANKCTIL

SEQ ID NO: 62045 - protein, 329 aa, Triticum aestivum
  peptide (1)..(329): Ceres Seq. ID no. 13596032
MGGSNYDDDWVLPGADITLVLVGKLGYGKSATGNSILGREAFVSEYSHASVTNTCQMGSTMLTDGRTINVIDTPGLFDMTVTPEDAGKEIVKCMNMAKDGIHAVLMVFSATSRFSREDSSTIETIKVFFGEKIVDHLVLVFTYGDLVGENLLKNMLSNAPDYLQKVVQLCKNRVVLFDNKTKDPRIRTKQLETLLDVVDSVSANNGGNPFTDQMLTRLKEVHDREKEVHDALGYSEDQISELKKEIHRTRDEQLANITAMVEEKLNITVEKLQVQLMEEQNARLEAERVAAEARLKSDEEIRKLKERLEKAQEENEEFRRLAANKCTIL

SEQ ID NO: 62046 - protein, 273 aa, Triticum aestivum
  peptide (1)..(273): Ceres Seq. ID no. 13596033
MGSTMLTDGRTINVIDTPGLFDMTVTPEDAGKEIVKCMNMAKDGIHAVLMVFSATSRFSREDSSTIETIKVFFGEKIVDHLVLVFTYGDLVGENLLKNMLSNAPDYLQKVVQLCKNRVVLFDNKTKDPRIRTKQLETLLDVVDSVSANNGGNPFTDQMLTRLKEVHDREKEVHDALGYSEDQISELKKEIHRTRDEQLANITAMVEEKLNITVEKLQVQLMEEQNARLEAERVAAEARLKSDEEIRKLKERLEKAQEENEEFRRLAANKCTIL

SEQ ID NO: 62047 - DNA, 1080 bp, Triticum aestivum
  misc_feature (1)..(1080): Ceres Seq. ID no. 13583327
taatcgaaaacattttcatcccgcgggacgcgccatgaagaccagctcctcgtcgcaggcgctcttcccggccgcctcgtcgctgtgcaccccgtacctcctcctcgtgcccctcggcctcctcgccgcggtggtcgtcatccccagcctcggctcctcccacgtccgctccgacggcctcggcgtgctctgccccagcctcggcaccgatggctactccgtcgcgtcgggagccgagaaggtcgtctccacggcggcggcggcggcgcagccggagttccggctgctcggcggggtgctgaccacgccgaagcggcgcgagcggcgggacatcgtgcggctggcgtacgcgctgcagccgccggtgccggcgtacgcgcgggtggacgtgcgcttcgtgttctgcggcgtggacgacccggtggaccggatgctggtggcgctggaggccgcgcggcacggcgacgtcctcctgctcaactgcaccgagaacatgaacgacggcaagacccaccagtatttctcctccgtgccgcgggtgttngcgggcgcgccctacgactacgtgatgaagaccgacgacgacacgtacctgcgcgtggccgccatggccgaggagctccggcccaagccccgcgacgacgtctacctcggctacggcttcgccgtcggcgacgaccccatgcagttcatgcacggcatggggtacgtcgtctcgtgggacgtcgcgacctgggtgtccgccaacgaggagatcctccggcacaacgacacccacggccccgagggcctcctcttcggcaagtggctcaacatcgggcgccggggcaagaaccggtacagcctcaggccaaggatgtacgacctcaactgggacatggacaacttccggccggacaccgtcgccgtgcacatgatcaaggacaaccgccggtgggcggctgccttcagatacttcaacgtcaccgccgggatcaggccgtccaacctgtaccacttgccctgatcgatcaaggggtttatattttccatttcttaagtaaactcgccgtgacgtggttgattgtgccacgaaagtgc

SEQ ID NO: 62048 - protein, 334 aa, Triticum aestivum
  peptide (1)..(334): Ceres Seq. ID no. 13583328
  misc_feature (181)..(181): Xaa is any aa, unknown or other
NRKHFHPAGRAMKTSSSSQALFPAASSLCTPYLLLVPLGLLAAVVVIPSLGSSHVRSDGLGVLCPSLGTDGYSVASGAEKVVSTAAAAAQPEFRLLGGVLTTPKRRERRDIVRLAYALQPPVPAYARVDVRFVFCGVDDPVDRMLVALEAARHGDVLLLNCTENMNDGKTHQYFSSVPRVXAGAPYDYVMKTDDDTYLRVAAMAEELRPKPRDDVYLGYGFAVGDDPMQFMHGMGYVVSWDVATWVSANEEILRHNDTHGPEGLLFGKWLNIGRRGKNRYSLRPRMYDLNWDMDNFRPDTVAVHMIKDNRRWAAAFRYFNVTAGIRPSNLYHLP

SEQ ID NO: 62049 - protein, 323 aa, Triticum aestivum
  peptide (1)..(323): Ceres Seq. ID no. 13583329
  misc_feature (170)..(170): Xaa is any aa, unknown or other
MKTSSSSQALFPAASSLCTPYLLLVPLGLLAAVVVIPSLGSSHVRSDGLGVLCPSLGTDGYSVASGAEKVVSTAAAAAQPEFRLLGGVLTTPKRRERRDIVRLAYALQPPVPAYARVDVRFVFCGVDDPVDRMLVALEAARHGDVLLLNCTENMNDGKTHQYFSSVPRVXAGAPYDYVMKTDDDTYLRVAAMAEELRPKPRDDVYLGYGFAVGDDPMQFMHGMGYVVSWDVATWVSANEEILRHNDTHGPEGLLFGKWLNIGRRGKNRYSLRPRMYDLNWDMDNFRPDTVAVHMIKDNRRWAAAFRYFNVTAGIRPSNLYHLP

SEQ ID NO: 62050 - protein, 191 aa, Triticum aestivum
  peptide (1)..(191): Ceres Seq. ID no. 13583330
  misc_feature (38)..(38): Xaa is any aa, unknown or other
MLVALEAARHGDVLLLNCTENMNDGKTHQYFSSVPRVXAGAPYDYVMKTDDDTYLRVAAMAEELRPKPRDDVYLGYGFAVGDDPMQFMHGMGYVVSWDVATWVSANEEILRHNDTHGPEGLLFGKWLNIGRRGKNRYSLRPRMYDLNWDMDNFRPDTVAVHMIKDNRRWAAAFRYFNVTAGIRPSNLYHLP

SEQ ID NO: 62051 - DNA, 1780 bp, Triticum aestivum
  misc_feature (1)..(1780): Ceres Seq. ID no. 13596458
acaggatactctccccccctccccactgccgcaccaacacgccagtctcggcgacgccaaaccctcgcccgctctccagaaacccccctatggccgccaccggcgctgccgcgcccgcgcccgcggccgtgcagccgccgcggcagttcaagctcgacccgcagagcgagctccgcgtggaggtgctcccggacgcgaccctccgcgtgcgcctcgtctccggcacggcggagatcttcggcaccgagctcccgcccgagggctggctcaccatcccgccccgctccaagatcgccattttcacgtggcacggcgcgacggtggagctggacggggtcagcgagagcgagtacacgtccgacgagacgccgatggtaatttatgtcaacacgcatgcgattctcgatgcacggagggcgagggcgagggcagcgcagggaggcgacttggaggcctcacagggacctagagtgattgttgtggggccaactgattctggaaaaagcactctgtgcaaaatgctccttagctgggctgccaaactgggatggaagcctacatatgtggatttagatattggccagggttccataaccatacctggatgtatttctgctacaccaatagagaaacccatagatatagttgatgggattcctttggagatgccgcttgcatacttttatggccatccaaatccaagtattaatccagatgtttacaaagcgctcatgagagagctagctcaaacattagagacacagttctctgggaatgctgaatctagggcggccggtatggttattaacacaatggggtgggttgaaggccttggctatgagttacttcttaatgcaattgacatcttcaaggctaatgtagtgctggtattgggacaggagaagctctggaagatgttaaaagatgcagtacaaagtaagcccaatatcgatgtcgtaaaacttcataaatctgagggtgttgtcctaaggaattcaaaatatcgtcaaaagactaggagctttcgtatcaaggagtacttttatgggattgcaaacgatctggcaccacattcaaatgtagtcaactttagtgatgtttctgttttcagaattggtagtggacatcaagctccacggtcagctttaccaattggtgcagagcctgtggcagatcccactcggcttgttgctgtcaacatcagcactgatatggtccacacagtgcttgctgtttcttatgcgaaggaacctgatgaaataatttcgagcaacgttgccggattcatccatgtcacagatgttgacatccaaaggaagaagctgacgtacatcgcgccttgcccaggagacctgccaagcaggctgttaatcgcgagctccctgacatggtacgagcaggcttgacccggttcgaggttggacattgtaggtaggtaaccagatggctgatgacatgttgtaacgccgaaatggatactctgtgcatttgataactggaacactgctggtaaagctgaaaagctgaatgggttggacgatatctcaggcatcttgctgcgaagctttctgctgacttgcttatgctttctatgctgctgtggcggcgaagatacaaatagttaggtcaatgaaagattggtgtgctcttttgtacgctgttgggaactaagatatactagaagacgagtcctttggcctcttctcaactgtatccagatataaacatcggaactagttattactagaagaacgtccgtgcgttgcaatggggccacatt

SEQ ID NO: 62052 - protein, 467 aa, Triticum aestivum
  peptide (1)..(467): Ceres Seq. ID no. 13596459
RILSPPPHCRTNTPVSATPNPRPLSRNPPMAATGAAAPAPAAVQPPRQFKLDPQSELRVEVLPDATLRVRLVSGTAEIFGTELPPEGWLTIPPRSKIAIFTWHGATVELDGVSESEYTSDETPMVIYVNTHAILDARRARARAAQGGDLEASQGPRVIVVGPTDSGKSTLCKMLLSWAAKLGWKPTYVDLDIGQGSITIPGCISATPIEKPIDIVDGIPLEMPLAYFYGHPNPSINPDVYKALMRELAQTLETQFSGNAESRAAGMVINTMGWVEGLGYELLLNAIDIFKANVVLVLGQEKLWKMLKDAVQSKPNIDVVKLHKSEGVVLRNSKYRQKTRSFRIKEYFYGIANDLAPHSNVVNFSDVSVFRIGSGHQAPRSALPIGAEPVADPTRLVAVNISTDMVHTVLAVSYAKEPDEIISSNVAGFIHVTDVDIQRKKLTYIAPCPGDLPSRLLIASSLTWYEQA

SEQ ID NO: 62053 - protein, 438 aa, Triticum aestivum
  peptide (1)..(438): Ceres Seq. ID no. 13596460
MAATGAAAPAPAAVQPPRQFKLDPQSELRVEVLPDATLRVRLVSGTAEIFGTELPPEGWLTIPPRSKIAIFTWHGATVELDGVSESEYTSDETPMVIYVNTHAILDARRARARAAQGGDLEASQGPRVIVVGPTDSGKSTLCKMLLSWAAKLGWKPTYVDLDIGQGSITIPGCISATPIEKPIDIVDGIPLEMPLAYFYGHPNPSINPDVYKALMRELAQTLETQFSGNAESRAAGMVINTMGWVEGLGYELLLNAIDIFKANVVLVLGQEKLWKMLKDAVQSKPNIDVVKLHKSEGVVLRNSKYRQKTRSFRIKEYFYGIANDLAPHSNVVNFSDVSVFRIGSGHQAPRSALPIGAEPVADPTRLVAVNISTDMVHTVLAVSYAKEPDEIISSNVAGFIHVTDVDIQRKKLTYIAPCPGDLPSRLLIASSLTWYEQA

SEQ ID NO: 62054 - protein, 344 aa, Triticum aestivum
  peptide (1)..(344): Ceres Seq. ID no. 13596461
MVIYVNTHAILDARRARARAAQGGDLEASQGPRVIVVGPTDSGKSTLCKMLLSWAAKLGWKPTYVDLDIGQGSITIPGCISATPIEKPIDIVDGIPLEMPLAYFYGHPNPSINPDVYKALMRELAQTLETQFSGNAESRAAGMVINTMGWVEGLGYELLLNAIDIFKANVVLVLGQEKLWKMLKDAVQSKPNIDVVKLHKSEGVVLRNSKYRQKTRSFRIKEYFYGIANDLAPHSNVVNFSDVSVFRIGSGHQAPRSALPIGAEPVADPTRLVAVNISTDMVHTVLAVSYAKEPDEIISSNVAGFIHVTDVDIQRKKLTYIAPCPGDLPSRLLIASSLTWYEQA

SEQ ID NO: 62055 - DNA, 986 bp, Triticum aestivum
  misc_feature (1)..(986): Ceres Seq. ID no. 13596426
cccgatacagctccccccatccaaaacccaccgaagtaaaaccgacgagacaaggaccaaacaccaaaatgctctcatccaccgctctccggccgctgtcgccggcgacggcaacgacgcccgcgtacccagccaccgctactgctactgctaccgccaccgtcacctcggccacgcccgggcgacgctcggttgcggtgcgcgtgctgcgggactacggctcgatcccgaagcgggagcccttcagctccagccgcagcatcctcgacgagttcttcaagcaggagaagcctctcgtccagcgcaccaaggaccacatcacagattattgcacgacccttgagggtgatgattgctgcagctgctgggatgcctattttgaactcaacaaactcgagcaagagctaccgcaagaagaaatttcaaggatggtgaaggactcgcggtcagacccgaggtaccttataagcagcatccaccaccggtcagacctacggaagaagatggccgagaaagctcacaattcggcgccatcaaactccccggggcaaacagcgaagccgaggcctttccccgtccccgacgggctgccgaaaacgcaggaagagatcgacgaggatgaggaggccctcatgccggagtctccttacacgaggctgctcagaaggatggggaggtttcccgactggtatacccctcgcccagaccatgagaccgactgaatcacgccatgaaccagccttgccttccagatgtacagcctgaagctctgttctcctggcatcgagcatggaaccttggattgcctgttgcctgcttagttggtttttgctgagtggataaatggaactatgtaatggtgcgtatgtttttgtggtgtttagttcttcgctttagattcagataacaccctttttgccgttttcgtatgatatctgctatgtatatctgtatatatatgtttgggaatagagttcttgactgcc

SEQ ID NO: 62056 - protein, 239 aa, Triticum aestivum
  peptide (1)..(239): Ceres Seq. ID no. 13596427
RYSSPHPKPTEVKPTRQGPNTKMLSSTALRPLSPATATTPAYPATATATATATVTSATPGRRSVAVRVLRDYGSIPKREPFSSSRSILDEFFKQEKPLVQRTKDHITDYCTTLEGDDCCSCWDAYFELNKLEQELPQEEISRMVKDSRSDPRYLISSIHHRSDLRKKMAEKAHNSAPSNSPGQTAKPRPFPVPDGLPKTQEEIDEDEEALMPESPYTRLLRRMGRFPDWYTPRPDHETD

SEQ ID NO: 62057 - protein, 217 aa, Triticum aestivum
  peptide (1)..(217): Ceres Seq. ID no. 13596428
MLSSTALRPLSPATATTPAYPATATATATATVTSATPGRRSVAVRVLRDYGSIPKREPFSSSRSILDEFFKQEKPLVQRTKDHITDYCTTLEGDDCCSCWDAYFELNKLEQELPQEEISRMVKDSRSDPRYLISSIHHRSDLRKKMAEKAHNSAPSNSPGQTAKPRPFPVPDGLPKTQEEIDEDEEALMPESPYTRLLRRMGRFPDWYTPRPDHETD

SEQ ID NO: 62058 - DNA, 656 bp, Triticum aestivum
  misc_feature (1)..(656): Ceres Seq. ID no. 13583388
cctaatcgaaaaaatcaaggaaaaaacttttaaaaaaagagcacaaaatcgttcctcattctccatctactccaccaaacctcaatccccatctctctccccctaggctctccttcgccgtcggtcgggctccctctccgacacgccgccgtcgatacatccacccgaggcatggcgacggcgttcaaggcgttcgtgaacagccccgtcggccccaagaccacccacttctggggccccgtcgctaactggggcttcgtcctcgcgggtttggttgacttgaacaagcctcctgagatgatatctggcaatatgacagccgccatgtgtgtgtattctgggctctttatgaggttcgcgtggatggtacagccccggaactacttgctcctggcatgccatgcctccaacgaaaccgttcagctctatcatttatctcgctgtgctagggctcaggggtatctggattccaagaaagagccggaggcccaacagtaaagggtgtggtgtttctgaagtcggaggagccttgactccgcagccagcctttcaataagtaaaatttgtttctgaagctttgcaatgcccttcatgagaaaaaacctatacagtggaaatttctatttctatgatactcatgcctgcaatgtggcctt

SEQ ID NO: 62059 - protein, 108 aa, Triticum aestivum
  peptide (1)..(108): Ceres Seq. ID no. 13583389
MATAFKAFVNSPVGPKTTHFWGPVANWGFVLAGLVDLNKPPEMISGNMTAAMCVYSGLFMRFAWMVQPRNYLLLACHASNETVQLYHLSRCARAQGYLDSKKEPEAQQ

SEQ ID NO: 62060 - protein, 66 aa, Triticum aestivum
  peptide (1)..(66): Ceres Seq. ID no. 13583390
MISGNMTAAMCVYSGLFMRFAWMVQPRNYLLLACHASNETVQLYHLSRCARAQGYLDSKKEPEAQQ

SEQ ID NO: 62061 - protein, 61 aa, Triticum aestivum
  peptide (1)..(61): Ceres Seq. ID no. 13583391
MTAAMCVYSGLFMRFAWMVQPRNYLLLACHASNETVQLYHLSRCARAQGYLDSKKEPEAQQ

SEQ ID NO: 62062 - DNA, 1774 bp, Triticum aestivum
  misc_feature (1)..(1774): Ceres Seq. ID no. 14316039
ggagggttcttgcagtattatcgctatccagctcgtgagtcggctatcgtcaatggcggcctctgcaaagatcgccacggagtttctcaaggatccactgatctggttgttcctcgcctcgctggctttcgtcattctgcagaggcggcggctgggcagcgcgccatttcctccgggtccgaagccgctgccagtcatcggcaacatgacgttagtggaccagctgacccaccgcggcctagcggcgctagcgaagcactacggcgggctgctgcaccttcgcctcggcaggctccacgtcttcgcggtgtcgacgccggagtacgcgcgcgaggtgctgcacgtgcaggacgccgccttctcgaaccgcccggccaccatcgccgtcgtctacctcacctacggccgctccgacatggcgttcgcgcacaacggcgcctactggcgccagatgcgcaagctctgcgtcaccaagatcttcagccgccgccgcgccgagacgtggctcgccgtgcgcgacgggtacggggcgctggcccgcgccgtcggcaggcgcagcggcgaggccgtcaacctcggcgagctcatcttcaacctcaccgtcggtgtcatcttccgcgccgccttcagcacccgcgacgaggatgggctcgacgagttcatcgccatcctccaggagttctccagcctcctaggattgttccacatcggtgacttcttcccgtggctcggctgggtgggccggcggggcttcaaccgccgcctccgcacggggcgcggcgctctcgataaatttatcgacaggatcatcgacgagcacatgaggaggggcaagaacgccgccgaccccgacgccgacttggtagacggcctgctcgcgtttctcgccgaggcaaacccaatcagcgggaagcacagagaggacgccctccgcttcacccgcgataacgtcagggccatgattatggacatgttgtttggtgggccagagacagtggggtccatgaccgagtgggcgatggcagagatgatgcgtagcccagacgacctacgacggctgcagcaggagctcgccaatgtgctggggctcgaccgtaccgtggatgagcccgacctcgacaagctccctttcctcagatgtgtcgtcaaggagacgctccgcatgcacccgcccatcccactgctcctccacgagtctgctaaagactgcgtcgtcggtggctactttgtgcccaaaggctcccgcgtgttggtgaatgcatgggcgatcaaccgtgaccccggggcctggaaggacggcgacacgttccgaccttcgcggttcatgcccggcgagcgagaggccgccgggctggacctcaagggtggctgctacgagttcttgccgtttgggtccggacggcgctcctgccctgcgcaggggcttggccaacatgcggtggagttcgctgtcgcgcagctcgcgcacggattcaactgggagctgcccgatggcatgaagcccgcggagcttgacatgggtgacatctttggcctcaccgcattacgtgccacgcggctctacgccgtgccaccacaccacgcctcacatgccccatgtaagtattgcctcacatgccccatgtaagtatcgcaccagacttgttccttgtaaccgttggtccgttcattgtgtaccccgatctgcttggtttgttttggacttgatctccgagtcctaattcgcaagaagagactttctatcaataaagagcacggtcatagatgtggatcc

SEQ ID NO: 62063 - protein, 541 aa, Triticum aestivum
  peptide (1)..(541): Ceres Seq. ID no. 14316040
EGSCSIIAIQLVSRLSSMAASAKIATEFLKDPLIWLFLASLAFVILQRRRLGSAPFPPGPKPLPVIGNMTLVDQLTHRGLAALAKHYGGLLHLRLGRLHVFAVSTPEYAREVLHVQDAAFSNRPATIAVVYLTYGRSDMAFAHNGAYWRQMRKLCVTKIFSRRRAETWLAVRDGYGALARAVGRRSGEAVNLGELIFNLTVGVIFRAAFSTRDEDGLDEFIAILQEFSSLLGLFHIGDFFPWLGWVGRRGFNRRLRTGRGALDKFIDRIIDEHMRRGKNAADPDADLVDGLLAFLAEANPISGKHREDALRFTRDNVRAMIMDMLFGGPETVGSMTEWAMAEMMRSPDDLRRLQQELANVLGLDRTVDEPDLDKLPFLRCVVKETLRMHPPIPLLLHESAKDCVVGGYFVPKGSRVLVNAWAINRDPGAWKDGDTFRPSRFMPGEREAAGLDLKGGCYEFLPFGSGRRSCPAQGLGQHAVEFAVAQLAHGFNWELPDGMKPAELDMGDIFGLTALRATRLYAVPPHHASHAPCKYCLTCPM

SEQ ID NO: 62064 - protein, 524 aa, Triticum aestivum
  peptide (1)..(524): Ceres Seq. ID no. 14316041
MAASAKIATEFLKDPLIWLFLASLAFVILQRRRLGSAPFPPGPKPLPVIGNMTLVDQLTHRGLAALAKHYGGLLHLRLGRLHVFAVSTPEYAREVLHVQDAAFSNRPATIAVVYLTYGRSDMAFAHNGAYWRQMRKLCVTKIFSRRRAETWLAVRDGYGALARAVGRRSGEAVNLGELIFNLTVGVIFRAAFSTRDEDGLDEFIAILQEFSSLLGLFHIGDFFPWLGWVGRRGFNRRLRTGRGALDKFIDRIIDEHMRRGKNAADPDADLVDGLLAFLAEANPISGKHREDALRFTRDNVRAMIMDMLFGGPETVGSMTEWAMAEMMRSPDDLRRLQQELANVLGLDRTVDEPDLDKLPFLRCVVKETLRMHPPIPLLLHESAKDCVVGGYFVPKGSRVLVNAWAINRDPGAWKDGDTFRPSRFMPGEREAAGLDLKGGCYEFLPFGSGRRSCPAQGLGQHAVEFAVAQLAHGFNWELPDGMKPAELDMGDIFGLTALRATRLYAVPPHHASHAPCKYCLTCPM

SEQ ID NO: 62065 - protein, 473 aa, Triticum aestivum
  peptide (1)..(473): Ceres Seq. ID no. 14316042
MTLVDQLTHRGLAALAKHYGGLLHLRLGRLHVFAVSTPEYAREVLHVQDAAFSNRPATIAVVYLTYGRSDMAFAHNGAYWRQMRKLCVTKIFSRRRAETWLAVRDGYGALARAVGRRSGEAVNLGELIFNLTVGVIFRAAFSTRDEDGLDEFIAILQEFSSLLGLFHIGDFFPWLGWVGRRGFNRRLRTGRGALDKFIDRIIDEHMRRGKNAADPDADLVDGLLAFLAEANPISGKHREDALRFTRDNVRAMIMDMLFGGPETVGSMTEWAMAEMMRSPDDLRRLQQELANVLGLDRTVDEPDLDKLPFLRCVVKETLRMHPPIPLLLHESAKDCVVGGYFVPKGSRVLVNAWAINRDPGAWKDGDTFRPSRFMPGEREAAGLDLKGGCYEFLPFGSGRRSCPAQGLGQHAVEFAVAQLAHGFNWELPDGMKPAELDMGDIFGLTALRATRLYAVPPHHASHAPCKYCLTCPM

SEQ ID NO: 62066 - DNA, 1748 bp, Triticum aestivum
  misc_feature (1)..(1748): Ceres Seq. ID no. 13596034
atacaatttctccattcgtctcctactctcctctcccatccctcgccccccctcctcgccgcaagctctaatccccccaagattagctccaacgaacacgaattactgtggattagtgcgaggctttggccgcggcaaatctggggcggggcggttggaagagtcgcggccgaattgtttggtcgagcagatgatgacggcgaacgcgaaactccagaagcaggcgctgctgccgccgcgtagcccgttcccgacggcagcgtcgccgtccccgtacgcagaccatggcccgatcgcccggccacagggcgccacgcaccaccgctttggccatggccacggccatgggcatcaccagcgcacgtcgtctgagagcatcattgaggagcagccgtcgtggctcgacgacctgctcgacgagcctgagacgcccgtgcgccgcgcggggcaccgcaggtcgtcgagcgactcttttgctctgttcgacggaagcgctgcctccggcgcatttgccaatggttttgatgagattgggggaggagggcaggccgcgccatggggtggcgtgcaggagtactatgccaagccaagctcatacgggaggccgcagggccggccgtgggaacaaggcatgccgaatttggcaggttacaggccagggccgccggtgctggtgagggagaagctgggtgggcatcacgggccactgagtgcgtcgagggatcatgaacatgccatggacaaaagagctcttgatgaacttggggcagagaggaaggatggtgtgctgccaaagtatgcacaatcggaggcggacaccaagcgtgctaaacagcaatatgctcagaggtctcgtgttcgaaaactccagtatattgccgagcttgagggtaaagtccaatcattacagtcagaagggatagaagtgtctgctgaaatggagtttcttactcaacaaaatataatgctagacttggaaaacaaagccttgaagcaaaggctggagagtatagcacaggagcaagtaattaaacgtgttcaacaggagatgtttgagcgggaaattggtcgtctaaggtcattgtatcagcagcagcaacagacaccacagcctcctactcttggtcgtagtaacagcagagaccttgactcgcagtttgcaagcatgtctttgaaacaaaaagaccccaactctgggcgtgacgccgtctctgggcctcttcgtacttagttctttcagcctttttttctcgtgagttccaaaccactcctagaccactcttttgtggctgtgaattcgcgtcaagaatccttcaaggaatgcatcaggaaaggagcagcacatttggaattgtgcccctatcacttggtgaataactctggaaaggctaataactgtggatctgatcttcattctttgggaatatgcacctggtggtcatcctcagctcactgccattgttgatgctcgaccagtcggaggtgtttagtgttttatttgtagctctggatgctgttcgtgcatccctgtaccatttcggatcctagggttctaatttgttcctgtggtcttgtttctctatgttgtcttcttcatgcatcttagtcataatctgcattgcttcgtcagtggaatgtggagcactagttagcatctgatacagatgtttttaaatgtgccacatccttgagaactcatttgttttatcgttggtgattcaataaggtagtgcaaataaggtattagc

SEQ ID NO: 62067 - protein, 409 aa, Triticum aestivum
  peptide (1)..(409): Ceres Seq. ID no. 15221743
YNFSIRLLLSSPIPRPPSSPQALIPPRLAPTNTNYCGLVRGFGRGKSGAGRLEESRPNCLVEQMMTANAKLQKQALLPPRSPFPTAASPSPYADHGPIARPQGATHHRFGHGHGHGHHQRTSSESIIEEQPSWLDDLLDEPETPVRRAGHRRSSSDSFALFDGSAASGAFANGFDEIGGGGQAAPWGGVQEYYAKPSSYGRPQGRPWEQGMPNLAGYRPGPPVLVREKLGGHHGPLSASRDHEHAMDKRALDELGAERKDGVLPKYAQSEADTKRAKQQYAQRSRVRKLQYIAELEGKVQSLQSEGIEVSAEMEFLTQQNIMLDLENKALKQRLESIAQEQVIKRVQQEMFEREIGRLRSLYQQQQQTPQPPTLGRSNSRDLDSQFASMSLKQKDPNSGRDAVSGPLRT

SEQ ID NO: 62068 - protein, 346 aa, Triticum aestivum
  peptide (1)..(346): Ceres Seq. ID no. 15221744
MMTANAKLQKQALLPPRSPFPTAASPSPYADHGPIARPQGATHHRFGHGHGHGHHQRTSSESIIEEQPSWLDDLLDEPETPVRRAGHRRSSSDSFALFDGSAASGAFANGFDEIGGGGQAAPWGGVQEYYAKPSSYGRPQGRPWEQGMPNLAGYRPGPPVLVREKLGGHHGPLSASRDHEHAMDKRALDELGAERKDGVLPKYAQSEADTKRAKQQYAQRSRVRKLQYIAELEGKVQSLQSEGIEVSAEMEFLTQQNIMLDLENKALKQRLESIAQEQVIKRVQQEMFEREIGRLRSLYQQQQQTPQPPTLGRSNSRDLDSQFASMSLKQKDPNSGRDAVSGPLRT

SEQ ID NO: 62069 - protein, 345 aa, Triticum aestivum
  peptide (1)..(345): Ceres Seq. ID no. 15221745
MTANAKLQKQALLPPRSPFPTAASPSPYADHGPIARPQGATHHRFGHGHGHGHHQRTSSESIIEEQPSWLDDLLDEPETPVRRAGHRRSSSDSFALFDGSAASGAFANGFDEIGGGGQAAPWGGVQEYYAKPSSYGRPQGRPWEQGMPNLAGYRPGPPVLVREKLGGHHGPLSASRDHEHAMDKRALDELGAERKDGVLPKYAQSEADTKRAKQQYAQRSRVRKLQYIAELEGKVQSLQSEGIEVSAEMEFLTQQNIMLDLENKALKQRLESIAQEQVIKRVQQEMFEREIGRLRSLYQQQQQTPQPPTLGRSNSRDLDSQFASMSLKQKDPNSGRDAVSGPLRT

SEQ ID NO: 62070 - DNA, 2179 bp, Triticum aestivum
  misc_feature (1)..(2179): Ceres Seq. ID no. 14303627
acacccagcaaccaccaccacccgtctcctctcctctcctctcctcctcgtcttcctccttcggcctcctcctttgcagctaacggaaccgaagaaagcctttcgttgacatggctgctttcatcctcttcctctgcttgctcgtgccgctcgtcctcgcgtgcgccgtccgcgccaggaagggcgccgccgggcgggcgtcgtcgggcggcggcggcaaaaagggcggcaccagcctgccgctgccgccggggtcgatggggtggccgtacgtgggcgagaccacgcagctctactcctccaagaaccccaacgtcttcttcgccaggaagcggaacaagtacgggcccatcttcaagacgcacatcctcgggtgcccctgcgtcatggtgtccagcccggaggccgccaagttcgtgctcgtcactcaggcgcacctcttcaagcctaccttcccggccagcaaggagcggatgctgggcccccaggccatcttcttccagcagggggactaccatgcccacctccgccgtctcgtctcacgcgccttctctcccgaggccatccgcggttccgtccctgccatcgaggctatcgccctccgctccctcggctcctgggaagacctgcaagtcaacaccttccaagagatgaagacttacgctctgaatgtggcattgctgtccatcttcggcgaggaggagatgcagtacatcgaggagctgaagcagtgctacctgacgctggagaaggggtacaactcgatgccggtgaacctgccgggcacgctgttccacaaggccatgaaggcccgaaagcggctgggcgccattgtggcccacatcatctccgcccggcgcgagcgcgagcgcgggagcgacctcctgggctccttcatggacggccgcgaggcgctcaccgacgaccagatcgccgacaacgccatcggcgtcatcttcgccgcgcgcgacaccaccgccagcgtgctcacgtggatggtcaagttcctcggcgacaaccccgccgtcctcaaagccgtcaccgaagagcacgctgagatcgcgagggagaaggcgttgtccggcgagccactgtcgtgggccgacacgcggcggatgcggatgacgggccgggtgatccaggagacgatgcgggtggcgtccatcctctccttcaccttcagggaggccgtggaggacgtggagtaccaagggtacctgattcccaagggctggaaagtgcttcccctgttccggaacatccaccacaaccccgaccacttcccctcccctgaaaagttcgatccttcacgattcgaggtggcccccaagcccaacacgttcatgccgttcgggaacgggacccactcgtgccccggcaacgagctggccaagctggagatgctcgtcctctgccaccacctcgccaccaagtacagatggtccacctccaagtccgagagcggcgtccagttcggccccttcgccctccccatcaacggcctccccatgaccttcacccgcaaggacgacaagaacaaagcctgagccatccatccatccatccatccatcgcctcctcctcgttcccaaagggaaatcaacagcgcgatagaggcgacggcgtggcacatgcgagcgagctggatcggctccgtccgtgtccgtgccggtcgccgtcggaggggacacttgtagccgtgggcgccgcggcgggagcgggagcgggctggcggaggccgatcggagagagcacgggccgtcaaagtcctttgtacagattcttcagccaggaccatgacggctgggcgagacaagaccaagaaaaatcccactcttcaaaaacacacacacgtaggcattctcagctagggagatccggcgccacaaagaagtggcgccgaactgtaaaaccaaccattttttatccttttttccttcagatttttatttttttggcaacacctatactagtataggaggaggagagaagacagcagactgacaggccctgattgggatgtaagataggctgcccgcctgaaagcaggctggcagctaggccgaataatcaatggatcgatcgctcgcggcaaagggccaaaaggaggcccccgggagagcgacccctctgtattgtttgttacacgtcaatgcagctggaaatggctttcttgtgg

SEQ ID NO: 62071 - protein, 478 aa, Triticum aestivum
  peptide (1)..(478): Ceres Seq. ID no. 14303628
MAAFILFLCLLVPLVLACAVRARKGAAGRASSGGGGKKGGTSLPLPPGSMGWPYVGETTQLYSSKNPNVFFARKRNKYGPIFKTHILGCPCVMVSSPEAAKFVLVTQAHLFKPTFPASKERMLGPQAIFFQQGDYHAHLRRLVSRAFSPEAIRGSVPAIEAIALRSLGSWEDLQVNTFQEMKTYALNVALLSIFGEEEMQYIEELKQCYLTLEKGYNSMPVNLPGTLFHKAMKARKRLGAIVAHIISARRERERGSDLLGSFMDGREALTDDQIADNAIGVIFAARDTTASVLTWMVKFLGDNPAVLKAVTEEHAEIAREKALSGEPLSWADTRRMRMTGRVIQETMRVASILSFTFREAVEDVEYQGYLIPKGWKVLPLFRNIHHNPDHFPSPEKFDPSRFEVAPKPNTFMPFGNGTHSCPGNELAKLEMLVLCHHLATKYRWSTSKSESGVQFGPFALPINGLPMTFTRKDDKNKA

SEQ ID NO: 62072 - protein, 429 aa, Triticum aestivum
  peptide (1)..(429): Ceres Seq. ID no. 14303629
MGWPYVGETTQLYSSKNPNVFFARKRNKYGPIFKTHILGCPCVMVSSPEAAKFVLVTQAHLFKPTFPASKERMLGPQAIFFQQGDYHAHLRRLVSRAFSPEAIRGSVPAIEAIALRSLGSWEDLQVNTFQEMKTYALNVALLSIFGEEEMQYIEELKQCYLTLEKGYNSMPVNLPGTLFHKAMKARKRLGAIVAHIISARRERERGSDLLGSFMDGREALTDDQIADNAIGVIFAARDTTASVLTWMVKFLGDNPAVLKAVTEEHAEIAREKALSGEPLSWADTRRMRMTGRVIQETMRVASILSFTFREAVEDVEYQGYLIPKGWKVLPLFRNIHHNPDHFPSPEKFDPSRFEVAPKPNTFMPFGNGTHSCPGNELAKLEMLVLCHHLATKYRWSTSKSESGVQFGPFALPINGLPMTFTRKDDKNKA

SEQ ID NO: 62073 - protein, 386 aa, Triticum aestivum
  peptide (1)..(386): Ceres Seq. ID no. 14303630
MVSSPEAAKFVLVTQAHLFKPTFPASKERMLGPQAIFFQQGDYHAHLRRLVSRAFSPEAIRGSVPAIEAIALRSLGSWEDLQVNTFQEMKTYALNVALLSIFGEEEMQYIEELKQCYLTLEKGYNSMPVNLPGTLFHKAMKARKRLGAIVAHIISARRERERGSDLLGSFMDGREALTDDQIADNAIGVIFAARDTTASVLTWMVKFLGDNPAVLKAVTEEHAEIAREKALSGEPLSWADTRRMRMTGRVIQETMRVASILSFTFREAVEDVEYQGYLIPKGWKVLPLFRNIHHNPDHFPSPEKFDPSRFEVAPKPNTFMPFGNGTHSCPGNELAKLEMLVLCHHLATKYRWSTSKSESGVQFGPFALPINGLPMTFTRKDDKNKA

SEQ ID NO: 62074 - DNA, 1577 bp, Triticum aestivum
  misc_feature (1)..(1577): Ceres Seq. ID no. 13596512
ccttccccttctcctctccaactgctagatctagagtagccccgttaaagcccaaacaaaaaccccgccgcgagatctgcgcatctcgccacaccaccaccacgacggccatggcggcgccgcgcgtcctcctcctcctcgccgccgcggccatcctcgccgtcgcctccctcggggacgcttcgggcgagggcccccgcgggcgcaagctgctggtgctcgtcgacgatctggccgtccgctcatcccactcggccttcttcggctcgcttcaggcccgcgggctagatctggagttccgcctcgccgacgaccccaagctctcgctccaccgctacggtcagtacctctacgacggcctcgtcctcttcgccccatcgaccccgcgtttcggcggatcggtggaccagaatgctgttctggagtttatcgatgctgggcacgatatgattctggcagcagatcattcggcttcagatctgatccgcggcatcgcgacggagtgtggggttgactttgatgaggacccggaagcaatggttattgaccacatcaattatgcctccagtgaggttgaaggtgaccacaccttgattgctggcgatgacctgattcagtcagatgtgatattgggatccaaaaagattgaggctcctgttctgttccgagggattgcgcatgcggctaatccatccaacagcttggttttaaaggttctatctgcctcgccatcagcgtattcagcaaacccggaggctaagctggcatccgttccatctctcacagggtcggccatatcactggtttctgttatgcaggctaggaataatgctcgtgtgttaatatctggatcactggatttgtttagcaacaggttcctaaagtctggtgtgcagaaggctggcagcaaaatgagccatgacaaagctggaaatgaacaatttgtgacagagacgagcaaatgggtcttccatgagaggggtcatctgaaggcagtgaatgtgatgcaccataaggttggggagacaaatgagcctagcatgtaccgcatcaatgatgacttggaatactcagttgagatatatgaatggtctggtacaagttggaagccatatgttgctgatgatgttcagattcagtttttcatgatgagcccttatgttctgaaaaatatgtcaactgacaaatcggctgtatattcagcatccttcaaagttccagatgtttatggagttttccagttcaaggttgagtaccaaaggcttggatacactggcctctctcttgcaaagcagattccagtccgtccatacaggcatgacgagtatgagaggttcataacttcagcgtttccatactatgctgcctcattttcaacaatgggagccttcttcatattctcagttgcgtacctgtatcacaaatagatagctcatcaagtagtggaagtaaatcaaggcggtgatggaattgtgatgtcataagcatggtgatcttaggtgcaattttatggaaccatctttttgtagcgccaatctgtagtacctttatttttaagaaatgggcttctccctgcc

SEQ ID NO: 62075 - protein, 474 aa, Triticum aestivum
  peptide (1)..(474): Ceres Seq. ID no. 15221911
FPFSSPTARSRVAPLKPKQKPRREICASRHTTTTTAMAAPRVLLLLAAAAILAVASLGDASGEGPRGRKLLVLVDDLAVRSSHSAFFGSLQARGLDLEFRLADDPKLSLHRYGQYLYDGLVLFAPSTPRFGGSVDQNAVLEFIDAGHDMILAADHSASDLIRGIATECGVDFDEDPEAMVIDHINYASSEVEGDHTLIAGDDLIQSDVILGSKKIEAPVLFRGIAHAANPSNSLVLKVLSASPSAYSANPEAKLASVPSLTGSAISLVSVMQARNNARVLISGSLDLFSNRFLKSGVQKAGSKMSHDKAGNEQFVTETSKWVFHERGHLKAVNVMHHKVGETNEPSMYRINDDLEYSVEIYEWSGTSWKPYVADDVQIQFFMMSPYVLKNMSTDKSAVYSASFKVPDVYGVFQFKVEYQRLGYTGLSLAKQIPVRPYRHDEYERFITSAFPYYAASFSTMGAFFIFSVAYLYHK

SEQ ID NO: 62076 - protein, 438 aa, Triticum aestivum
  peptide (1)..(438): Ceres Seq. ID no. 15221912
MAAPRVLLLLAAAAILAVASLGDASGEGPRGRKLLVLVDDLAVRSSHSAFFGSLQARGLDLEFRLADDPKLSLHRYGQYLYDGLVLFAPSTPRFGGSVDQNAVLEFIDAGHDMILAADHSASDLIRGIATECGVDFDEDPEAMVIDHINYASSEVEGDHTLIAGDDLIQSDVILGSKKIEAPVLFRGIAHAANPSNSLVLKVLSASPSAYSANPEAKLASVPSLTGSAISLVSVMQARNNARVLISGSLDLFSNRFLKSGVQKAGSKMSHDKAGNEQFVTETSKWVFHERGHLKAVNVMHHKVGETNEPSMYRINDDLEYSVEIYEWSGTSWKPYVADDVQIQFFMMSPYVLKNMSTDKSAVYSASFKVPDVYGVFQFKVEYQRLGYTGLSLAKQIPVRPYRHDEYERFITSAFPYYAASFSTMGAFFIFSVAYLYHK

SEQ ID NO: 62077 - protein, 326 aa, Triticum aestivum
  peptide (1)..(326): Ceres Seq. ID no. 15221913
MILAADHSASDLIRGIATECGVDFDEDPEAMVIDHINYASSEVEGDHTLIAGDDLIQSDVILGSKKIEAPVLFRGIAHAANPSNSLVLKVLSASPSAYSANPEAKLASVPSLTGSAISLVSVMQARNNARVLISGSLDLFSNRFLKSGVQKAGSKMSHDKAGNEQFVTETSKWVFHERGHLKAVNVMHHKVGETNEPSMYRINDDLEYSVEIYEWSGTSWKPYVADDVQIQFFMMSPYVLKNMSTDKSAVYSASFKVPDVYGVFQFKVEYQRLGYTGLSLAKQIPVRPYRHDEYERFITSAFPYYAASFSTMGAFFIFSVAYLYHK

SEQ ID NO: 62078 - DNA, 613 bp, Triticum aestivum
  misc_feature (1)..(613): Ceres Seq. ID no. 13654722
acaataaccacaaccacagccagcaagatctagtcaaagaaacacatcaatccagagcgtccaccagagtcactaacttgtccagccgcagcaatggcggtgcggtggccatcgcccgccgtggccgcgttgtggatcggcgcgagcctcctagtcctgtgcacgctcatggcgtcgtcggcgtcagcccaggcgccgccgccacaggtgcgtaaggtgcccaagggcagcaacctggtggtgatcaagccgggggtcgggaagcgcaacagcaagttcacctgcaccgacaccaagaagaagcggcccgggtgcgaggccacctgccccagccgctgccccaaagagtgcctcgtcctctgcccatcctgcatgaccttctgcctgtgtgacttctacgcgggggcgtcgtgcggcgacccgcgcttcaccggcggcgacggcaacaacttctacttccacggcaagaagaaccaggacttctgcatcctctccgacgacgacctccacatcaacgcgcacttcatcggcaaccacaaccccgcgacgagccgcgacttcacctggatccaggccnnngntgtcatgttcgcccaccaccgcctccacctcg

SEQ ID NO: 62079 - protein, 173 aa, Triticum aestivum
  peptide (1)..(173): Ceres Seq. ID no. 13654723
  misc_feature (162)..(162): Xaa is any aa, unknown or other
  misc_feature (163)..(163): Xaa is any aa, unknown or other
MAVRWPSPAVAALWIGASLLVLCTLMASSASAQAPPPQVRKVPKGSNLVVIKPGVGKRNSKFTCTDTKKKRPGCEATCPSRCPKECLVLCPSCMTFCLCDFYAGASCGDPRFTGGDGNNFYFHGKKNQDFCILSDDDLHINAHFIGNHNPATSRDFTWIQAXXVMFAHHRLHL

SEQ ID NO: 62080 - protein, 148 aa, Triticum aestivum
  peptide (1)..(148): Ceres Seq. ID no. 13654724
  misc_feature (137)..(137): Xaa is any aa, unknown or other
  misc_feature (138)..(138): Xaa is any aa, unknown or other
MASSASAQAPPPQVRKVPKGSNLVVIKPGVGKRNSKFTCTDTKKKRPGCEATCPSRCPKECLVLCPSCMTFCLCDFYAGASCGDPRFTGGDGNNFYFHGKKNQDFCILSDDDLHINAHFIGNHNPATSRDFTWIQAXXVMFAHHRLHL

SEQ ID NO: 62081 - DNA, 1074 bp, Triticum aestivum
  misc_feature (1)..(1074): Ceres Seq. ID no. 13582893
aaacataccacgcctccccgccaccttcggaacgccacagcgcacagcccatccccatccccatccaccaccgcgcgctctccgacggccatcgaacgccatggcgctcctcctcccccgcacggcgcggctcgcgctcctctccgccggccctcgagcctactcctccaccgtcggcgcggcgggaacagcggcgccggcgccgtacggtggcggggcgcccgcgccggcgccgatgccgaaggccgcggagttcgtggtgtccaaggtggacgatctgatgaactgggcccggcggggctcgatctggcccatgacgttcggcctcgcgtgctgcgccgtggagatgatgcacgccggcgccgcccgctacgacttcgaccgcttcggcgtcatcttccgcccctcgccgcgccagtccgactgcatgatcgtcgccggcacgctcaccaacaagatggcgcccgcgctccgcaaggtttatgaccagatgccagagcctcggtgggtgatctcgatgggcagctgcgccaatggcggcggatactaccactactcatactccgtcgtgcgtgggtgcgaccggatcgttcccgtggacatctacgtccctgggtgccctccaacagctgaagctctcctgtatggcgttctccagttgcagaagaagatcaacaggcgcaaggatttccttcactggtgggagaagtgaattagcactttggaccatcaggttcatgaggatgcagctcttctacgtattgttgggacgttgggttctttcgtttctgtttggtggaataagcgaagcatgtgcttcctggtccgtggtaattggtaagtaagtagcttgtgtcttgtgtgtgctgggtgggttcctaccttgcttcacaggccatgaaaaagctacgtactggtggttgtggttgaacaggtgatgcttatggtttaccccagtctgtactggtatattgtatatctgtacagtacatgctggtggttgaacagttgatgcttctggaattgtatgtgttctatgcaattgtgataatgtacactgttggggttgtgtgt

SEQ ID NO: 62082 - protein, 236 aa, Triticum aestivum
  peptide (1)..(236): Ceres Seq. ID no. 13582894
NIPRLPATFGTPQRTAHPHPHPPPRALRRPSNAMALLLPRTARLALLSAGPRAYSSTVGAAGTAAPAPYGGGAPAPAPMPKAAEFVVSKVDDLMNWARRGSIWPMTFGLACCAVEMMHAGAARYDFDRFGVIFRPSPRQSDCMIVAGTLTNKMAPALRKVYDQMPEPRWVISMGSCANGGGYYHYSYSVVRGCDRIVPVDIYVPGCPPTAEALLYGVLQLQKKINRRKDFLHWWEK

SEQ ID NO: 62083 - protein, 203 aa, Triticum aestivum
  peptide (1)..(203): Ceres Seq. ID no. 13582895
MALLLPRTARLALLSAGPRAYSSTVGAAGTAAPAPYGGGAPAPAPMPKAAEFVVSKVDDLMNWARRGSIWPMTFGLACCAVEMMHAGAARYDFDRFGVIFRPSPRQSDCMIVAGTLTNKMAPALRKVYDQMPEPRWVISMGSCANGGGYYHYSYSVVRGCDRIVPVDIYVPGCPPTAEALLYGVLQLQKKINRRKDFLHWWEK

SEQ ID NO: 62084 - protein, 161 aa, Triticum aestivum
  peptide (1)..(161): Ceres Seq. ID no. 13582896
KHTTPPRHLRNATAHSPSPSPSTTARSPTAIERHGAPPPPHGAARAPLRRPSSLLLHRRRGGNSGAGAVRWRGARAGADAEGRGVRGVQGGRSDELGPAGLDLAHDVRPRVLRRGDDARRRRPLRLRPLRRHLPPLAAPVRLHDRRRHAHQQDGARAPQGL

SEQ ID NO: 62085 - DNA, 1712 bp, Triticum aestivum
  misc_feature (1)..(1712): Ceres Seq. ID no. 15169670
tttccttcttctccccaccccgcgcggcgcctcctctcctctcttcccctcccccctcgccgccgccgccgccgccagcgcctcctccaccaccgctcgtcctcctatacacaggtgcggaggaggagatgttggtgctcttcgagacgcccgcggggttcgccctcttcaaggtgctggacgaggggaagctcagcagcgtcgaggatctgtggaaggactttgcctcgtcggacaaagcaaggaaggtggttgagctgaaggctttcaacaagtttgaaaatacttctgatgctctttcagccgcaactttgctgattgatagcaagcccagcaagggtctgcgcaagttcctgcagaagcactgtgatggtgaaacattggctgttgctgattccaaacttgggaatgccatcaaagaaaagctgcaaattgattgccttcacaactctgctgttatggaactgatgagagggctgaggaaccagctcactgaacttatgtctggactagctgagcatgatctaggtccaatgagcctaggattgtcccacagcttgtctaggtataaactcaagttcagccctgaaaaggttgatactatgatcattcaggccattggcttgttggatgatcttgacaaggagcttaacacttacgctatgagggtccgtgaatggtacggttggcactttccggagctcacaaaaattgttgcagataacatccattatgcgaaagctgtgaagatgatgggcaatcgtgttaatgcagttaaccttgacttctctgagatacttccagaagaagtggaagcagagctgaaggaggcagctgtaatttccatgggaacagaagtcaatgatcttgacctctcaaacattagggaactgtgtgatcaagtcctggctctttctgagtacagagcccagctctatgactatctaaaaagtagaatgaataccattgctcccaacttgactgcacttgttggtgaacttgttggcgctcgccttatttcccatggtggtagtttgatgaatctggcgaagcagcctggcagcacgattcagattctgggggcagagaaggccttattcagagctctgaagacaaagcatgctacaccaaagtatggtctcatctatcatgcatcattaattggacaggcggctcccaagcacaagggaaagatctctcgttcgcttgctgctaagagtgcacttgccataagatatgacgcccttgctgacggtgacgataactccatgggtcttgaaagcaggatcaagcttgaaacacggctccgagttcttgagggtaaagaacttgggaggtctgctggttctacgaaaggaaagcccaagatagaagcgtatgaaaaggaccggaagggtggtggtgctctgatcactcccgctaaaacttacaactcagcagcagatcttgtgcttggacaaaccactgaagaaacgccaaagaagtcagaagttgcttcaaagaagaggaagcaccaagaggaagaacctactgcggaggcagctgaagaggatggcgagcaggagaaagagaagtccaagaagaagaagaagaaatccaaggacatcgaggagacccccgcagccgtcaccgacgctagcgagaagaagaagaaaaagaagagcaaggaggccgaggagacccctgcagccgacgccgacggcgagaagaag

SEQ ID NO: 62086 - protein, 570 aa, Triticum aestivum
  peptide (1)..(570): Ceres Seq. ID no. 15169671
SFFSPPRAAPPLLSSPPPSPPPPPPAPPPPPLVLLYTGAEEEMLVLFETPAGFALFKVLDEGKLSSVEDLWKDFASSDKARKVVELKAFNKFENTSDALSAATLLIDSKPSKGLRKFLQKHCDGETLAVADSKLGNAIKEKLQIDCLHNSAVMELMRGLRNQLTELMSGLAEHDLGPMSLGLSHSLSRYKLKFSPEKVDTMIIQAIGLLDDLDKELNTYAMRVREWYGWHFPELTKIVADNIHYAKAVKMMGNRVNAVNLDFSEILPEEVEAELKEAAVISMGTEVNDLDLSNIRELCDQVLALSEYRAQLYDYLKSRMNTIAPNLTALVGELVGARLISHGGSLMNLAKQPGSTIQILGAEKALFRALKTKHATPKYGLIYHASLIGQAAPKHKGKISRSLAAKSALAIRYDALADGDDNSMGLESRIKLETRLRVLEGKELGRSAGSTKGKPKIEAYEKDRKGGGALITPAKTYNSAADLVLGQTTEETPKKSEVASKKRKHQEEEPTAEAAEEDGEQEKEKSKKKKKKSKDIEETPAAVTDASEKKKKKKSKEAEETPAADADGEKK

SEQ ID NO: 62087 - protein, 528 aa, Triticum aestivum
  peptide (1)..(528): Ceres Seq. ID no. 15169672
MLVLFETPAGFALFKVLDEGKLSSVEDLWKDFASSDKARKVVELKAFNKFENTSDALSAATLLIDSKPSKGLRKFLQKHCDGETLAVADSKLGNAIKEKLQIDCLHNSAVMELMRGLRNQLTELMSGLAEHDLGPMSLGLSHSLSRYKLKFSPEKVDTMIIQAIGLLDDLDKELNTYAMRVREWYGWHFPELTKIVADNIHYAKAVKMMGNRVNAVNLDFSEILPEEVEAELKEAAVISMGTEVNDLDLSNIRELCDQVLALSEYRAQLYDYLKSRMNTIAPNLTALVGELVGARLISHGGSLMNLAKQPGSTIQILGAEKALFRALKTKHATPKYGLIYHASLIGQAAPKHKGKISRSLAAKSALAIRYDALADGDDNSMGLESRIKLETRLRVLEGKELGRSAGSTKGKPKIEAYEKDRKGGGALITPAKTYNSAADLVLGQTTEETPKKSEVASKKRKHQEEEPTAEAAEEDGEQEKEKSKKKKKKSKDIEETPAAVTDASEKKKKKKSKEAEETPAADADGEKK

SEQ ID NO: 62088 - protein, 418 aa, Triticum aestivum
  peptide (1)..(418): Ceres Seq. ID no. 15169673
MELMRGLRNQLTELMSGLAEHDLGPMSLGLSHSLSRYKLKFSPEKVDTMIIQAIGLLDDLDKELNTYAMRVREWYGWHFPELTKIVADNIHYAKAVKMMGNRVNAVNLDFSEILPEEVEAELKEAAVISMGTEVNDLDLSNIRELCDQVLALSEYRAQLYDYLKSRMNTIAPNLTALVGELVGARLISHGGSLMNLAKQPGSTIQILGAEKALFRALKTKHATPKYGLIYHASLIGQAAPKHKGKISRSLAAKSALAIRYDALADGDDNSMGLESRIKLETRLRVLEGKELGRSAGSTKGKPKIEAYEKDRKGGGALITPAKTYNSAADLVLGQTTEETPKKSEVASKKRKHQEEEPTAEAAEEDGEQEKEKSKKKKKKSKDIEETPAAVTDASEKKKKKKSKEAEETPAADADGEKK

SEQ ID NO: 62089 - DNA, 1470 bp, Triticum aestivum
  misc_feature (1)..(1470): Ceres Seq. ID no. 12613795
agcggcgttccagtgtgtgtgtgtcacccacgacacgacgcctcccctaaacctccgcgtcgccattcccccctccagcccgccgcgatggccggaggcggcggcaagccgttcggggacaacgtgttcgccggccacgcggccgccggcgccgcggcgatcagcgcctccgcggtcgccgtccaccccctcgacaccgtcaagagcctcctccagttgagcgcggcggggcagaagcagaagatggagatccgccatgcggtggaccggctcatgcacgtctccggccctgcaggtctttacagtggcattggatggtcaatattaggtaaactgcctggtttgggagcgcgttttgggacctatgagcttttaacagccttctataaagatggcagggaggacaaccatgttaattattctgaggcaatgttggctggcataactgctggtgctgtagaggcatttgtgtgcacaccatttgaacttctcaaacttcggtcccaagttggttctgccatacctatgaaagctacgaaccctgctaatgttgtacaggagtcgtttccactgctttccaagctattacctggtcatgtccctgacatgagagtatggaatggcagtgtcagtctgttgtccaatctttccccaaagcatcctgacatgatgggtgccctgaaacagcacccatggatgctgactggctctgggaagcccccgttaccctctgatgttcaggtgccttcgagagtgatagcacttgaaggatggggtgctttatggagaggacttaggccaggggtagcccgagactgtgtctttagtggaatgttcttttcttgttggcaattcatacatacagcgatgcttacttggtagtctgttaacatgaaccctgaacccaggaatttagaagaagcaggtcctgtaccccctttagcttctagtcttgctgcaggcttctctggagttgtagcagctgctgcttcacatacttttgatactgccaaaagtcgttcacagtgcactgtgatacctaagtatatagcaatggagaggaggtttcttaaatggagagcaccaggaatgtggatagagagagtgacgggaacatcacctgctgataggaatgttctatttcgtggcattggactacggatggcgcgcagtggaatcgcatcttttgtacttgttgggtcctactatttagccgtagatcagctcttgtagatggcagtcagagaaatcattaatgaaattcaaacacctaaactatgtggtacctttttcgtctgaacaaccagagaagaggtaactatgtggtaactttttcgtctcttccagtcttaattggagttgagtgctccaggatagaattttggttactaatgtaaatgtttataacaaacagaattgaaggttcgcctttggttttgttgcttgtgttgaagagatattaagtgtttt

SEQ ID NO: 62090 - protein, 293 aa, Triticum aestivum
  peptide (1)..(293): Ceres Seq. ID no. 12613796
SGVPVCVCHPRHDASPKPPRRHSPLQPAAMAGGGGKPFGDNVFAGHAAAGAAAISASAVAVHPLDTVKSLLQLSAAGQKQKMEIRHAVDRLMHVSGPAGLYSGIGWSILGKLPGLGARFGTYELLTAFYKDGREDNHVNYSEAMLAGITAGAVEAFVCTPFELLKLRSQVGSAIPMKATNPANVVQESFPLLSKLLPGHVPDMRVWNGSVSLLSNLSPKHPDMMGALKQHPWMLTGSGKPPLPSDVQVPSRVIALEGWGALWRGLRPGVARDCVFSGMFFSCWQFIHTAMLTW

SEQ ID NO: 62091 - protein, 264 aa, Triticum aestivum
  peptide (1)..(264): Ceres Seq. ID no. 12613797
MAGGGGKPFGDNVFAGHAAAGAAAISASAVAVHPLDTVKSLLQLSAAGQKQKMEIRHAVDRLMHVSGPAGLYSGIGWSILGKLPGLGARFGTYELLTAFYKDGREDNHVNYSEAMLAGITAGAVEAFVCTPFELLKLRSQVGSAIPMKATNPANVVQESFPLLSKLLPGHVPDMRVWNGSVSLLSNLSPKHPDMMGALKQHPWMLTGSGKPPLPSDVQVPSRVIALEGWGALWRGLRPGVARDCVFSGMFFSCWQFIHTAMLTW

SEQ ID NO: 62092 - protein, 212 aa, Triticum aestivum
  peptide (1)..(212): Ceres Seq. ID no. 12613798
MEIRHAVDRLMHVSGPAGLYSGIGWSILGKLPGLGARFGTYELLTAFYKDGREDNHVNYSEAMLAGITAGAVEAFVCTPFELLKLRSQVGSAIPMKATNPANVVQESFPLLSKLLPGHVPDMRVWNGSVSLLSNLSPKHPDMMGALKQHPWMLTGSGKPPLPSDVQVPSRVIALEGWGALWRGLRPGVARDCVFSGMFFSCWQFIHTAMLTW

SEQ ID NO: 62093 - DNA, 1597 bp, Triticum aestivum
  misc_feature (1)..(1597): Ceres Seq. ID no. 14302251
acgcaagtgcaccgaacgacggtcgtcgtggcctgttcgggctcgcaaatccccacacgccactcctcctcgtccccgtagaaaaggacacgcgtagccttcgtccacggctccacgaggcagaggcagcagccgcggcactcgagcaagcaagcttttgtactctgctccagtcatccgtcgtctccctttccgccgagatgcagcgccggctcccggcgctcctccgccgcgcagcgggcgcggggcccgcgcgccggtggctctccgcctcgtcctccctcctcttcgacgacacccaggagcagttcaaggagagcgtgcaccggttcgcgcaggagcacatcgcgccgcacgccgccgccatcgacgcctccaaccacttccccaaggagaagaatctgtggaagctcatgggggacttcaacctgcacggcctcacctcgccagaggagtacggagggctcgggctcggttacatgtaccactgcatcgccatggaggagatcagcagggcgtccgggtcggtcggcctttcctacggtgcacactcaaatctctgcatcaaccagctggtccgtcatggcagccctgcccaaaaggaaaagtatttgccgaagcttatcagtggggagcatattggggcattggcgatgagtgaaccaaactctggctctgatgttgtcagtatgaagtgcaaagctgagaaagtagatggcggctatgtcattaacgggaacaagatgtggtgcacaaatggtccgtctgctcagacattggttgtttacgcgaaaacagatataactgctggatcgaaaggaataactgcattcataattgagaagggaatgcccgggttcagtactgcccagaagttggacaaacttggcatgcgaggaagtgacacatgtgagcttgtctttgagaactgctttgtgcctcaagagaatgttcttggtgaagaagggaaaggtgtttatgtcatgatgtctggtcttgatctggaaagacttgtattagctgggggccctattgggctcatgcaggcatgccttgatgttgttcttccttatgttcgacaaagggagcaatttggccgtccgattggtgaatttcagttcttacaggggaaaatggcagatatgtacacctccttgcaatcatcaagatcatttgtatactcagttgccagggactgtgataatggcaaagttgaccgtaaggattgtgcaggagtgatcctctttgctgctgaaagggcaacacaagttgcacttgaggcaatccagtgtcttggtggcaatggatacataaatgagtacccaactggccgtctcctgagagatgcaaaactgtttgagattggagctggcactagtgagatcagaagaatgataattggtcgtgaactgttcaaagaggactgagattattcttctggaagccagctatcagtgcatattctaacttgaggaggtgagcaggattagaccattagtgaactgtccctgatgttcaatgtttgatgatgttctatccaatccttctcatacttctgtacatgtccaacattcttgcaaataaagttcaatcttct

SEQ ID NO: 62094 - protein, 474 aa, Triticum aestivum
  peptide (1)..(474): Ceres Seq. ID no. 14302252
ASAPNDGRRGLFGLANPHTPLLLVPVEKDTRSLRPRLHEAEAAAAALEQASFCTLLQSSVVSLSAEMQRRLPALLRRAAGAGPARRWLSASSSLLFDDTQEQFKESVHRFAQEHIAPHAAAIDASNHFPKEKNLWKLMGDFNLHGLTSPEEYGGLGLGYMYHCIAMEEISRASGSVGLSYGAHSNLCINQLVRHGSPAQKEKYLPKLISGEHIGALAMSEPNSGSDVVSMKCKAEKVDGGYVINGNKMWCTNGPSAQTLVVYAKTDITAGSKGITAFIIEKGMPGFSTAQKLDKLGMRGSDTCELVFENCFVPQENVLGEEGKGVYVMMSGLDLERLVLAGGPIGLMQACLDVVLPYVRQREQFGRPIGEFQFLQGKMADMYTSLQSSRSFVYSVARDCDNGKVDRKDCAGVILFAAERATQVALEAIQCLGGNGYINEYPTGRLLRDAKLFEIGAGTSEIRRMIIGRELFKED

SEQ ID NO: 62095 - protein, 408 aa, Triticum aestivum
  peptide (1)..(408): Ceres Seq. ID no. 14302253
MQRRLPALLRRAAGAGPARRWLSASSSLLFDDTQEQFKESVHRFAQEHIAPHAAAIDASNHFPKEKNLWKLMGDFNLHGLTSPEEYGGLGLGYMYHCIAMEEISRASGSVGLSYGAHSNLCINQLVRHGSPAQKEKYLPKLISGEHIGALAMSEPNSGSDVVSMKCKAEKVDGGYVINGNKMWCTNGPSAQTLVVYAKTDITAGSKGITAFIIEKGMPGFSTAQKLDKLGMRGSDTCELVFENCFVPQENVLGEEGKGVYVMMSGLDLERLVLAGGPIGLMQACLDVVLPYVRQREQFGRPIGEFQFLQGKMADMYTSLQSSRSFVYSVARDCDNGKVDRKDCAGVILFAAERATQVALEAIQCLGGNGYINEYPTGRLLRDAKLFEIGAGTSEIRRMIIGRELFKED

SEQ ID NO: 62096 - protein, 337 aa, Triticum aestivum
  peptide (1)..(337): Ceres Seq. ID no. 14302254
MGDFNLHGLTSPEEYGGLGLGYMYHCIAMEEISRASGSVGLSYGAHSNLCINQLVRHGSPAQKEKYLPKLISGEHIGALAMSEPNSGSDVVSMKCKAEKVDGGYVINGNKMWCTNGPSAQTLVVYAKTDITAGSKGITAFIIEKGMPGFSTAQKLDKLGMRGSDTCELVFENCFVPQENVLGEEGKGVYVMMSGLDLERLVLAGGPIGLMQACLDVVLPYVRQREQFGRPIGEFQFLQGKMADMYTSLQSSRSFVYSVARDCDNGKVDRKDCAGVILFAAERATQVALEAIQCLGGNGYINEYPTGRLLRDAKLFEIGAGTSEIRRMIIGRELFKED

SEQ ID NO: 62097 - DNA, 1717 bp, Triticum aestivum
  misc_feature (1)..(1717): Ceres Seq. ID no. 13596035
cccaaacccaaacacaggcccatcatctcctggtcccgacctcgcactccccatcccagcatccaactccagctccacctcgccgccgcccccaccatgtacggcgtcggcgtcggcggcggcggaggcgggttcaacgcgccgtccacggcctccgggcggcgcaaaaaccaggaggacgacgacgacgaggaggaggaggagaccggcgacggccgcgtcctcgaggcgtgggagcgcgcctacgccgacgaccgctcgtgggaggcgctgcaggaggacgagtccggcctgctccgccccatcgacaccaagaacctcgtccactcgcagtaccgccgccgcctcctgctccgctccgcggccgccgcggcccgcatccagaagggcctcatccgctacctctacatcgtcatcgacctctccaaggcagcttcagaaatggattatcgccctagtcgaatggctgttgttgctaagtgtgctgaggcattcataagggaattcttcgatcagaatcccttgagccatgttgggttagtgacaattaaagatggcatttctcatcgacttacggagattggagggagtccagagtcacagattaacgcattgatgggcaagcttgagtgttctggtgattcatctctgcagaatgctctagaacttgtcaatggttacttgaaccagattccttcctatggtcacaaggaagtattatttttgtactccgcactgaatacatgtgatcctggtgatatcatggagacaatagaaaaatgcaagaaatccaaagttagatgttcggttattgggcttgctgcagaaattttcatttgcaagcatctctgtgaagagactggtggatcatatacggttgcactagacgagtcccacttcaaggaattgctgcttgaacatgctcctccaccacctgccattgcagagtatgctgcagctaatttgattaagatgggttttccacagaggggagcagaggatcttatctccatctgctcttgtcataagaaaattaaatctggtgctgaaggttacatatgtcccagatgcaaagttaatgtctgtgagcttccgacggagtgccgaacatgtggtctaacacttgttagttctccacatctggcacgatcctatcaccatctcttccctgtagcgccatttgatgaggtgacgttcaaattaggtcaaaagggaggacaaaattgttttggctgccagcagagtctcattaacaccggtggccagtctaatatccatgtctgctgtccaaaatgcaagcaccacttctgcttcgactgtgatatttacatccatgagagcttgcataactgccccggttgcgagagtcagtgcagttcatctcggtagagacgccgccatcatgtgcattgttcaggtgttgatccttttttttgagtcggagctacgcattgttgtaagctttctggtgccctgacgttgatgacagtattgctggacaatcgaacggtgtacagataacacctggcatccttttgttggcacctcttgttagattgtgctagctagttaagctattgatgcagttagaggtggaggtgctgagagtagagcgttgcgttgagaagagacttgaggaatgtacgacgtgaagaatggaaacctggtagctcttgctgttttttctgaagcaagatcaatatatgttattttcttc

SEQ ID NO: 62098 - protein, 462 aa, Triticum aestivum
  peptide (1)..(462): Ceres Seq. ID no. 13596036
PKPKHRPIISWSRPRTPHPSIQLQLHLAAAPTMYGVGVGGGGGGFNAPSTASGRRKNQEDDDDEEEEETGDGRVLEAWERAYADDRSWEALQEDESGLLRPIDTKNLVHSQYRRRLLLRSAAAAARIQKGLIRYLYIVIDLSKAASEMDYRPSRMAVVAKCAEAFIREFFDQNPLSHVGLVTIKDGISHRLTEIGGSPESQINALMGKLECSGDSSLQNALELVNGYLNQIPSYGHKEVLFLYSALNTCDPGDIMETIEKCKKSKVRCSVIGLAAEIFICKHLCEETGGSYTVALDESHFKELLLEHAPPPPAIAEYAAANLIKMGFPQRGAEDLISICSCHKKIKSGAEGYICPRCKVNVCELPTECRTCGLTLVSSPHLARSYHHLFPVAPFDEVTFKLGQKGGQNCFGCQQSLINTGGQSNIHVCCPKCKHHFCFDCDIYIHESLHNCPGCESQCSSSR

SEQ ID NO: 62099 - protein, 430 aa, Triticum aestivum
  peptide (1)..(430): Ceres Seq. ID no. 13596037
MYGVGVGGGGGGFNAPSTASGRRKNQEDDDDEEEEETGDGRVLEAWERAYADDRSWEALQEDESGLLRPIDTKNLVHSQYRRRLLLRSAAAAARIQKGLIRYLYIVIDLSKAASEMDYRPSRMAVVAKCAEAFIREFFDQNPLSHVGLVTIKDGISHRLTEIGGSPESQINALMGKLECSGDSSLQNALELVNGYLNQIPSYGHKEVLFLYSALNTCDPGDIMETIEKCKKSKVRCSVIGLAAEIFICKHLCEETGGSYTVALDESHFKELLLEHAPPPPAIAEYAAANLIKMGFPQRGAEDLISICSCHKKIKSGAEGYICPRCKVNVCELPTECRTCGLTLVSSPHLARSYHHLFPVAPFDEVTFKLGQKGGQNCFGCQQSLINTGGQSNIHVCCPKCKHHFCFDCDIYIHESLHNCPGCESQCSSSR

SEQ ID NO: 62100 - protein, 315 aa, Triticum aestivum
  peptide (1)..(315): Ceres Seq. ID no. 13596038
MDYRPSRMAVVAKCAEAFIREFFDQNPLSHVGLVTIKDGISHRLTEIGGSPESQINALMGKLECSGDSSLQNALELVNGYLNQIPSYGHKEVLFLYSALNTCDPGDIMETIEKCKKSKVRCSVIGLAAEIFICKHLCEETGGSYTVALDESHFKELLLEHAPPPPAIAEYAAANLIKMGFPQRGAEDLISICSCHKKIKSGAEGYICPRCKVNVCELPTECRTCGLTLVSSPHLARSYHHLFPVAPFDEVTFKLGQKGGQNCFGCQQSLINTGGQSNIHVCCPKCKHHFCFDCDIYIHESLHNCPGCESQCSSSR

SEQ ID NO: 62101 - DNA, 1489 bp, Triticum aestivum
  misc_feature (1)..(1489): Ceres Seq. ID no. 13595870
atctccatcaactccttccccaagccgcaacctgccgcaaatctccgcctcccctccccttccgacccgcccaggccgcagcagagcgccatgtcgtcctcccctacccccgcgccagacgccggcgccgccgcgatggccgtcgacgactcgtcggagaccgaccagctcgactccatgtccacggaggacatcgtccgggccacccgcctcctcgacaacgaggtccgcgtcctcaaggacgagctgcagcggaacaacctggagctcgagaacgtcaaggacaagatcaaggagaaccaggagaagataaagctcaacaagcagctgccctacctcgtcggcaacatcgtcgagattttggaaatgaaccctgaagatgaggctgaagaggatggtgctaatatagatctggactcacagaggaaaggaaaatgtgttgttcttaagacatccacaagacagactatattccttcctgtgatcgggctagttgaccctgacaacctcaagcctggtgatttggttggagtcaacaaggacagctacttgatattagacacgctaccttcggagtatgactctcgagtaaaggcaatggaggtagatgaaaagcctacggaggattataatgacattggcggccttgagaaagagattcaggaactcgttgaagctatagtgttgccaatgacacacaaggagcaatttcagaagttgggaatccgtcccccgaaaggagttcttttatatggaccacctgggacgggaaagacgttgatggctcgtgcatgtgctgcacaaaccaatgcaacctttctgaaacttgctggtccgcagctagtccagatgttcatcggtgatggggcaaagcttgtccgagatgcctttgagttggcaaaggagaaggccccctgcatcatttttattgatgagattgatgcaattggaacaaagcgttttgacagtgaagtgagtggtgacagagaagtgcaacgaactatgttggagttgctgaatcagctagatggatttagcagtgatgagaggataaaggtgatagctgcaaccaatcgtgcagatattctcgatcctgctttactccgttctggtcgcctggacagaaagattgagttccctcatccgacggaagaagcaagagctcggattttgcaaattcactcaagaaagatgaacgtacatcctgatgtcaactttgaggagctggctcgttcaactgatgatttcaacggtgcacaactgaaggctgtttgtgtggaagctggcatgcttgctctacgcagggacgctacagaggtgatccatgaagatttcaacgaaggcattatccaagtgcaagcaaagaagaagtccagcttgaattattacgcttagtttcccttgagtaatcagaacgcttggtcctgtgatggccgctgtttgtaacactcggctaccatttttatttggagtatagtttaagtctcgg

SEQ ID NO: 62102 - protein, 464 aa, Triticum aestivum
  peptide (1)..(464): Ceres Seq. ID no. 15221675
ISINSFPKPQPAANLRLPSPSDPPRPQQSAMSSSPTPAPDAGAAAMAVDDSSETDQLDSMSTEDIVRATRLLDNEVRVLKDELQRNNLELENVKDKIKENQEKIKLNKQLPYLVGNIVEILEMNPEDEAEEDGANIDLDSQRKGKCVVLKTSTRQTIFLPVIGLVDPDNLKPGDLVGVNKDSYLILDTLPSEYDSRVKAMEVDEKPTEDYNDIGGLEKEIQELVEAIVLPMTHKEQFQKLGIRPPKGVLLYGPPGTGKTLMARACAAQTNATFLKLAGPQLVQMFIGDGAKLVRDAFELAKEKAPCIIFIDEIDAIGTKRFDSEVSGDREVQRTMLELLNQLDGFSSDERIKVIAATNRADILDPALLRSGRLDRKIEFPHPTEEARARILQIHSRKMNVHPDVNFEELARSTDDFNGAQLKAVCVEAGMLALRRDATEVIHEDFNEGIIQVQAKKKSSLNYYA

SEQ ID NO: 62103 - protein, 434 aa, Triticum aestivum
  peptide (1)..(434): Ceres Seq. ID no. 15221676
MSSSPTPAPDAGAAAMAVDDSSETDQLDSMSTEDIVRATRLLDNEVRVLKDELQRNNLELENVKDKIKENQEKIKLNKQLPYLVGNIVEILEMNPEDEAEEDGANIDLDSQRKGKCVVLKTSTRQTIFLPVIGLVDPDNLKPGDLVGVNKDSYLILDTLPSEYDSRVKAMEVDEKPTEDYNDIGGLEKEIQELVEAIVLPMTHKEQFQKLGIRPPKGVLLYGPPGTGKTLMARACAAQTNATFLKLAGPQLVQMFIGDGAKLVRDAFELAKEKAPCIIFIDEIDAIGTKRFDSEVSGDREVQRTMLELLNQLDGFSSDERIKVIAATNRADILDPALLRSGRLDRKIEFPHPTEEARARILQIHSRKMNVHPDVNFEELARSTDDFNGAQLKAVCVEAGMLALRRDATEVIHEDFNEGIIQVQAKKKSSLNYYA

SEQ ID NO: 62104 - protein, 419 aa, Triticum aestivum
  peptide (1)..(419): Ceres Seq. ID no. 15221677
MAVDDSSETDQLDSMSTEDIVRATRLLDNEVRVLKDELQRNNLELENVKDKIKENQEKIKLNKQLPYLVGNIVEILEMNPEDEAEEDGANIDLDSQRKGKCVVLKTSTRQTIFLPVIGLVDPDNLKPGDLVGVNKDSYLILDTLPSEYDSRVKAMEVDEKPTEDYNDIGGLEKEIQELVEAIVLPMTHKEQFQKLGIRPPKGVLLYGPPGTGKTLMARACAAQTNATFLKLAGPQLVQMFIGDGAKLVRDAFELAKEKAPCIIFIDEIDAIGTKRFDSEVSGDREVQRTMLELLNQLDGFSSDERIKVIAATNRADILDPALLRSGRLDRKIEFPHPTEEARARILQIHSRKMNVHPDVNFEELARSTDDFNGAQLKAVCVEAGMLALRRDATEVIHEDFNEGIIQVQAKKKSSLNYYA

SEQ ID NO: 62105 - DNA, 640 bp, Triticum aestivum
  misc_feature (1)..(640): Ceres Seq. ID no. 12584637
aaaattacccgaccaattcggccattcccacttgccctaagaacaaggcgaaaaagtagcgcaccacaccaatggcgactcctggggatggcgaggacgcgccgccgccgccgccggtgagcgcggcgggggctggaggcagcttgatcgcgaagctgcgggagcaatggaggagcacgaaagagcacgcggagacgtacccgtacgtgtggggctcctacatcctcgtctacggcgggctcggcgcgtacatcacctggcgatggtgcaagctccgccgcaccgaggaccgcgtccgcgccctccaggcccgcctccgccagctcgccgccgccgaggagtcgcagggcgcttccgctgctaccccacctcctcccctgcagcagcccccgccgccgacgacgactgggccgggcaagcccccctccccgccgtgaagagtaaggccccttaggcaacttcttgacatgaaatgttacagaacaatccctgcatcgttcgagatcgaggcattccttgcctctgtttactctatgatcctggacctaaagaaacggtgggatctcgccccccaaaaagttggaaggtcaattctgtgtccatactggagatcattctggagaaggtttaaattgttgtg

SEQ ID NO: 62106 - protein, 121 aa, Triticum aestivum
  peptide (1)..(121): Ceres Seq. ID no. 12584638
MATPGDGEDAPPPPPVSAAGAGGSLIAKLREQWRSTKEHAETYPYVWGSYILVYGGLGAYITWRWCKLRRTEDRVRALQARLRQLAAAEESQGASAATPPPPLQQPPPPTTTGPGKPPSPP

SEQ ID NO: 62107 - protein, 95 aa, Triticum aestivum
  peptide (1)..(95): Ceres Seq. ID no. 12584639
MEEHERARGDVPVRVGLLHPRLRRARRVHHLAMVQAPPHRGPRPRPPGPPPPARRRRGVAGRFRCYPTSSPAAAPAADDDWAGQAPLPAVKSKAP

SEQ ID NO: 62108 - protein, 63 aa, Triticum aestivum
  peptide (1)..(63): Ceres Seq. ID no. 12584640
MVQAPPHRGPRPRPPGPPPPARRRRGVAGRFRCYPTSSPAAAPAADDDWAGQAPLPAVKSKAP

SEQ ID NO: 62109 - DNA, 2092 bp, Triticum aestivum
  misc_feature (1)..(2092): Ceres Seq. ID no. 13590645
ctctctccacaccacaagccgccgccaccgcccgctgggaggggaatagaaatcgtgtgtatcgtagggttgcgcgaatcgccgtctccagcaaccaatccccaaccctcgagctatctaactatcccgatcccgatctcctaccatggtgtccgatgccagcaagaagaaagccgcgcagaagaaggccgccgccgccgcaaagaggggagccaagtccagcgccgctgcctcgtcctcgtcggcgtcgtcagcggccgataaggccgccaatggcatagcggcccttaacttatccgatcggacatgtaccggggtcctggcttcgcatccgctctcccgtgatatccacattgagtccctttcattaacatttcatggacatgaccttattgtggattcagaattggagcttaactacgggaggcggtatggtttgctcggcttaaatggttgtgggaaatctacccttctcaccgcaataggctgcagggaactccccattcctgaacacatggacatacatcatcttactcgtgagattgaggcttctgacatgtctgcgctgcaagctgttatctgttgtgatgaagaaagagtgaagttggaaaaggaagctgaaattttggctgcacaggatgatggtggcggtgaagctttggatcttgtatatgagcggttagaagcaatggatgcatcaactgctgaaaagcgtgctgctgagatattgtttggtctaggttttgacaagcaaatgcaagcaaagccaacacgagatttttctgggggttggcgtatgaggattgcattggcaagggcgctgttcatgaacccgaccatccttttgcttgatgagccaaccaaccatcttgatctcgaggcttgtgtctggctggaagagaaattaaagaattttgagcgtatacttgttgttatctcgcattcccaagattttctaaatggagtgtgcactaacatcatccacatgcagaacaagaccctcaagttatatactggaaattatgaccagtatgttcaaactcgctctgagcttgaagagaatcaaatgaagcagtacaaatgggaacaggaacagatagctaatatgaaggagtacattgcacgatttggtcatggatctgcgaagcttgctcgtcaggctcagagcaaagagaagactcttgcaaagatggagcgtggtggtcttgctgagaaggttgtcaatgacaggattcttgtattccgctttacagatgttggcaaactcccaccaccagtgctgcagtttgctgatgtcacatttggttacactccggataatctcatctacaagaaccttgacttcggtgttgaccttgactcgagagttgcactggtcggtcccaatggggctggtaagagcacacttctgaagctcatgacaggtgacctatctccgttggatggcatggtcagacgccacaaccacctacgcattgcacaattccatcaacatctcactgagaagctggacctggacatgccggccctgcagtacatgatgagggagtaccctgggaatgaagaggagaagatgagagctgcaattggcaagtttggcctgtcaggaaaggcacaggtgatgccaatgaaaaacctgtctgatgggcagaaggcccgtgtcatttttgcttggctagcatttaggcagccacagatgctgttgcttgatgagccgacaaatcatcttgacattgagaccattgactcacttgctgaggcactgaaggaatgggacggggggttggtcctggtgagccatgacttcaggctgatcaatcaggttgctcaagagatctgggtctgtgagaaccaggcggtgactaggtgggaaggcgatatcatggatttcaagcaacacttgaagaaaagggctggtctctagattttctgtcttttcattctctcggctctttggagatctagacaaccccaaagttttgcctgtatcagaaaagtttccatcatttagcgtgacaagtatgagtactattgtatcgcttaaaacatatcttctctacactattttaccagacgatccgtgtttaattcc

SEQ ID NO: 62110 - protein, 592 aa, Triticum aestivum
  peptide (1)..(592): Ceres Seq. ID no. 15220989
MVSDASKKKAAQKKAAAAAKRGAKSSAAASSSSASSAADKAANGIAALNLSDRTCTGVLASHPLSRDIHIESLSLTFHGHDLIVDSELELNYGRRYGLLGLNGCGKSTLLTAIGCRELPIPEHMDIHHLTREIEASDMSALQAVICCDEERVKLEKEAEILAAQDDGGGEALDLVYERLEAMDASTAEKRAAEILFGLGFDKQMQAKPTRDFSGGWRMRIALARALFMNPTILLLDEPTNHLDLEACVWLEEKLKNFERILVVISHSQDFLNGVCTNIIHMQNKTLKLYTGNYDQYVQTRSELEENQMKQYKWEQEQIANMKEYIARFGHGSAKLARQAQSKEKTLAKMERGGLAEKVVNDRILVFRFTDVGKLPPPVLQFADVTFGYTPDNLIYKNLDFGVDLDSRVALVGPNGAGKSTLLKLMTGDLSPLDGMVRRHNHLRIAQFHQHLTEKLDLDMPALQYMMREYPGNEEEKMRAAIGKFGLSGKAQVMPMKNLSDGQKARVIFAWLAFRQPQMLLLDEPTNHLDIETIDSLAEALKEWDGGLVLVSHDFRLINQVAQEIWVCENQAVTRWEGDIMDFKQHLKKRAGL

SEQ ID NO: 62111 - protein, 469 aa, Triticum aestivum; identical to SEQ ID NO: 60957
  peptide (1)..(469): Ceres Seq. ID no. 15220990

SEQ ID NO: 62112 - protein, 455 aa, Triticum aestivum; identical to SEQ ID NO: 60958
  peptide (1)..(455): Ceres Seq. ID no. 15220991

SEQ ID NO: 62113 - DNA, 1133 bp, Triticum aestivum
  misc_feature (1)..(1133): Ceres Seq. ID no. 13598367
tagctagttccccaccagagcacacccgccgccgccgccgccgcaacaagagccgccgctagctcgccgccgtccgcctccttccctctgggcagccagcaccgcagcagtgttgagtccagcaccagaagcagaaccttccctctgtcggtgggctgcggcgccgtccgtccgtccgtccgttgaggagggcaagaatgaagggcggtaggaagaacctgcggcgcgcgtgcgaggagggcaccgcggtgacgctggcggagggcgagagcatcatgcaggtcgtcacgctgcgcggctcaaacctcatcgaggtgaccgacggcgagggcgtcaagtctctcgccctcttccccgccaagttccagaagagcttctggatcaagaacgggaatttcgtggttgtggatgctagtggcagggacgaggctctcgaatctggaagcaagatagcctgtgtcgtctcgcgcgtcctctttcacgaccaggttcgcgccctcgagaaatccggccaatggccggctatcttcaagtcaactcccaatgggtgggcgacagggccacaaggaacgacatcacaggctgaggaagagcacaactctgatgaagacgacgatgatgatatgccgccacttgaggcaaacacgaacagaaatagaccgtttgacgtgcattccgatacagaaagtgattctgattcttgaactggtagacgacttgggaatagtcatcatcctatggttaccgtccacctgtacacctaatgtatttatgcttgttgaatttgggcatgacatcataaacttacggcccaatctgtcaaagatatagtagtcagtgcgttttgtcgacattaagtggcagggcatgtggaggcctgtcacctgtagtgtaatatgaagaaaacaaagaatgttgcamctggaggggggcctnnnnnnaaaaaaaaaaaaaaaaaaaaaaaaaaaaaaaaaaaaaaaaaaaaaaaaaaaaaaaaaaaaaaaaaaaaaagaaaaaaaaaaaaaaaaaaaaaaaaaaaattttcaaaaaaaaaaaaaaaaaaaaaaaaaaaaaaaannnccccaaaaaaaaaaaaaagttttttttaaacccccccccccaagggggggccc

SEQ ID NO: 62114 - protein, 168 aa, Triticum aestivum
  peptide (1)..(168): Ceres Seq. ID no. 15222326
MKGGRKNLRRACEEGTAVTLAEGESIMQVVTLRGSNLIEVTDGEGVKSLALFPAKFQKSFWIKNGNFVVVDASGRDEALESGSKIACVVSRVLFHDQVRALEKSGQWPAIFKSTPNGWATGPQGTTSQAEEEHNSDEDDDDDMPPLEANTNRNRPFDVHSDTESDSDS

SEQ ID NO: 62115 - protein, 142 aa, Triticum aestivum
  peptide (1)..(142): Ceres Seq. ID no. 15222327
MQVVTLRGSNLIEVTDGEGVKSLALFPAKFQKSFWIKNGNFVVVDASGRDEALESGSKIACVVSRVLFHDQVRALEKSGQWPAIFKSTPNGWATGPQGTTSQAEEEHNSDEDDDDDMPPLEANTNRNRPFDVHSDTESDSDS

SEQ ID NO: 62116 - protein, 95 aa, Triticum aestivum
  peptide (1)..(95): Ceres Seq. ID no. 15222328
MGGRQGHKERHHRLRKSTTLMKTTMMICRHLRQTRTEIDRLTCIPIQKVILILELVDDLGIVIILWLPSTCTPNVFMLVEFGHDIINLRPNLSKI

SEQ ID NO: 62117 - DNA, 1814 bp, Triticum aestivum
  misc_feature (1)..(1814): Ceres Seq. ID no. 13596039
gagacctaaatcgccgccaccgttcctcgccactgcggcgaccgccgttctcctccccctcccaccccgcatcggagaggaagatcgccgcgccagcgccaccatacccgaccctcgactccaccactctcggcggtgtgtgctagtctagtctgtctccaccccgacgaatttgcttcgcctgatagcgattaggctgcaatgggtagatgattaatttttgaagcccagctcatcgttaataacaggccgaaagcccagaaacccagcagcagtgtgcaacgagacgatcagattgttctcttttaccatcgtctcggacaaggcaacagagagcaggcagaaggatggatgagcaagatgataaaagtacaaaggctgagctgaaactatgtggtgacatagctgttaagaggaagaattaccgtggcgcgtcagcattctacagcgaggcaattgagctggaccctaatgatgcgacgctgtacgcaaacaggagcctttgctacctgcaaatgactgaagcagataaggctttgcatgatgctaacacctgcataaaactgcgtcctgaatggttaaaaggttactacaggaaaggatctgctcttatgtcgctcaaggagtacaaagaagcatgtgatgcgttcgaagccggactgaaactggaccctggaaacaccgagttggagaaagtattccaggaggcagttgaggcgatgaaaaaggatgacttggctagaaaaagagaaaatgcttcaagccatccagctagagaaaaacaggcacgcaaggggcgcggccgcaacacccactgagctgctgcaacaacgtacgcgggcgattgtgytaagccagccaccgcctgcatccctatgggatttcactgaatttcccgttttgtacacaatatttagtaaaacgtacactgtagctgtgagattggtttttgaattgcgccgtttacagcttggttctgttttatatcaccaaaaaaaaaaaaaaaaaacggcacgagaagcgcttctcgtgccggcttctcgtgccgttttttttttttttttttgttaaacaatgagaatgctcaataacgatcatagccgacacaacgttgacacgtgaaccaacaaccatcctgtacaacatctaccttctcatggactccatcagcgcattcaaattgttcaacgactggccttcgtcgctcatgtttttctccgccatctccttcaacctcagcaccctccgccaaaatgcagatcttcgtcaagaccctcacggggaagaccatcaccctcgaggttgagagcagcgataccatcgacaatgtcaaggccaagatccaggacaaggaggggatcccgccggaccagcagcggctgatcttcgccggaaagcagttggaggacggccgcacccttgccgactacaacatccagaaggagtccaccctccatctcgtcctcaggctccgtggaggcatcatcgagccgtccttgcaggctcttgcccgcaagtacaaccaggagaagatgatctgccgcaaatgctacgcgcgcctgcatccaagggctgtcaactgccgcaagaagaagtgtggccacagcaaccagctgaggcccaagaagaagatcaagaactagagtgctgctagtcagtttcatggaccggttgaatccatcactgtgtcagagtttatgctattatcgtctcggttgtcgttgaaccttattttactttgctttcagcctcctatcgttgtggtgatgataagtgacagtattggtatatggtagcaaacctataattttgcc

SEQ ID NO: 62118 - protein, 156 aa, Triticum aestivum
  peptide (1)..(156): Ceres Seq. ID no. 15221746
MDEQDDKSTKAELKLCGDIAVKRKNYRGASAFYSEAIELDPNDATLYANRSLCYLQMTEADKALHDANTCIKLRPEWLKGYYRKGSALMSLKEYKEACDAFEAGLKLDPGNTELEKVFQEAVEAMKKDDLARKRENASSHPAREKQARKGRGRNTH

SEQ ID NO: 62119 - protein, 129 aa, Triticum aestivum
  peptide (1)..(129): Ceres Seq. ID no. 15221747
MQIFVKTLTGKTITLEVESSDTIDNVKAKIQDKEGIPPDQQRLIFAGKQLEDGRTLADYNIQKESTLHLVLRLRGGIIEPSLQALARKYNQEKMICRKCYARLHPRAVNCRKKKCGHSNQLRPKKKIKN

SEQ ID NO: 62120 - protein, 113 aa, Triticum aestivum
  peptide (1)..(113): Ceres Seq. ID no. 15221748
  misc_feature (41)..(41): Xaa is any aa, unknown or other
MTWLEKEKMLQAIQLEKNRHARGAAATPTELLQQRTRAIVXSQPPPASLWDFTEFPVLYTIFSKTYTVAVRLVFELRRLQLGSVLYHQKKKKKTAREALLVPASRAVFFFFFC

SEQ ID NO: 62121 - DNA, 1434 bp, Triticum aestivum
  misc_feature (1)..(1434): Ceres Seq. ID no. 13654209
aaaccaacgcaaaccccaaatccccaatccgagctgccctcttcccctgaggtaagatccgttcacgatctcagcgcctcatagtccagatcgatttctgcagcaatttcccgcaattttgtctgactttttctcgggaggtcgatcgggtacgattcgattcgatcagatggcggcggtctggatggcgttggcggtgatgctggtcgctgctgctcaggtggcggtggctgccccggtgacggcgccggccttcctctgggctcccaagaactacggacttagtcccaatgaggctaaagaagtagtccactatcagacaatctccccaaagagtttagctgattctgttctcgaggaaggtggctggtcgaacttggtgtgttcaaaggatggtcctcaaaagaatgttgatgttgcagttctttttcttggatcaaagctacaatcatcagacatctctaaagataaacaagtcgatcctgctttagcggacatactaaagctgtccttctcaagctctgagttttccatggcattcccttatgttgccatgtcagacgacgaagcactagagaactcattgctatctggatttactgagaattgtgaggatggttctggaggaaatcatatcacttacacagacacgtgtactgcaagcagtgaaagtgtgaagaaacatctgaacatggattctgttcaagacttggtgaagtcacggatgggaaacaaccaaccaactgagctaatcgtcttctgtagcggtggtttcaaggacagtacaaaatcagaagggcagttgcttttggatctggtttctgttcttgacaagtctggggctaaatacacagttctttacgcttctcaaccctatggtttgctggagaatccttcggacctgccattagccaggtatcttgcagagaagaccaacacaactaaacctgtcctagagaaatgtgatggagagtgccaattaaaatcaactctcctggaaggagtttttgtgggtgtagtgctgcttatcatcttgatatcaggactttgctgcatgatggggatcgatactccatcaagatttgaggctccccaggattaatcttggtctgattttgaagcaaacccgatgtggatggccagtgtttgttaccctgcgcagtggatatagttagcttcctcttcaaaggtgccttgcttgtgtatttttctaagccaaacttctgtttagtgaccaaacttttggtgtataattgcattccaaacccacggagatctgagcttttgcaaactacactacatgcgcaaggcttatgttgtactatcaaaccagaattgtttccagttttctctgtgaatagcctggattcaggaagccaataagatgatggcactactgtccatctaataaaatcttgttattttttagtagcc

SEQ ID NO: 62122 - protein, 310 aa, Triticum aestivum
  peptide (1)..(310): Ceres Seq. ID no. 13654210
MAAVWMALAVMLVAAAQVAVAAPVTAPAFLWAPKNYGLSPNEAKEVVHYQTISPKSLADSVLEEGGWSNLVCSKDGPQKNVDVAVLFLGSKLQSSDISKDKQVDPALADILKLSFSSSEFSMAFPYVAMSDDEALENSLLSGFTENCEDGSGGNHITYTDTCTASSESVKKHLNMDSVQDLVKSRMGNNQPTELIVFCSGGFKDSTKSEGQLLLDLVSVLDKSGAKYTVLYASQPYGLLENPSDLPLARYLAEKTNTTKPVLEKCDGECQLKSTLLEGVFVGVVLLIILISGLCCMMGIDTPSRFEAPQD

SEQ ID NO: 62123 - protein, 305 aa, Triticum aestivum
  peptide (1)..(305): Ceres Seq. ID no. 13654211
MALAVMLVAAAQVAVAAPVTAPAFLWAPKNYGLSPNEAKEVVHYQTISPKSLADSVLEEGGWSNLVCSKDGPQKNVDVAVLFLGSKLQSSDISKDKQVDPALADILKLSFSSSEFSMAFPYVAMSDDEALENSLLSGFTENCEDGSGGNHITYTDTCTASSESVKKHLNMDSVQDLVKSRMGNNQPTELIVFCSGGFKDSTKSEGQLLLDLVSVLDKSGAKYTVLYASQPYGLLENPSDLPLARYLAEKTNTTKPVLEKCDGECQLKSTLLEGVFVGVVLLIILISGLCCMMGIDTPSRFEAPQD

SEQ ID NO: 62124 - protein, 300 aa, Triticum aestivum
  peptide (1)..(300): Ceres Seq. ID no. 13654212
MLVAAAQVAVAAPVTAPAFLWAPKNYGLSPNEAKEVVHYQTISPKSLADSVLEEGGWSNLVCSKDGPQKNVDVAVLFLGSKLQSSDISKDKQVDPALADILKLSFSSSEFSMAFPYVAMSDDEALENSLLSGFTENCEDGSGGNHITYTDTCTASSESVKKHLNMDSVQDLVKSRMGNNQPTELIVFCSGGFKDSTKSEGQLLLDLVSVLDKSGAKYTVLYASQPYGLLENPSDLPLARYLAEKTNTTKPVLEKCDGECQLKSTLLEGVFVGVVLLIILISGLCCMMGIDTPSRFEAPQD

SEQ ID NO: 62125 - DNA, 856 bp, Triticum aestivum
  misc_feature (1)..(856): Ceres Seq. ID no. 12625251
ctccgcagatcagcagcccccaaatcggcgacccctcgctctctctccgatctccaatcctccacctcgcacacgcgcaccaaccgggcacgatgcgggcgatctcgtcggcggcgggagggatgctgcgggcgcggctgcgcgcggcggtgcgcctccgcggcgggcacggcgacggcgggggccgctggacgacgcccggccacgaggtgcggcccaaggggtacccgatgaaccgcacgccgccgccgccgggcgagtcgcgcaagtgggaggactgggagctcccctgctacgtcacctccttcctcaccgtcgtcatcctcggcgtcgggctcaacgccaagcccgacctcaccctcgagacctgggcgcaccacaaggcgctcgagcgcctccagcagcaggagctcgccgccgcctccgcctcggccgacgccctgtccgagtgatccgcgcgcgcgcgccccaggtcttcctccaagcctaggtcgcttctgttctgttttgcttccaataagggttggttgtgaacttgtgatgtaccaatctgatattgatgggacctgggcggaacactatatttctgtttctgttttgttgttgaaatttatctgatgatgatggcagataccgtatgcatttcgaaatgccctgtggtgtcccaaacattttgaaatgcctctgcattgtattgtcttgtgtatcccttatttatttccttgggcatgatttgctacatgcttttgcgagcgtaattaggaccgattgtacctgtctctctttgcctgaaatgacttgttgcagaaaataaataaatcagttgtcgcattgaacagcttgatgccgaaaaact

SEQ ID NO: 62126 - protein, 162 aa, Triticum aestivum
  peptide (1)..(162): Ceres Seq. ID no. 12625252
SADQQPPNRRPLALSPISNPPPRTRAPTGHDAGDLVGGGRDAAGAAARGGAPPRRARRRRGPLDDARPRGAAQGVPDEPHAAAAGRVAQVGGLGAPLLRHLLPHRRHPRRRAQRQARPHPRDLGAPQGARAPPAAGARRRLRLGRRPVRVIRARAPQVFLQA

SEQ ID NO: 62127 - protein, 149 aa, Triticum aestivum
  peptide (1)..(149): Ceres Seq. ID no. 12625253
PQISSPQIGDPSLSLRSPILHLAHAHQPGTMRAISSAAGGMLRARLRAAVRLRGGHGDGGGRWTTPGHEVRPKGYPMNRTPPPPGESRKWEDWELPCYVTSFLTVVILGVGLNAKPDLTLETWAHHKALERLQQQELAAASASADALSE

SEQ ID NO: 62128 - protein, 119 aa, Triticum aestivum
  peptide (1)..(119): Ceres Seq. ID no. 12625254
MRAISSAAGGMLRARLRAAVRLRGGHGDGGGRWTTPGHEVRPKGYPMNRTPPPPGESRKWEDWELPCYVTSFLTVVILGVGLNAKPDLTLETWAHHKALERLQQQELAAASASADALSE

SEQ ID NO: 62129 - DNA, 504 bp, Triticum aestivum
  misc_feature (1)..(504): Ceres Seq. ID no. 13596388
ctgtgcttgaaccacaagacaagctcgatcacgattcacgcgccgcgcgttgtcagtgcgaagcagctgttgtgcgctctgcagagacgacccatggcctcgagaacagcggcggtgccggaggtggccctgcggtccggcgacgcgaggcccatgccggccatcggcatgggcaccgcccagtccccggtggtgccggacaccaccgtgaaggccgtgctggaggccgtggaggtgggctaccgccacttcgacacggcctccatgtacgcgacggagcggcccctgggcgaggccctcgcggaggcggtgcgccgcgggctcctggcgtcccgggaggaggtgttcgtcacgtccaagctctgttgcacgcagtgccacccgcacctcgtgctcccgtccctccaggagagcctccagaacctgcagatggagtacgtggacctgtatctgatccactggccgatcagcctgaagcccgggcccgtggtgttcccggtgaag

SEQ ID NO: 62130 - protein, 168 aa, Triticum aestivum
  peptide (1)..(168): Ceres Seq. ID no. 13596389
LCLNHKTSSITIHAPRVVSAKQLLCALQRRPMASRTAAVPEVALRSGDARPMPAIGMGTAQSPVVPDTTVKAVLEAVEVGYRHFDTASMYATERPLGEALAEAVRRGLLASREEVFVTSKLCCTQCHPHLVLPSLQESLQNLQMEYVDLYLIHWPISLKPGPVVFPVK

SEQ ID NO: 62131 - protein, 167 aa, Triticum aestivum
  peptide (1)..(167): Ceres Seq. ID no. 13596390
VLEPQDKLDHDSRAARCQCEAAVVRSAETTHGLENSGGAGGGPAVRRREAHAGHRHGHRPVPGGAGHHREGRAGGRGGGLPPLRHGLHVRDGAAPGRGPRGGGAPRAPGVPGGGVRHVQALLHAVPPAPRAPVPPGEPPEPADGVRGPVSDPLADQPEARARGVPGE

SEQ ID NO: 62132 - protein, 137 aa, Triticum aestivum
  peptide (1)..(137): Ceres Seq. ID no. 13596391
MASRTAAVPEVALRSGDARPMPAIGMGTAQSPVVPDTTVKAVLEAVEVGYRHFDTASMYATERPLGEALAEAVRRGLLASREEVFVTSKLCCTQCHPHLVLPSLQESLQNLQMEYVDLYLIHWPISLKPGPVVFPVK

SEQ ID NO: 62133 - DNA, 1477 bp, Triticum aestivum
  misc_feature (1)..(1477): Ceres Seq. ID no. 13596465
agtctacccaaagtccgacgagcaaccacccggccatggcgaccaccgacatccgcctctccatcgggcaccagacccgcttcgccctccgcctcgcctccgccatctcctcgccctcccacgccaagggatccgccggcaacgccgccttctccccgctctcgctccacgtcgcgctcagcctcgtcgcggcgggcgccggcggcgccacccgcgaccagctcgccgccgcgcttgggtccgcggagaaaggcgaggccgagggcctccacgcgctcgccgagcaggtggttcaggtcgtgctcgccgacgcgtcgggcgccggcggcccgcgcgtcgccttcgccaacggcgtcttcgtcgacgcgtcgctcaagctcaagccttccttcaaggatctcactgtgggcaagtacaaggccgagacacagtccgtggacttccaaactaaggctgctgaagttgctggtcaagtgaactcctgggtagagaaaatcacaacaggtctcatcaaagagatcctccctgcaggatctgttgataacaccactagactggttcttggtaatgccctttatttcaaaggagcttggactgagaagtttgatgcatctaagacaaaagacgagaagttccacctccttgatgggagctcagttcaaacaccgttcatgtccagtacaaagaagcaatatatttcgtcttctgacagcttgaaggtactgaagcttccttaccagcaaggcgaggacaagaggcagttctccatgtacattcttcttccagaagcacaggatggtctctggaacttggccaacaagttgagcaccgaaccagagttcttggaaaaccatatcccaatgcagaaggttcctgtcgggcagttcaagcttccgaagttcaagatatcatttggatttgaagcgtctgatatgctcaaaggtttgggtctccagctgccgttcagcgcagaggcagatctttcggagatggtggattcaccggcgggcttatacgtctcatccgttttccacaagtcgtttgtcgaggtgaacgaagaaggcaccgaggctgccgctgcaactgcttcagtggtcacacttaggtcactgccagtggagcccgtgaaggtggatttcgtcgcggatcaccctttcctcttccttatccgagaagacctcacaggggtggtgctattcgtcggccatgtgttcaatcccttggtgtctgcatgatgtgtttgctctggatcgctgccttggcagtgacctcaactgtcacatgtaagtgaagggtttcgactttagatcatgctgcctgtgcaataaatccggtgcatgtttttgttttcgaataacggcttgcttgatgtatggaggttatggtgagttggtgacaataatccagggttgccgtggagttttgtgctttcagttgaatgatactcctacatgagatggccaaatgcttcttggtc

SEQ ID NO: 62134 - protein, 410 aa, Triticum aestivum
  peptide (1)..(410): Ceres Seq. ID no. 15221885
STQSPTSNHPAMATTDIRLSIGHQTRFALRLASAISSPSHAKGSAGNAAFSPLSLHVALSLVAAGAGGATRDQLAAALGSAEKGEAEGLHALAEQVVQVVLADASGAGGPRVAFANGVFVDASLKLKPSFKDLTVGKYKAETQSVDFQTKAAEVAGQVNSWVEKITTGLIKEILPAGSVDNTTRLVLGNALYFKGAWTEKFDASKTKDEKFHLLDGSSVQTPFMSSTKKQYISSSDSLKVLKLPYQQGEDKRQFSMYILLPEAQDGLWNLANKLSTEPEFLENHIPMQKVPVGQFKLPKFKISFGFEASDMLKGLGLQLPFSAEADLSEMVDSPAGLYVSSVFHKSFVEVNEEGTEAAAATASVVTLRSLPVEPVKVDFVADHPFLFLIREDLTGVVLFVGHVFNPLVSA

SEQ ID NO: 62135 - protein, 399 aa, Triticum aestivum
  peptide (1)..(399): Ceres Seq. ID no. 15221886
MATTDIRLSIGHQTRFALRLASAISSPSHAKGSAGNAAFSPLSLHVALSLVAAGAGGATRDQLAAALGSAEKGEAEGLHALAEQVVQVVLADASGAGGPRVAFANGVFVDASLKLKPSFKDLTVGKYKAETQSVDFQTKAAEVAGQVNSWVEKITTGLIKEILPAGSVDNTTRLVLGNALYFKGAWTEKFDASKTKDEKFHLLDGSSVQTPFMSSTKKQYISSSDSLKVLKLPYQQGEDKRQFSMYILLPEAQDGLWNLANKLSTEPEFLENHIPMQKVPVGQFKLPKFKISFGFEASDMLKGLGLQLPFSAEADLSEMVDSPAGLYVSSVFHKSFVEVNEEGTEAAAATASVVTLRSLPVEPVKVDFVADHPFLFLIREDLTGVVLFVGHVFNPLVSA

SEQ ID NO: 62136 - DNA, 1427 bp, Triticum aestivum
  misc_feature (1)..(1427): Ceres Seq. ID no. 13596392
aaaaccaaaacaaataccaacacacacacagccagccagccagccaggaagcaaaaaaatccccccaccctccctgcaatagcaaacacgcggaaaaaaatggaggcatgaacacgcccccctcctcctccgtccccgcctcctccgtccccgatcccgtcgacagcccagcggccccgcccccgccccctcctcgccggcggcacccttgctcgtaggcgggcgtgaggggagcggcgcgcagcgacgatgccgtcgcactcggatctggaccggcagatctcgctgctgcgggactgcaagttcctgccggacgccgaggtcaaggccctctgcgagcaggccaaggcgatcctcatggaggagtggaacgtgcagcccgtgcgctgccccgtcaccgtctgcggcgacatccacggccagttctacgacctcatcgagctcttccgcatcgggggcgacacccccgacaccaactaccttttcatgggcgactacgtcgaccgtggctactattcagtggagactgtttcattattagtggctctcaaagttcgttatagagacagaatcacaatcttgagaggaaatcacgagagccgacaaatcactcaagtgtatggcttctatgatgaatgcttacggaagtacggaaatgcaaatgtctggaagtacttcacagatttgtttgattatttgcctctcacagctcttatagaaaaccaggtgttttgcctccatggtggtctctctccatcattagatacattggacaatattcgttctcttgatcgcatacaagaggtcccgcatgaaggacctatgtgtgatcttttgtggtctgatccggatgaccgatgcgggtggggaatttcaccaagaggagcaggctacacatttggacaagatatagcacaacaatttaaccatacaaatggtcttagccttatttcaagggcccatcaacttgtgatggaagggttcaactgggcacaggagaagaatgttgtcacagttttcagtgcgccaaactactgttaccggtgtggtaacatggctgcgattctcgaaattggggagaacatggatcagaacttcctccaattcgatccagcgccgcggcaaatcgagccagacacaacgcgcaagacccccgactactttttgtaatcgtggtgttgactttttttaactcttctgctgcctggctggatctgtagatctctgtccttagaaaatgggattccttgagctgagttgtgtaccccccctctcattcttttgtttggagattttggttgccgcttctcaggacctcataggacatgttaaaagtacattgcattggtattttttttgtatctccattttgtattatttccgagacagagaagggaagctgcaatagaatcgtctcgtaacatatt

SEQ ID NO: 62137 - protein, 306 aa, Triticum aestivum; identical to SEQ ID NO: 51990
  peptide (1)..(306): Ceres Seq. ID no. 15221856

SEQ ID NO: 62138 - protein, 270 aa, Triticum aestivum; identical to SEQ ID NO: 51991
  peptide (1)..(270): Ceres Seq. ID no. 15221857

SEQ ID NO: 62139 - protein, 227 aa, Triticum aestivum; identical to SEQ ID NO: 51992
  peptide (1)..(227): Ceres Seq. ID no. 15221858

SEQ ID NO: 62140 - DNA, 1573 bp, Triticum aestivum
  misc_feature (1)..(1573): Ceres Seq. ID no. 13598368
cacaatactagcaagagtgtagccaacagagccaaactcaccggtacgcagccgatcgatcgataaggtcccccgaatttaacacccgctcgccatgtcgttcctcccgattccgctgccaatcgttggagacatagccagcaggctgaacggccaagagaaaccgcgcggcgacgacacgacgtcgtcggcgccggcgcctgtcctcggaaccgtggccagcaggtggcgcgagctccacggcgagaactcgtggaagggcctcctggaccctctggacccgcacctccgctccagcatcatctcctacggcgagatggtgcaggccgcctacgacgccttcaacaccgagaggcgctccccgcactgcggcgcgtgcttctacggctacgaggacctgctggcgggcgtcggggtgccgcaccacggcaacaactacgaggtcaccaagttcatctacgccacctcgtcgctgccactcccgagctccttcctcctgctgccgctgccgtcgctgccggacgtctggagccgagagtccaactggatggggtacgtggccgtggccacggacgagggcgccgccgcgctcgggaggcgggacatcgttgtggcgtggcgcggcaccgtccagaacatggagtgggtcaacgacctcgacttcgcgccggtgcccgccgcgcccgtgctgggctccgcggcgagccagcaccgcctcgccgtcgtgcaccatgggttcctctccatgtacacgtcaagcaacaagagctccgagttcaccaagaccagcgccagagatcaggttgtcaaggaggtcaggaggctcgtggagctgtacaaggatgaggaggtcagcatcaccatctgtggccacagccttggtgcgtcagtcgccaccctgaacgccgttgacctggtgtctagcggcatcaacaaacccgagggctccactaagtcgttccctgtgactgctatcgtgtttgcgagccctcacgtcgggtgccgcttctttaggtcggcgttcaactcatttccagacctgaaggcactacatgtgcagaacgctggcgacgtcgtgcccatgtacccacctctgggatacgtggacgtggccgtggagcttaccataagaacaatccgatctccgtacatgcgtaagccggccacagtgggaacactccacaatctcgagtgctacctacacggagtggccggggagcagggaagtgccggagggttcaagctagaggtggatcgtgacatagcgctggtgaacaagggtgccgacgctctcacggacgagcacccggtgccggcgtgttggtgggtccctagacacaagttcatggtcaagggggaagatgggcgatggacgctccaggatttcaagcacatctgagttactcacatcggccattgaaaggtaaattaggccttgatgtgattcacgacattgtactcgttaccaagtttctaaataacggctacggtttgtcaaccgtaccgagtatctttccctttttatgcaatataagtgaatgtttcacgacattgtactcgttaccaagggtct

SEQ ID NO: 62141 - protein, 434 aa, Triticum aestivum
  peptide (1)..(434): Ceres Seq. ID no. 15222329
MSFLPIPLPIVGDIASRLNGQEKPRGDDTTSSAPAPVLGTVASRWRELHGENSWKGLLDPLDPHLRSSIISYGEMVQAAYDAFNTERRSPHCGACFYGYEDLLAGVGVPHHGNNYEVTKFIYATSSLPLPSSFLLLPLPSLPDVWSRESNWMGYVAVATDEGAAALGRRDIVVAWRGTVQNMEWVNDLDFAPVPAAPVLGSAASQHRLAVVHHGFLSMYTSSNKSSEFTKTSARDQVVKEVRRLVELYKDEEVSITICGHSLGASVATLNAVDLVSSGINKPEGSTKSFPVTAIVFASPHVGCRFFRSAFNSFPDLKALHVQNAGDVVPMYPPLGYVDVAVELTIRTIRSPYMRKPATVGTLHNLECYLHGVAGEQGSAGGFKLEVDRDIALVNKGADALTDEHPVPACWWVPRHKFMVKGEDGRWTLQDFKHI

SEQ ID NO: 62142 - protein, 360 aa, Triticum aestivum
  peptide (1)..(360): Ceres Seq. ID no. 15222330
MVQAAYDAFNTERRSPHCGACFYGYEDLLAGVGVPHHGNNYEVTKFIYATSSLPLPSSFLLLPLPSLPDVWSRESNWMGYVAVATDEGAAALGRRDIVVAWRGTVQNMEWVNDLDFAPVPAAPVLGSAASQHRLAVVHHGFLSMYTSSNKSSEFTKTSARDQVVKEVRRLVELYKDEEVSITICGHSLGASVATLNAVDLVSSGINKPEGSTKSFPVTAIVFASPHVGCRFFRSAFNSFPDLKALHVQNAGDVVPMYPPLGYVDVAVELTIRTIRSPYMRKPATVGTLHNLECYLHGVAGEQGSAGGFKLEVDRDIALVNKGADALTDEHPVPACWWVPRHKFMVKGEDGRWTLQDFKHI

SEQ ID NO: 62143 - protein, 283 aa, Triticum aestivum
  peptide (1)..(283): Ceres Seq. ID no. 15222331
MGYVAVATDEGAAALGRRDIVVAWRGTVQNMEWVNDLDFAPVPAAPVLGSAASQHRLAVVHHGFLSMYTSSNKSSEFTKTSARDQVVKEVRRLVELYKDEEVSITICGHSLGASVATLNAVDLVSSGINKPEGSTKSFPVTAIVFASPHVGCRFFRSAFNSFPDLKALHVQNAGDVVPMYPPLGYVDVAVELTIRTIRSPYMRKPATVGTLHNLECYLHGVAGEQGSAGGFKLEVDRDIALVNKGADALTDEHPVPACWWVPRHKFMVKGEDGRWTLQDFKHI

SEQ ID NO: 62144 - DNA, 1321 bp, Triticum aestivum
  misc_feature (1)..(1321): Ceres Seq. ID no. 13596393
tcccccgggctscmggaattcgcaactttattgwgtttamcattacctagaacatcctaatcgaaaaaatatttgctccgcctctcgttctctcccccccccccgtctctctctctagcctctccattccgtgtggcgaccgagcgaaccctagccgagattagactaccatccccaatctaccggaggaggacgaggacgacgccgacgagatgctgagggttgcggggaggaggctctcgtcttccctctcctggcgccccgcggcgaccgtcggagccaggggcccgctcgccggcgccggcggccctgggagagacgacgacgacggttcggcctaccagcggcggttcgccatcgagtcccccttcttcaccgccgcgagaggcttttcttcggctgaaacacttgttccacggaaccaagatgctgggttggctgaactcccagccactgttgctgcactgaagaaccccaactcaaaaatcctttatgaccagtacaaccatgaaagatatcctcctggagatcccagcaagcgtgcctttgcctactttgttctgagtggtgggagattcgtatatgcatcactgctgcgtctccttgtcttgaagtttgtcttgagcatgtcagcaagtaaggatgttcttgcacttgcttcccttgaggttgatctatccagcattgaacccggcagcacagtgactgtcaagtggcgtggaaagccagtcttcatcaggcgacggacagacgatgacatcaagctggccaacagcgtggatgttgcatccctgcgccacccagagcaagacgctgagcgtgtgaagaacccagagtggctggtggttattggtgtctgcactcatcttggttgcattccccttcccaactctggagactttggtggctggttctgcccgtgccatggctcccactatgacatctctggcagaatccgcaagggccctgccccgtacaaccttgaggtgcccacctacagtttcttggaagataacaagatgctcataggctaagagcctaaaaccagtacctaccaacatatattctccacaggagtgaattcctgttgcgctgttattttgttttcaatgtggctaggagtttttgtttcaggactatcgcaacggtgatccactgttacctaccgaagttcatttgcagtgcgaaataattgtttctcctatgttgctactggattgtaagttttgtactgattttctgagaccctattggaaggatattgtacacctcttctggttcttgctccctatatatttgataaataagcaaacattcttcc

SEQ ID NO: 62145 - protein, 273 aa, Triticum aestivum
  peptide (1)..(273): Ceres Seq. ID no. 15221859
MLRVAGRRLSSSLSWRPAATVGARGPLAGAGGPGRDDDDGSAYQRRFAIESPFFTAARGFSSAETLVPRNQDAGLAELPATVAALKNPNSKILYDQYNHERYPPGDPSKRAFAYFVLSGGRFVYASLLRLLVLKFVLSMSASKDVLALASLEVDLSSIEPGSTVTVKWRGKPVFIRRRTDDDIKLANSVDVASLRHPEQDAERVKNPEWLVVIGVCTHLGCIPLPNSGDFGGWFCPCHGSHYDISGRIRKGPAPYNLEVPTYSFLEDNKMLIG

SEQ ID NO: 62146 - DNA, 697 bp, Triticum aestivum
  misc_feature (1)..(697): Ceres Seq. ID no. 12597207
attccgcctccacccccgaactccaaaccctagtagcgccgccgccgccaggtaagaggcgagatggtgtccggctccggcgtgtgcgccaagcgcgtggtggtggacgcccgccaccacatgctcggccgcctggcgtcgatcgtcgccaaggagctgctaaacgggcagcgtgtggtggtggtccgctgcgaggagatctgcatgtccggcggcctcgtccgccagaagatgaagtacctccgcttcctccgcaagaggatgaacaccaagccctcccacggncccatccacttccgcgcccccgccaagatcctctggcgcaccatccgcggtatgattccgcacaagaccgcgaggggcgaggccgcgctcgccaggctcaaggcgtacgagggcgtgccgccgccgtacgacaggaccaagcgaggcgagcaaggagtgaggcagggtcancggtggggcggggctccggtggcgagatcgccggcgggagcagctccggcggtcgagtgctntgcgagcaagcgtgggcggcgagggacttggtgcacacaacatgctcgataaaatgctcaaggagtgaagtgtactgcagtctactgacgggtggcccctttgtgttaacttaacgttgcagcagatgccgttagatatgggtgccacgtcagccctaacancgggctcagtntgtcat

SEQ ID NO: 62147 - protein, 209 aa, Triticum aestivum
  peptide (1)..(209): Ceres Seq. ID no. 12597208
  misc_feature (95)..(95): Xaa is any aa, unknown or other
  misc_feature (152)..(152): Xaa is any aa, unknown or other
  misc_feature (172)..(172): Xaa is any aa, unknown or other
SASTPELQTLVAPPPPGKRRDGVRLRRVRQARGGGRPPPHARPPGVDRRQGAAKRAACGGGPLRGDLHVRRPRPPEDEVPPLPPQEDEHQALPRXHPLPRPRQDPLAHHPRYDSAQDREGRGRARQAQGVRGRAAAVRQDQARRARSEAGSXVGRGSGGEIAGGSSSGGRVXCEQAWAARDLVHTTCSIKCSRSEVYCSLLTGGPFVLT

SEQ ID NO: 62148 - protein, 168 aa, Triticum aestivum
  peptide (1)..(168): Ceres Seq. ID no. 12597209
  misc_feature (74)..(74): Xaa is any aa, unknown or other
  misc_feature (131)..(131): Xaa is any aa, unknown or other
  misc_feature (152)..(152): Xaa is any aa, unknown or other
MVSGSGVCAKRVVVDARHHMLGRLASIVAKELLNGQRVVVVRCEEICMSGGLVRQKMKYLRFLRKRMNTKPSHXPIHFRAPAKILWRTIRGMIPHKTARGEAALARLKAYEGVPPPYDRTKRGEQGVRQGXRWGGAPVARSPAGAAPAVECXASKRGRRGTWCTQHAR

SEQ ID NO: 62149 - protein, 149 aa, Triticum aestivum
  peptide (1)..(149): Ceres Seq. ID no. 12597210
  misc_feature (55)..(55): Xaa is any aa, unknown or other
  misc_feature (112)..(112): Xaa is any aa, unknown or other
  misc_feature (133)..(133): Xaa is any aa, unknown or other
MLGRLASIVAKELLNGQRVVVVRCEEICMSGGLVRQKMKYLRFLRKRMNTKPSHXPIHFRAPAKILWRTIRGMIPHKTARGEAALARLKAYEGVPPPYDRTKRGEQGVRQGXRWGGAPVARSPAGAAPAVECXASKRGRRGTWCTQHAR

SEQ ID NO: 62150 - DNA, 1496 bp, Triticum aestivum
  misc_feature (1)..(1496): Ceres Seq. ID no. 15226198
gactttctcgcccgaccgctccttttgcgccgccgccaccgccgcatccgcgaaaacctcgcccccactcccgccgccgtctccgccgcagctccggacccctagaatccgagcggcgatggcctcctccatactctccgactgctcctcctgcgccacctcccgcctcctccccctccgccgcgccctccacccgccgccgccccgcttccgcccctcccccgccccggcgccgttgccgaggaggcctctcctcgccgccgccgcctcgctcccgctcctcccccgcgcgcgccgcatggccgcgctcgccgccgcctcttccgccgactcagccactgttttggctgatgcatctgccaagatcatcgacggcaagctggtggcaaagcaaataagggaggaggtcggcgttgagatcgccaggatgaaggacacgatcggagtggtgcctgggctggcggtcatcctagtcggctcgaggaaggattcccagacatacgtgcggaacaagaagaaggcgtgcgatgcggtcggtatcaagtcgtatgaggttaatttgccagaggacgcttccgagtacgaggtcatcaagcacatagcaaccttcaacgatgatccgtcggtgcatggcatcttggttcagctgcccttacctcgccatatgaacgacgagaacatattgaatgctgttagtattgaaaaggacgttgatggctttcatccagtgaacattggacgacttgcaatgcaaggtcgggatccattctttgttccatgcacccctaaaggatgcatggagctgctacacagatctggagttgaaataaaagggaagagagctgttgtaattggaaggagcaatattgtggggacgcctgctgctttactcttacaaaaagcaaatgcaacagtgagtattgtacattcaaaaaccaagaaccccgaggaaataacaagacaagcagatattataatcgcggctgttggagttgctaacctggtcagagggagttggataaagcctggagctgctattattgatgttggcatcaatccggttgatgatccagcaagccctcgaggttaccggctagttggagatgtctgctttgaggaggcctccaaggttgcaggagccatcacaccagttcccggcggtgtcgggccaatgacaattgcgatgcttctgtcgaacacactggattcagctaaaagaatccacaagttcaagtaaccggacaaccctgtactcagaacttgggagagcgcttaacctttggtttagtctaccaggcaaggtattgccaactgtttgatgcgccttttgttggaccagaaaaggtcaacaagagccgtgaaataaatttttgacaggggtgagaaatttaccccggcttcaaactgtaccgtattcgctaatgttccatgaaatcccagttcaatctgtggcacaacttaggtcaattgagatctcagttaagcttggacgaacc

SEQ ID NO: 62151 - protein, 411 aa, Triticum aestivum
  peptide (1)..(411): Ceres Seq. ID no. 15226199
TFSPDRSFCAAATAASAKTSPPLPPPSPPQLRTPRIRAAMASSILSDCSSCATSRLLPLRRALHPPPPRFRPSPAPAPLPRRPLLAAAASLPLLPRARRMAALAAASSADSATVLADASAKIIDGKLVAKQIREEVGVEIARMKDTIGVVPGLAVILVGSRKDSQTYVRNKKKACDAVGIKSYEVNLPEDASEYEVIKHIATFNDDPSVHGILVQLPLPRHMNDENILNAVSIEKDVDGFHPVNIGRLAMQGRDPFFVPCTPKGCMELLHRSGVEIKGKRAVVIGRSNIVGTPAALLLQKANATVSIVHSKTKNPEEITRQADIIIAAVGVANLVRGSWIKPGAAIIDVGINPVDDPASPRGYRLVGDVCFEEASKVAGAITPVPGGVGPMTIAMLLSNTLDSAKRIHKFK

SEQ ID NO: 62152 - protein, 372 aa, Triticum aestivum
  peptide (1)..(372): Ceres Seq. ID no. 15226200
MASSILSDCSSCATSRLLPLRRALHPPPPRFRPSPAPAPLPRRPLLAAAASLPLLPRARRMAALAAASSADSATVLADASAKIIDGKLVAKQIREEVGVEIARMKDTIGVVPGLAVILVGSRKDSQTYVRNKKKACDAVGIKSYEVNLPEDASEYEVIKHIATFNDDPSVHGILVQLPLPRHMNDENILNAVSIEKDVDGFHPVNIGRLAMQGRDPFFVPCTPKGCMELLHRSGVEIKGKRAVVIGRSNIVGTPAALLLQKANATVSIVHSKTKNPEEITRQADIIIAAVGVANLVRGSWIKPGAAIIDVGINPVDDPASPRGYRLVGDVCFEEASKVAGAITPVPGGVGPMTIAMLLSNTLDSAKRIHKFK

SEQ ID NO: 62153 - protein, 312 aa, Triticum aestivum
  peptide (1)..(312): Ceres Seq. ID no. 15226201
MAALAAASSADSATVLADASAKIIDGKLVAKQIREEVGVEIARMKDTIGVVPGLAVILVGSRKDSQTYVRNKKKACDAVGIKSYEVNLPEDASEYEVIKHIATFNDDPSVHGILVQLPLPRHMNDENILNAVSIEKDVDGFHPVNIGRLAMQGRDPFFVPCTPKGCMELLHRSGVEIKGKRAVVIGRSNIVGTPAALLLQKANATVSIVHSKTKNPEEITRQADIIIAAVGVANLVRGSWIKPGAAIIDVGINPVDDPASPRGYRLVGDVCFEEASKVAGAITPVPGGVGPMTIAMLLSNTLDSAKRIHKFK

SEQ ID NO: 62154 - DNA, 1347 bp, Triticum aestivum
  misc_feature (1)..(1347): Ceres Seq. ID no. 14302247
gacaccgtgactgactcggccgtacggtatcgattcccgccggaaaaggaatcagcggcgagcgccatcgacggaagcaagtcattaggtatctagctagctcctttaagagagaaaaaaaaggagttatctagcttgctacttctaggcggaggttgagatggttcaggccggattggctcagccggccccgagcacgggggcgccggcgatggcggcagcggcggtgcacgtcgcgctcaagatcccctccggcggggggccgtatgcacgggccaagcactaccagctagtggagaaggacttggacgcttcgatcgcgtggttttggaaggcgatcgagacgggggacaaggtggacagcgcgctcaaggacatggcggtggtgatgaagcagcgcggttacctggacgacgccgtggacgccatccggtcgctgcgccacctctgcccggggaagcagtcgcaggagtccctggacaacatcctgctcgacctctacaaggccagcgggcgcaccaaggaggagatcgagctgctcaagcacaagctccgccggatctaccacggccaggccttccccgccggcaaggccaccaagcgcgcccgctcccacggccgcaagatccacgtctccgtccagcaggagacgtcccgggtgctgggcaacctcgcgtgggcctacatgcagcagcgcaacttcatggcggccgaggccgtgtaccgcaaggcgcagatggtggagcccgacgccaacaaggcctgcaacctcgcgctgtgcctcatggagcaggggcggctaggggacgccgagggggtgctcgccgacgtggtcgccggcgcgttccgcgacgggagggagagggagcacggcggcgggaaggtcgtgaggaaggcggaggagctgctggagcggatcagggcggagacgggcggcggcgagaaggaggccggggaggaggacggcgtcgaggccgacgagatggcggagctactggacatggtggccaggcagtgggccgcgccgtacaggaagagccaccggaggctgcccgtgttcgaggagatcacaccgttcggcagggagcagatggcttgctagctctagaagctcatgagaactcaatagaagctgtgagtgtgcagtagcttcaccagaatattgtgaagctcgtgagaactcaatagaagttgtgtgtgtgtgtgcagtactgcagtagcttgatcagaatggtgtgaagcgtacgtgttaatcaatgtgacatatgttctatgttggtgctcatgtatgtagatgtgttgcatgtgcagtgtacaagttctttttggcggtttcatgtgtacaac

SEQ ID NO: 62155 - protein, 313 aa, Triticum aestivum
  peptide (1)..(313): Ceres Seq. ID no. 14302248
MVQAGLAQPAPSTGAPAMAAAAVHVALKIPSGGGPYARAKHYQLVEKDLDASIAWFWKAIETGDKVDSALKDMAVVMKQRGYLDDAVDAIRSLRHLCPGKQSQESLDNILLDLYKASGRTKEEIELLKHKLRRIYHGQAFPAGKATKRARSHGRKIHVSVQQETSRVLGNLAWAYMQQRNFMAAEAVYRKAQMVEPDANKACNLALCLMEQGRLGDAEGVLADVVAGAFRDGREREHGGGKVVRKAEELLERIRAETGGGEKEAGEEDGVEADEMAELLDMVARQWAAPYRKSHRRLPVFEEITPFGREQMAC

SEQ ID NO: 62156 - protein, 296 aa, Triticum aestivum
  peptide (1)..(296): Ceres Seq. ID no. 14302249
MAAAAVHVALKIPSGGGPYARAKHYQLVEKDLDASIAWFWKAIETGDKVDSALKDMAVVMKQRGYLDDAVDAIRSLRHLCPGKQSQESLDNILLDLYKASGRTKEEIELLKHKLRRIYHGQAFPAGKATKRARSHGRKIHVSVQQETSRVLGNLAWAYMQQRNFMAAEAVYRKAQMVEPDANKACNLALCLMEQGRLGDAEGVLADVVAGAFRDGREREHGGGKVVRKAEELLERIRAETGGGEKEAGEEDGVEADEMAELLDMVARQWAAPYRKSHRRLPVFEEITPFGREQMAC

SEQ ID NO: 62157 - protein, 241 aa, Triticum aestivum
  peptide (1)..(241): Ceres Seq. ID no. 14302250
MAVVMKQRGYLDDAVDAIRSLRHLCPGKQSQESLDNILLDLYKASGRTKEEIELLKHKLRRIYHGQAFPAGKATKRARSHGRKIHVSVQQETSRVLGNLAWAYMQQRNFMAAEAVYRKAQMVEPDANKACNLALCLMEQGRLGDAEGVLADVVAGAFRDGREREHGGGKVVRKAEELLERIRAETGGGEKEAGEEDGVEADEMAELLDMVARQWAAPYRKSHRRLPVFEEITPFGREQMAC

SEQ ID NO: 62158 - DNA, 1570 bp, Triticum aestivum
  misc_feature (1)..(1570): Ceres Seq. ID no. 13596470
ttacctagaacatcctaatctaaaaatggaaagcacgcaccggaagcatcttagaagaagaagagccagcaacaaggaacgatatccgtctgtgttggacgcgccaagacgatcgaggcatgcctgctgccgtctctgggtgcctcttggcgaggagcatggcgagccaccacaaacaccagcagcggggagcggcggcgacggcgccgggggcactgccggtgatcaacattggccggctcggcgacaaggaccccgccgcgcgggcgctcgtggtccaggacatcgcccgggcgtgccgcgaccgggggtgcttccaggtggtaaaccacggcgtcagcaagtcggccatggacggcgccctggaggccgcctcggagttcttcgacatgcccgcggagcgcaaggcggcgttcgcctgcgccgacatccgcagcccggtccggtacgacaccagctccaaggacggcatcagcaaggccaggtctttcctcaagcactacgccaatcccctcgaccactgggtcgactcctggccaacccaaccagcaacatacaggaagaagatggggacgtacgcggtggagatacataaactgtcaatgcagctcacaggggccatcgtgcaggggctggggctatgcccaatgcacctgcaggagaagctcggagcagggatgcagttcatggggctcaacaactacccgcaggggtcgtcccgggcgggcgacacggtcgggctggcgccgcactccgacattggcttcatcaccatcctgctgcagagctcgccggggctcgaggtgacgcaccacgacgacggcggcgtctggacgcccgtcccggccatcccgggggcgctccacgtcgacctcggcgaccacctggaggtgctgagcaacgggcggctcaggtccctcctgcaccgggccatcctcaacaccgacgaggcgaggatctccatcgccagcatccacggcgcggccatggacgagaaggtcgggtgcgccgaggagctcgtcgacgagcgccacccgaggatgtacagggagagcagcttccatgacttcctcgacttcctgcccaccaacgtcaaggcgtaccggaggttcgtcgagaccctcaagatcgacagcgcttaattccttctgctgcattaagacacacttagctgaatgagacactgcacataagtgtccatttagttgtgtagtcttactgctagctgaagaacaaaattacggtttaattatgcctccattatcaagtagtatctcagtacgaataagggagtatggtatcagcagctggataggcgtgtgattagcagggtgccttttttttcactccatttctttctttggggaaatgcagtatgtctgcatgtctcttccatcaaaaggaggatcaaaggaaccttgccaagttcttccggttctttggtagtacctacatacaccatgtgttgatcagtgcagtcctatatgtgtatcagttgatttcacctatagaaatttactttctcatgggatatattgcgcaacgatatattaaatacaatttactgttt

SEQ ID NO: 62159 - protein, 340 aa, Triticum aestivum
  peptide (1)..(340): Ceres Seq. ID no. 13596471
MPAAVSGCLLARSMASHHKHQQRGAAATAPGALPVINIGRLGDKDPAARALVVQDIARACRDRGCFQVVNHGVSKSAMDGALEAASEFFDMPAERKAAFACADIRSPVRYDTSSKDGISKARSFLKHYANPLDHWVDSWPTQPATYRKKMGTYAVEIHKLSMQLTGAIVQGLGLCPMHLQEKLGAGMQFMGLNNYPQGSSRAGDTVGLAPHSDIGFITILLQSSPGLEVTHHDDGGVWTPVPAIPGALHVDLGDHLEVLSNGRLRSLLHRAILNTDEARISIASIHGAAMDEKVGCAEELVDERHPRMYRESSFHDFLDFLPTNVKAYRRFVETLKIDSA

SEQ ID NO: 62160 - protein, 327 aa, Triticum aestivum
  peptide (1)..(327): Ceres Seq. ID no. 13596472
MASHHKHQQRGAAATAPGALPVINIGRLGDKDPAARALVVQDIARACRDRGCFQVVNHGVSKSAMDGALEAASEFFDMPAERKAAFACADIRSPVRYDTSSKDGISKARSFLKHYANPLDHWVDSWPTQPATYRKKMGTYAVEIHKLSMQLTGAIVQGLGLCPMHLQEKLGAGMQFMGLNNYPQGSSRAGDTVGLAPHSDIGFITILLQSSPGLEVTHHDDGGVWTPVPAIPGALHVDLGDHLEVLSNGRLRSLLHRAILNTDEARISIASIHGAAMDEKVGCAEELVDERHPRMYRESSFHDFLDFLPTNVKAYRRFVETLKIDSA

SEQ ID NO: 62161 - protein, 263 aa, Triticum aestivum
  peptide (1)..(263): Ceres Seq. ID no. 13596473
MDGALEAASEFFDMPAERKAAFACADIRSPVRYDTSSKDGISKARSFLKHYANPLDHWVDSWPTQPATYRKKMGTYAVEIHKLSMQLTGAIVQGLGLCPMHLQEKLGAGMQFMGLNNYPQGSSRAGDTVGLAPHSDIGFITILLQSSPGLEVTHHDDGGVWTPVPAIPGALHVDLGDHLEVLSNGRLRSLLHRAILNTDEARISIASIHGAAMDEKVGCAEELVDERHPRMYRESSFHDFLDFLPTNVKAYRRFVETLKIDSA

SEQ ID NO: 62162 - DNA, 1525 bp, Triticum aestivum
  misc_feature (1)..(1525): Ceres Seq. ID no. 13662324
ttttcctccgcgtagccttcccaccatattccagttcggcaagctcgccagtcaccaagctcctcctcctccacaggaaagcaacagcgcagcgcggcttcactggtttcgccctcaattcgagagctagtcttggaaggccttccatggctcagccgtcgctgctcctcggctctccggcatcgattgtcctccttatcaccttcttccaaggaccggtagtgagcgccatcacgttcaccttcgccaaccggtgcacggacacggtgtggcccgggttgctctcgggctccacctcgccgccgctggagaccaccggcttcgcgctctcgccgggccagtcgcgctcaatctacgggccgaccgggtggtcgggccgcttctgggcgcgctctggctgtaatttcaacggcggcaagggcacctgcgtcacgggggactgcggctccggcgagatagagtgccgcggcgccggggccaccccgcccgccacgctcgcggagttcaccctcgacggcgacggcgggaaggacttctatgacgtcagcctcgtcgacggctacaacttgcccatgctcgtgcagccgtccgtgcctgggtgccccgacaccgggtgcctcgtcgacctcaacgagcgctgcccctccgagctccgctccggcggcggcctcgcctgccgcagcgcctgcgaggccttcggcaagcccgagttctgctgcaacggcgcctacgggaaccctgacacgtgccacccctcccagtactcgcagctcttcaagtcggcgtgccccaagtcctacagctacgcctacgacgacgccacctccaccttcacctgcaaccacaccgattacaccattaccttctgcccgcagtccaatccttacagtggcaaaccgaacaagcacgcattgcggaggccgagccatgagcagcttgaggacgacgtgtggctggcatctttgaagaaaaccagcggcgccggtggaagcagcatggcatcatggtcggcgtccggaggtttccaagccgccctggcaattgctgtggccgtcgtgcttgccgcggcacaggggggtcatccccgtttcagcttgttatgaccgggcaaggcaggcgattcttcatccctaggagtgatctgcagagggtttttttaggataaaaaaggaggatcagagcactagaggaagagacgtggatatcatgttctttaggcctttttgcttgttgataaagaacatgacgcgtcctcatgttggcaattgtagttgttctagtagtggcatttcatattgctttattgcctttttgaaaacattgttcttctggttgtattcatctttctgcgcaatttttttgtggggatcctgatcagtgcatcgtcactaggagatcgcaagctttgaagtgggaagactgtaagatctgaatatactattgctctgccttctgagctccttttttttgtaaaaatctgaaatgccttcttaaaaaaaaaaaaaaaaaagcttatcgataccgt

SEQ ID NO: 62163 - protein, 366 aa, Triticum aestivum
  peptide (1)..(366): Ceres Seq. ID no. 13662325
FLRVAFPPYSSSASSPVTKLLLLHRKATAQRGFTGFALNSRASLGRPSMAQPSLLLGSPASIVLLITFFQGPVVSAITFTFANRCTDTVWPGLLSGSTSPPLETTGFALSPGQSRSIYGPTGWSGRFWARSGCNFNGGKGTCVTGDCGSGEIECRGAGATPPATLAEFTLDGDGGKDFYDVSLVDGYNLPMLVQPSVPGCPDTGCLVDLNERCPSELRSGGGLACRSACEAFGKPEFCCNGAYGNPDTCHPSQYSQLFKSACPKSYSYAYDDATSTFTCNHTDYTITFCPQSNPYSGKPNKHALRRPSHEQLEDDVWLASLKKTSGAGGSSMASWSASGGFQAALAIAVAVVLAAAQGGHPRFSLL

SEQ ID NO: 62164 - protein, 318 aa, Triticum aestivum
  peptide (1)..(318): Ceres Seq. ID no. 13662326
MAQPSLLLGSPASIVLLITFFQGPVVSAITFTFANRCTDTVWPGLLSGSTSPPLETTGFALSPGQSRSIYGPTGWSGRFWARSGCNFNGGKGTCVTGDCGSGEIECRGAGATPPATLAEFTLDGDGGKDFYDVSLVDGYNLPMLVQPSVPGCPDTGCLVDLNERCPSELRSGGGLACRSACEAFGKPEFCCNGAYGNPDTCHPSQYSQLFKSACPKSYSYAYDDATSTFTCNHTDYTITFCPQSNPYSGKPNKHALRRPSHEQLEDDVWLASLKKTSGAGGSSMASWSASGGFQAALAIAVAVVLAAAQGGHPRFSLL

SEQ ID NO: 62165 - DNA, 1419 bp, Triticum aestivum
  misc_feature (1)..(1419): Ceres Seq. ID no. 13598369
ataagtttgtaagttcgacgacataaggttgcgcatcgaaaaggacccaggttctcttctccaacggtttggttgtgcgccatggacgctggaatgagacaatcgagggtccggttttctggtgtagggcaggaagatcagggcagcggccaggctatggcaatgccaccacagcgacagcgaggcacaccttttggaagaggtgaagaatacgatgccgcgtacgcagcaacggtggcagcagtggcatatgctattgctgcaatggaggaagagaagttgccatcccaacagaagcctatcccagaaaaagcagcatctcggcagaagcgcgtaacagttcatgagcccacagctgccccacccccgagatcaccacccaggagaggtggaagcatgaaaaggccgactgaaggaagcaaaatctcaagattgtttagcggtaacaaagaaatagttgaagttggcgacgaagacgaacgagcaaatgtgtcggtgaggaggccggtgaaaccggcgccaaagaagccaggagatctaactccaggccagaacgtggtagggaaggtggttgactccgtcccgaacctgaaggacgatccaagtttcacgaggaaaacaccggacaagaagaggagcagaaactttgagcaggaggaggcaaatcagagggcgaaacccggggttaacccgacgacctcgtttccaggagagaggaaacagagctggaagcacgagcaggaaccagcgaatcagagggcaccaccggcagccaggcctccaggaatggtttattccagcgaggcggagaggatggcggctgcgtgggagaaggagaagctggctaagatcaaggagcagtataacgagacgatggaaaccatagccgaatgggagactgaaaagaaggccaaggccaggcgccagaaggagcccaaagagggggattcagagaggaagcgagcaaaggcgctggaggagtacaacgacgagatgaagcggatcagcaaggtggccgccgcgtcgaggatgtcggcagaggacaagaaaaggaacgccgagggcaaagtctgggagaaggcggccaaaatccggtcgacggggaagctcccacggtcctgtggctgcttctgaaaccatggacacacataatgtgggccaagaatctggttgtgttgctgctttactgtgtatacttgtttatgtatcgcctaaatgaagtacattgcgccaaccagtgcaaactccaacaacaacaacaacaaagcctttagtcccaagcaagttgaggtaggctagaggtgaaacccataagatctcgcaaccaactcatggctctggcacatggatagcaagcttccatgcatccctgtccatagctagctcttcggtgataccccaatccttcaggtctctctt

SEQ ID NO: 62166 - protein, 350 aa, Triticum aestivum
  peptide (1)..(350): Ceres Seq. ID no. 13598370
MDAGMRQSRVRFSGVGQEDQGSGQAMAMPPQRQRGTPFGRGEEYDAAYAATVAAVAYAIAAMEEEKLPSQQKPIPEKAASRQKRVTVHEPTAAPPPRSPPRRGGSMKRPTEGSKISRLFSGNKEIVEVGDEDERANVSVRRPVKPAPKKPGDLTPGQNVVGKVVDSVPNLKDDPSFTRKTPDKKRSRNFEQEEANQRAKPGVNPTTSFPGERKQSWKHEQEPANQRAPPAARPPGMVYSSEAERMAAAWEKEKLAKIKEQYNETMETIAEWETEKKAKARRQKEPKEGDSERKRAKALEEYNDEMKRISKVAAASRMSAEDKKRNAEGKVWEKAAKIRSTGKLPRSCGCF

SEQ ID NO: 62167 - protein, 346 aa, Triticum aestivum
  peptide (1)..(346): Ceres Seq. ID no. 13598371
MRQSRVRFSGVGQEDQGSGQAMAMPPQRQRGTPFGRGEEYDAAYAATVAAVAYAIAAMEEEKLPSQQKPIPEKAASRQKRVTVHEPTAAPPPRSPPRRGGSMKRPTEGSKISRLFSGNKEIVEVGDEDERANVSVRRPVKPAPKKPGDLTPGQNVVGKVVDSVPNLKDDPSFTRKTPDKKRSRNFEQEEANQRAKPGVNPTTSFPGERKQSWKHEQEPANQRAPPAARPPGMVYSSEAERMAAAWEKEKLAKIKEQYNETMETIAEWETEKKAKARRQKEPKEGDSERKRAKALEEYNDEMKRISKVAAASRMSAEDKKRNAEGKVWEKAAKIRSTGKLPRSCGCF

SEQ ID NO: 62168 - protein, 325 aa, Triticum aestivum
  peptide (1)..(325): Ceres Seq. ID no. 13598372
MAMPPQRQRGTPFGRGEEYDAAYAATVAAVAYAIAAMEEEKLPSQQKPIPEKAASRQKRVTVHEPTAAPPPRSPPRRGGSMKRPTEGSKISRLFSGNKEIVEVGDEDERANVSVRRPVKPAPKKPGDLTPGQNVVGKVVDSVPNLKDDPSFTRKTPDKKRSRNFEQEEANQRAKPGVNPTTSFPGERKQSWKHEQEPANQRAPPAARPPGMVYSSEAERMAAAWEKEKLAKIKEQYNETMETIAEWETEKKAKARRQKEPKEGDSERKRAKALEEYNDEMKRISKVAAASRMSAEDKKRNAEGKVWEKAAKIRSTGKLPRSCGCF

SEQ ID NO: 62169 - DNA, 1304 bp, Triticum aestivum
  misc_feature (1)..(1304): Ceres Seq. ID no. 13596474
atcaatcatctcgtgccattccccaaaagcaagctagacccttgcaatggcggcgtccttcaccaccagctggcgttgcgcattcctcgcgctactggcccttttcgtctccggcgcctacgggcagctcagcccgacgttctacgcgtcgacctgcccgaacctaacgaccatcgtgcgcgacgccatggtcacggccttgaacccggcagtcggcggcgagcgcaggatgggcgcttccctgctcaggctccacttccacgactgcttcgttgagggatgcgacggatcggtcctcctggacaacgtgcctgctaatgggagcactccggctttctttggcgagaagaacgccttcgggaacatcaactccgtccgcggcttcgaggtcatcgacacgatcaaggccgcagtggagcaagcctgccctggcgtcgtctcctgtgccgacatcctcaccctcgccgcacgggacggcacctttctgctcggcgggccgacctgggcagtgccgctcggccggcgcgactcgacgacggcgagcatggacctggcgaacagggacctcccgccgccgttcgctaacctcgtcactaatcctcctgacggcagcgacctcatcgcgaggttccaaaggaagggcctgagcgcgaccgagatgaccgtgctctccggcgcgcacaccatcggctccgcgcagtgccagaattaccggctccgcctctacaacgaaaaccgcatcgattttcagtttgcccagggtctcaaggccaactgcccccaaaatggccccgccggcgacaccttcctggcgccgttggactcgacggggtccaccttcgacaataagtactacacggatctcaccgggttgcgcggcctcctccactccgaccaggtgctgtacccccagaacaaccagacgcaggctaagatagtgctcaagtacaagggagacaacaccgccttctttgccgatttcgcggccgcgatgataaagatggggaacctcagcccgctcaccggaaccgccggccaaatcaggaccaactgtaggttggtcaacccggcctgatcatacggtctggcatatataccactgttaattaccgcgtaaccaaagataaataaatgcaacctctgtgataatctttcacctttgtaataactatactatgttgtgctacatactggcttactggttaaattattaatcgttccaattgactattgagctccaaatcatgtatatgtgtgtatcctttgtaaacaatattattatcaacgacaacaagaagatcctc

SEQ ID NO: 62170 - protein, 342 aa, Triticum aestivum
  peptide (1)..(342): Ceres Seq. ID no. 15221887
MAASFTTSWRCAFLALLALFVSGAYGQLSPTFYASTCPNLTTIVRDAMVTALNPAVGGERRMGASLLRLHFHDCFVEGCDGSVLLDNVPANGSTPAFFGEKNAFGNINSVRGFEVIDTIKAAVEQACPGVVSCADILTLAARDGTFLLGGPTWAVPLGRRDSTTASMDLANRDLPPPFANLVTNPPDGSDLIARFQRKGLSATEMTVLSGAHTIGSAQCQNYRLRLYNENRIDFQFAQGLKANCPQNGPAGDTFLAPLDSTGSTFDNKYYTDLTGLRGLLHSDQVLYPQNNQTQAKIVLKYKGDNTAFFADFAAAMIKMGNLSPLTGTAGQIRTNCRLVNPA

SEQ ID NO: 62171 - protein, 295 aa, Triticum aestivum
  peptide (1)..(295): Ceres Seq. ID no. 15221888
MVTALNPAVGGERRMGASLLRLHFHDCFVEGCDGSVLLDNVPANGSTPAFFGEKNAFGNINSVRGFEVIDTIKAAVEQACPGVVSCADILTLAARDGTFLLGGPTWAVPLGRRDSTTASMDLANRDLPPPFANLVTNPPDGSDLIARFQRKGLSATEMTVLSGAHTIGSAQCQNYRLRLYNENRIDFQFAQGLKANCPQNGPAGDTFLAPLDSTGSTFDNKYYTDLTGLRGLLHSDQVLYPQNNQTQAKIVLKYKGDNTAFFADFAAAMIKMGNLSPLTGTAGQIRTNCRLVNPA

SEQ ID NO: 62172 - protein, 281 aa, Triticum aestivum
  peptide (1)..(281): Ceres Seq. ID no. 15221889
MGASLLRLHFHDCFVEGCDGSVLLDNVPANGSTPAFFGEKNAFGNINSVRGFEVIDTIKAAVEQACPGVVSCADILTLAARDGTFLLGGPTWAVPLGRRDSTTASMDLANRDLPPPFANLVTNPPDGSDLIARFQRKGLSATEMTVLSGAHTIGSAQCQNYRLRLYNENRIDFQFAQGLKANCPQNGPAGDTFLAPLDSTGSTFDNKYYTDLTGLRGLLHSDQVLYPQNNQTQAKIVLKYKGDNTAFFADFAAAMIKMGNLSPLTGTAGQIRTNCRLVNPA

SEQ ID NO: 62173 - DNA, 1498 bp, Triticum aestivum
  misc_feature (1)..(1498): Ceres Seq. ID no. 15226984
atacccttcacccgtcgtcgtcaccgccacctctgcacacgcgtagtctctcaccgcatctccggcgaccaccgaccatctccggccaccgctactccttccctctcctgtgatggcgccgcgcgccggcggtcagacctacggcttccccatctactgcgcctcctggctcccactcgcacacaccatcaagccctctccatccgccgacgacgtcgtggatgcggacgcgtccccggagctgtcctccccacctccgccccccatggtggcccttggcggaggcggaggcgagggccggagcggcgtgcccaacgcgctggtcgtcgccgccctcgaccccgccgctgcaggggcgcctccagcgctctcccccgagccggtgtttaggctggggacagaggagcgggtgccatacaggatggccgtacacccccgcggcgatggcctcctctgcgccttccccgacggctgcaggttggtgcggtgggaatcaccagaaggagaagatcgacatagcctagttttgatatctgaccaggaggctttagtgaagctaaaggatgttggtttacagttggctgtggcattcagtggagagggttcactacttgccactggtggtgaggatggacatttgagggtcttcaaatggcctggcatggaaaccattattgaagatcctgatgctaaaacatctgttaaggatcttagtttcagttccgatgagaagtttctagttgtgaacaggagcagtggcccatctagagtgtgggatttaaagtcatctgaagctgtggctaatctgccaagagaacaaggagaaatatttggcttctgccgattttctactaagtctgacaatagtcagattctctttgttacagcaatgcaaggtgattacgggaaaataatatcttggaataccacctcatggacaagaattggatcaaagaaagtaactcgtgacgcgatttcagccttttcagtctcgcctgatggtacacttctagcaattggaactattgagggaaccatcagtgttctaggttcaagagacatgcgagtggttgtaacagttaaaaaggcgcatcttggcattgttactacattagctttttctcaagattcaagggccttgctgtcgacttcctttgactcaaccgcaagggtgacatcgactgaatcacccaagagcgatggtataagcctctggtccatggtactagctattatactcgcaattttggcatattactatatgcagcacaaagaagatctcttagcaatgttgccacaatgaaaaaaataatcagcctctactgatatctcactgcttaccactgattatctgatcttgtactggagataaatgttgtatcgtgtaggagctagagcaatttttgtattcaggtggaaaaaaaacggctcaaaaacgtccagatcttttgtatcatgtcacgctggtataagaaggccatcctctcctggtttgtag

SEQ ID NO: 62174 - protein, 396 aa, Triticum aestivum
  peptide (1)..(396): Ceres Seq. ID no. 15226985
MAPRAGGQTYGFPIYCASWLPLAHTIKPSPSADDVVDADASPELSSPPPPPMVALGGGGGEGRSGVPNALVVAALDPAAAGAPPALSPEPVFRLGTEERVPYRMAVHPRGDGLLCAFPDGCRLVRWESPEGEDRHSLVLISDQEALVKLKDVGLQLAVAFSGEGSLLATGGEDGHLRVFKWPGMETIIEDPDAKTSVKDLSFSSDEKFLVVNRSSGPSRVWDLKSSEAVANLPREQGEIFGFCRFSTKSDNSQILFVTAMQGDYGKIISWNTTSWTRIGSKKVTRDAISAFSVSPDGTLLAIGTIEGTISVLGSRDMRVVVTVKKAHLGIVTTLAFSQDSRALLSTSFDSTARVTSTESPKSDGISLWSMVLAIILAILAYYYMQHKEDLLAMLPQ

SEQ ID NO: 62175 - protein, 345 aa, Triticum aestivum
  peptide (1)..(345): Ceres Seq. ID no. 15226986
MVALGGGGGEGRSGVPNALVVAALDPAAAGAPPALSPEPVFRLGTEERVPYRMAVHPRGDGLLCAFPDGCRLVRWESPEGEDRHSLVLISDQEALVKLKDVGLQLAVAFSGEGSLLATGGEDGHLRVFKWPGMETIIEDPDAKTSVKDLSFSSDEKFLVVNRSSGPSRVWDLKSSEAVANLPREQGEIFGFCRFSTKSDNSQILFVTAMQGDYGKIISWNTTSWTRIGSKKVTRDAISAFSVSPDGTLLAIGTIEGTISVLGSRDMRVVVTVKKAHLGIVTTLAFSQDSRALLSTSFDSTARVTSTESPKSDGISLWSMVLAIILAILAYYYMQHKEDLLAMLPQ

SEQ ID NO: 62176 - protein, 293 aa, Triticum aestivum
  peptide (1)..(293): Ceres Seq. ID no. 15226987
MAVHPRGDGLLCAFPDGCRLVRWESPEGEDRHSLVLISDQEALVKLKDVGLQLAVAFSGEGSLLATGGEDGHLRVFKWPGMETIIEDPDAKTSVKDLSFSSDEKFLVVNRSSGPSRVWDLKSSEAVANLPREQGEIFGFCRFSTKSDNSQILFVTAMQGDYGKIISWNTTSWTRIGSKKVTRDAISAFSVSPDGTLLAIGTIEGTISVLGSRDMRVVVTVKKAHLGIVTTLAFSQDSRALLSTSFDSTARVTSTESPKSDGISLWSMVLAIILAILAYYYMQHKEDLLAMLPQ

SEQ ID NO: 62177 - DNA, 1117 bp, Triticum aestivum
  misc_feature (1)..(1117): Ceres Seq. ID no. 13596416
tctggggtgcaccgtacaattccacgccgcgttttctgcactttccagacagcacggaagcaaaacgatagaggcgtatccactatggcggcaacctactgcgcctaccccgccgccgccgccgccgccgccgcaaaccctaccagacgccgcctgcaaaccctaaccgcgccgggcgccctacctgctgctcggaaacccagccgccaaccccccaccttcctctctttccggctccccaatgcagcgctgccgccgctccgcgtcgctggcgctgacccgcaggttgtaaatggcgaagatttccctcctatgaatgacctaattcgactatacaagaaagcctttctagatggaaacgaagatgttgttagtgacatcgagaaggcaatcactagcatggaggaagagagaagtaaatcagcttctcagtttgaaagtatcacagctgaaatagcttcagggaagaataagtttcttcgcttaaatgctgatctagagaattttcggaagcagactgaaaaggaccgtgcaaagtttacatcgaatatacaagtggaacttgtacagagtctgttgcctctggttgacagctttgagaaaacaaatgtagagatcaccctagagactgagaaagagcagaagattagcgcaagctatcaaggcatatacaagcaattagtagaaacactgaaaaacttaggcgtaggggttgtggaaactgttggcaagccatttgatccagtggttcatgaggctatcgcgcgtgaagaatctacagagttcaaggcaggcatcgtctcacacgaagtccaccgagggttccttctgagggagagggtgctaaggcctgccgcggtgaaggtctctaatggtcctggtgaccaaaacgtgagctccacatcttcggaggagcctgtggaggataccaaagaggatgccgctgtgtgaatccgccagaaacctggcgccaacatttaccaagtcgttgtagctggagcaccattgtttgggagctctcgttgtactgttaatatggagcagagtcatttatgagaatgtacatctatggtgatctgcaactttgcaagtatcctaaagaattttactttggtgc

SEQ ID NO: 62178 - protein, 316 aa, Triticum aestivum
  peptide (1)..(316): Ceres Seq. ID no. 13596417
SGVHRTIPRRVFCTFQTARKQNDRGVSTMAATYCAYPAAAAAAAANPTRRRLQTLTAPGALPAARKPSRQPPTFLSFRLPNAALPPLRVAGADPQVVNGEDFPPMNDLIRLYKKAFLDGNEDVVSDIEKAITSMEEERSKSASQFESITAEIASGKNKFLRLNADLENFRKQTEKDRAKFTSNIQVELVQSLLPLVDSFEKTNVEITLETEKEQKISASYQGIYKQLVETLKNLGVGVVETVGKPFDPVVHEAIAREESTEFKAGIVSHEVHRGFLLRERVLRPAAVKVSNGPGDQNVSSTSSEEPVEDTKEDAAV

SEQ ID NO: 62179 - protein, 288 aa, Triticum aestivum
  peptide (1)..(288): Ceres Seq. ID no. 13596418
MAATYCAYPAAAAAAAANPTRRRLQTLTAPGALPAARKPSRQPPTFLSFRLPNAALPPLRVAGADPQVVNGEDFPPMNDLIRLYKKAFLDGNEDVVSDIEKAITSMEEERSKSASQFESITAEIASGKNKFLRLNADLENFRKQTEKDRAKFTSNIQVELVQSLLPLVDSFEKTNVEITLETEKEQKISASYQGIYKQLVETLKNLGVGVVETVGKPFDPVVHEAIAREESTEFKAGIVSHEVHRGFLLRERVLRPAAVKVSNGPGDQNVSSTSSEEPVEDTKEDAAV

SEQ ID NO: 62180 - protein, 212 aa, Triticum aestivum
  peptide (1)..(212): Ceres Seq. ID no. 13596419
MNDLIRLYKKAFLDGNEDVVSDIEKAITSMEEERSKSASQFESITAEIASGKNKFLRLNADLENFRKQTEKDRAKFTSNIQVELVQSLLPLVDSFEKTNVEITLETEKEQKISASYQGIYKQLVETLKNLGVGVVETVGKPFDPVVHEAIAREESTEFKAGIVSHEVHRGFLLRERVLRPAAVKVSNGPGDQNVSSTSSEEPVEDTKEDAAV

SEQ ID NO: 62181 - DNA, 1633 bp, Triticum aestivum
  misc_feature (1)..(1633): Ceres Seq. ID no. 15170127
gaggggaaagcaaaagagggcggcatctttgcgtcggcgatggcggcggcggcgggggcgaggagcagggtggcgttcgtgctggtggacgggataggggacgtgaccatcccttccctcggtgggcgtaccccgctggaggcggccgcggcaccacggctggacgctgtggcggcggctggggtggtcgggctcatggaccccgtggagccggggctcgcctgcggcagcgacacggcgcacctctccctcctcgggtacgatccccgcgtatactaccgcggccgcggcgcgttcgagtccatgggcgctggcctcgccatggccccgggcgacatcgccttcaagtcgaactttgctacattggacgaaagcacgggggttatcgtcagcaggagggcggataggcactttgaggaggaaggcccaatcctctgtgctgcattagatggaatgaagctcccatcatttcccgaatatgaagtgagagtcaggtacgctactgagcacagatgtggtgtggttgtgaaaggaccaaggctaagtggaaacatttccggaactgatccgttgaaagacaaccgcttgcatctaaaggctgaacctttggatgattcggaagaagctaaaaacaccgcagctgtggttaacgagctctctaaggagatcacacgtatactggtttctcaacccatcaatgcaaagcgtgctgtcgagaggaagaatattgctaatgttgtgctattgcgaggctgtggtatccggattgaggtacctccctttgaaaccaagcatggactcacaccatgcatggtagctcctaccaagatcatagccgggctggggctgtcgttgggcattgatatccttgaagcacctggagcaactggagattatagaactctcttaacttccaaggcaaaagctatagccaaggcactctctgctcctctggacacaccacctcgcgtttttgtgcctggagaggatgaatataaagccggaagagaaaatggatacgactttggtttcttgcacatcaaggctattgatgatgctggccatgacaaggctgtcaagttaaaggtgcgaggtctggaagctgtcgaccgggctattggtcagcttgcaaggctcctgtgggaagctgagaagtcggggcactaccagtacttcctctgtgtcactggagaccactctactcctgttgagtacggagaccacagctttgaacctgtcccgtttgcgatatgccggctgagagatttcgtgggagcgattggggagggcaatgtgatgaatacccccctcgacgatttcccgctgccttcggttaaatccggagaagatttaactgatgattcagaaccagcggaacacaagcctgaggagcgtaaagcttttagcggcgatacagtgtgtgaatacaccgagattgctgctgcaaggggctgccttgggcggttccctggaagtgagatgatgggcatcatcaagaagttcatgaaagcaaagaacgattaacgccagttcgattgctaacactgtacttgatctttgtaataatgacaaatggataaacgacgcagaaccagcttaatccgatagtaataaaatctatcatggttgaggc

SEQ ID NO: 62182 - protein, 507 aa, Triticum aestivum
  peptide (1)..(507): Ceres Seq. ID no. 15170128
EGKAKEGGIFASAMAAAAGARSRVAFVLVDGIGDVTIPSLGGRTPLEAAAAPRLDAVAAAGVVGLMDPVEPGLACGSDTAHLSLLGYDPRVYYRGRGAFESMGAGLAMAPGDIAFKSNFATLDESTGVIVSRRADRHFEEEGPILCAALDGMKLPSFPEYEVRVRYATEHRCGVVVKGPRLSGNISGTDPLKDNRLHLKAEPLDDSEEAKNTAAVVNELSKEITRILVSQPINAKRAVERKNIANVVLLRGCGIRIEVPPFETKHGLTPCMVAPTKIIAGLGLSLGIDILEAPGATGDYRTLLTSKAKAIAKALSAPLDTPPRVFVPGEDEYKAGRENGYDFGFLHIKAIDDAGHDKAVKLKVRGLEAVDRAIGQLARLLWEAEKSGHYQYFLCVTGDHSTPVEYGDHSFEPVPFAICRLRDFVGAIGEGNVMNTPLDDFPLPSVKSGEDLTDDSEPAEHKPEERKAFSGDTVCEYTEIAAARGCLGRFPGSEMMGIIKKFMKAKND

SEQ ID NO: 62183 - protein, 494 aa, Triticum aestivum
  peptide (1)..(494): Ceres Seq. ID no. 15170129
MAAAAGARSRVAFVLVDGIGDVTIPSLGGRTPLEAAAAPRLDAVAAAGVVGLMDPVEPGLACGSDTAHLSLLGYDPRVYYRGRGAFESMGAGLAMAPGDIAFKSNFATLDESTGVIVSRRADRHFEEEGPILCAALDGMKLPSFPEYEVRVRYATEHRCGVVVKGPRLSGNISGTDPLKDNRLHLKAEPLDDSEEAKNTAAVVNELSKEITRILVSQPINAKRAVERKNIANVVLLRGCGIRIEVPPFETKHGLTPCMVAPTKIIAGLGLSLGIDILEAPGATGDYRTLLTSKAKAIAKALSAPLDTPPRVFVPGEDEYKAGRENGYDFGFLHIKAIDDAGHDKAVKLKVRGLEAVDRAIGQLARLLWEAEKSGHYQYFLCVTGDHSTPVEYGDHSFEPVPFAICRLRDFVGAIGEGNVMNTPLDDFPLPSVKSGEDLTDDSEPAEHKPEERKAFSGDTVCEYTEIAAARGCLGRFPGSEMMGIIKKFMKAKND

SEQ ID NO: 62184 - protein, 442 aa, Triticum aestivum
  peptide (1)..(442): Ceres Seq. ID no. 15170130
MDPVEPGLACGSDTAHLSLLGYDPRVYYRGRGAFESMGAGLAMAPGDIAFKSNFATLDESTGVIVSRRADRHFEEEGPILCAALDGMKLPSFPEYEVRVRYATEHRCGVVVKGPRLSGNISGTDPLKDNRLHLKAEPLDDSEEAKNTAAVVNELSKEITRILVSQPINAKRAVERKNIANVVLLRGCGIRIEVPPFETKHGLTPCMVAPTKIIAGLGLSLGIDILEAPGATGDYRTLLTSKAKAIAKALSAPLDTPPRVFVPGEDEYKAGRENGYDFGFLHIKAIDDAGHDKAVKLKVRGLEAVDRAIGQLARLLWEAEKSGHYQYFLCVTGDHSTPVEYGDHSFEPVPFAICRLRDFVGAIGEGNVMNTPLDDFPLPSVKSGEDLTDDSEPAEHKPEERKAFSGDTVCEYTEIAAARGCLGRFPGSEMMGIIKKFMKAKND

SEQ ID NO: 62185 - DNA, 1042 bp, Triticum aestivum
  misc_feature (1)..(1042): Ceres Seq. ID no. 13598373
cttatctcctcgtctcgcaaaagcagagacagaagagagatcgattccgactaaaacctctcgccgccgacgaccaagctcggagacctattgacctagttcctgatgtcggacgccgatgattaccgttgcttcgttgggagtctgtcatggaacacaactgatgtggatctgaaggatgcgtttgggaaatttggtcgagttactgagaccaaggtggttcttgacaagttctctggccggtcacgtggctttggatttgtgacttttgatgacaagaaggccatggaagaagctgttgaggctatgaatggaattgatttggatggaaggaatattactgttgaaagagcacaacctcaaggttcaggcagggaccgtgatggagatcgagactatcgtggtggtggtgaccgctatggtggtggccgtgattttggtggcggtcgtggtggtggtcgtggtggcggcggtgattgctacaaatgtggcaagcctggtcattttgcaagggagtgcccttctggtgatggtggggacaggtatggtagcagggatgacaggtatagtagcagggatgacaggtatagtagtagggatgacaggtatggtggcagggatggtggaagggatgacaagtatggtggtagcaacggcagcagtcgctatgggcctgaccgtggtggtgatcgctattctggaagtcgtgatggaggaagccgcagcagtggtggcggtgatcgatacagccgtgacaggtctggaccgtatgatcgtcgcagccgagatgaatactgatcttgatggtggagattctgtctcaggtatgaaaggtattggataatactagtggtatgtttgctttatcacataaggcagcaaatggtttgctgttgtactctttatgagaagtttaatgcttttgttatccatgctgactagtgcttggtttaccaatgttcctacctggatttggcttgtaaccggttccttgggagcttcagtggattgcgttattttgtctgagtaatatttgggatcc

SEQ ID NO: 62186 - protein, 230 aa, Triticum aestivum
  peptide (1)..(230): Ceres Seq. ID no. 13598374
MSDADDYRCFVGSLSWNTTDVDLKDAFGKFGRVTETKVVLDKFSGRSRGFGFVTFDDKKAMEEAVEAMNGIDLDGRNITVERAQPQGSGRDRDGDRDYRGGGDRYGGGRDFGGGRGGGRGGGGDCYKCGKPGHFARECPSGDGGDRYGSRDDRYSSRDDRYSSRDDRYGGRDGGRDDKYGGSNGSSRYGPDRGGDRYSGSRDGGSRSSGGGDRYSRDRSGPYDRRSRDEY

SEQ ID NO: 62187 - protein, 177 aa, Triticum aestivum
  peptide (1)..(177): Ceres Seq. ID no. 13598375
MELIWMEGILLLKEHNLKVQAGTVMEIETIVVVVTAMVVAVILVAVVVVVVVAAVIATNVASLVILQGSALLVMVGTGMVAGMTGIVAGMTGIVVGMTGMVAGMVEGMTSMVVATAAVAMGLTVVVIAILEVVMEEAAAVVAVIDTAVTGLDRMIVAAEMNTDLDGGDSVSGMKGIG

SEQ ID NO: 62188 - protein, 172 aa, Triticum aestivum
  peptide (1)..(172): Ceres Seq. ID no. 13598376
MEGILLLKEHNLKVQAGTVMEIETIVVVVTAMVVAVILVAVVVVVVVAAVIATNVASLVILQGSALLVMVGTGMVAGMTGIVAGMTGIVVGMTGMVAGMVEGMTSMVVATAAVAMGLTVVVIAILEVVMEEAAAVVAVIDTAVTGLDRMIVAAEMNTDLDGGDSVSGMKGIG

SEQ ID NO: 62189 - DNA, 1403 bp, Triticum aestivum
  misc_feature (1)..(1403): Ceres Seq. ID no. 12625237
attctatccaaatccatggaaacctccacgcagaatgtaaggagcgggcggagtaatggagggcgaggcgcagccgccgccggcgtgcgtgtccaaggtgctcgacgaggacaacctcctccgagagatcatcgtccgtgtcggcttccccaccagcctcgtccgcgccgccggcgtctgcacgcgctggctcagccacgcctccgaccgcgcgctcctccgccgtttccgcgagctccacccgcccaggctcctcggcttctacctcgcgaacagggagcgtccgggcggggcgcgcttcctcccggtgctgcctctgcccccggatctcgccgccgtcgtccgccgcgcaagcttcagccttgacacccacgacggcgcgcgccgctccgcaagcttcagccccggcacccactcggacgggcggaccgacgtggtgggctgctggaacggccgcgtcatcaccagctcgcaggggcagaattacgcccacggccgatccgaaattatatttcaagtgcacaccccgctatgctctggctctgagaaaggtgcggccatcatcccagcattacacctcaaagtccaggatggaatttgcaggcttattagacaacccttcttctggattgtcctacttttttgtcacggtggagtgtaccaggtatcatgaagattctaaggtgcatgtgtatatgctgcaaaatggtgatgatgcctggcgcaagcatcttaccttggcctcggacctcctcctgtatccacgcaaaagccccaaaggcgtgctcgttcacaacaaattctatctgccgaccgacaatgaaattgttgtcctggatttggtgtcctcaagcttatcgacaattcagctcccacaaggggtgggttttagtccaataggcaccaccatgttgtcacgggctgatgatgcttctggtgtgtatctcatccatatcaaggaccttcaacttagcatctggctccacaatggggacaactggttgctggtggacaccatttgcttgtgtgaaatatctgataatttgcttgacgatgagcctactgacgatatcctgataaaccatgtgggggactataatgagtttttattcttggagctgggtcgatgcgcactctacttggatgtcaaacgcaggacgctgcgtaaagtgtatgagatgacagcagaggagcaacaattgggtgatatctatcctcttatgatgagctggcttcccaatttccctgcactcatggatagtcctgcaaggtttgccttttgcccttttcgtgatctatatactgtccttgtagagtttactcaattttgcaattcgcatcgtgcatctcactgtttggtatttactatagttgtggggtgctaatacatatgtgattgattc

SEQ ID NO: 62190 - protein, 264 aa, Triticum aestivum
  peptide (1)..(264): Ceres Seq. ID no. 12625238
MEFAGLLDNPSSGLSYFFVTVECTRYHEDSKVHVYMLQNGDDAWRKHLTLASDLLLYPRKSPKGVLVHNKFYLPTDNEIVVLDLVSSSLSTIQLPQGVGFSPIGTTMLSRADDASGVYLIHIKDLQLSIWLHNGDNWLLVDTICLCEISDNLLDDEPTDDILINHVGDYNEFLFLELGRCALYLDVKRRTLRKVYEMTAEEQQLGDIYPLMMSWLPNFPALMDSPARFAFCPFRDLYTVLVEFTQFCNSHRASHCLVFTIVVGC

SEQ ID NO: 62191 - protein, 229 aa, Triticum aestivum
  peptide (1)..(229): Ceres Seq. ID no. 12625239
MLQNGDDAWRKHLTLASDLLLYPRKSPKGVLVHNKFYLPTDNEIVVLDLVSSSLSTIQLPQGVGFSPIGTTMLSRADDASGVYLIHIKDLQLSIWLHNGDNWLLVDTICLCEISDNLLDDEPTDDILINHVGDYNEFLFLELGRCALYLDVKRRTLRKVYEMTAEEQQLGDIYPLMMSWLPNFPALMDSPARFAFCPFRDLYTVLVEFTQFCNSHRASHCLVFTIVVGC

SEQ ID NO: 62192 - protein, 205 aa, Triticum aestivum
  peptide (1)..(205): Ceres Seq. ID no. 12625240
MEGEAQPPPACVSKVLDEDNLLREIIVRVGFPTSLVRAAGVCTRWLSHASDRALLRRFRELHPPRLLGFYLANRERPGGARFLPVLPLPPDLAAVVRRASFSLDTHDGARRSASFSPGTHSDGRTDVVGCWNGRVITSSQGQNYAHGRSEIIFQVHTPLCSGSEKGAAIIPALHLKVQDGICRLIRQPFFWIVLLFCHGGVYQVS

SEQ ID NO: 62193 - DNA, 1566 bp, Triticum aestivum
  misc_feature (1)..(1566): Ceres Seq. ID no. 15226307
gtccactagttcctccaccaaaaactagggttagggttagggcggcggcggctttatttccgatcgcgatcgccatggccaccggaggcgccccaaagccggaggaggagaccgtcgtcttccccgattgggtgatgctggaacgcatcttccgcaaacggtgcctcgacgacctagacgctgctggtgaggccgtcaacaagaacaagaccgctgctccagtcaagatagacggcgttcactcctgcttcgtctccttcaccctcgcagctcctccagggtcctcctacttcaacctccattggccggagagacaaggctcagacagactctctgccttcgtccgggcaaccgacaagaacctcgtcctcttcgacatctcgatccccgaccggattcgctacatggacgctccgccagatctgttcgtctacacggcctctgctccttccccctcggtgcagcagcttcctcggcgcagcacaaggcggttcctggctcatcagttcatcaccggcattctgcagctcaaagcggagcactgctacatcgttgccgacctcaatgtccaccccaagaaaaagggcgtttgggctgaactctgtgtcttcaactccggcgccaacgactggagaatcatcaccgaggtgcttgctgatgagctccctgacctctggtggtccgatgatgtgtttgctttcgacggccgtttcctttgctgggtggactacttctgcggcgtcgtgctatgcgacttctccaaaaatgtggactcaggtgctccacttcgtgccttttcctggaggaatcaaatacccttttgacgcacggttcccgaggtacttcccagggaggttccgaagtgcgtccatcagccaaggcatgatccgctatatccacattgacaatgactttcatgagactatccactccgactggcaagtgatgattcctcctaagagaagccaacggcggcagcagcagcttccccacaaaatcaccatttggacgttgaactccaagttcgagtgggaggtgcattgtaagatcaacctggattgtctctgggcacaacctctttaccgaggtctacctcggcgtcttcctgagttcccagtcatcagcatggatgacccgggtgttctgtgctgcctgctgagggcgaaggaatttggtggcaaggagcggatgatcatggttgacatgaaccatgcggatctgcagtcatttactgatgtgaatgtagaagacaagttctctaataccacccaacttccaactgtcttctccaaataccttcaaaaggccaacagggatggcatggggcaacattgagcttacttcattgaaatgcaagtctgcaatatgaagacctgtaatctggtgactgaaggtgaaaactttgcggatgctcaaatcaaagatgttgtttgtcaatgacgcggtgcaggcagaacagtttgatgatgtactgatgaatatctattggagtaacgctacatgttctggatcatgtaatcatatgtttcagcgttaaaagtatgagattgaaaaaaaaaaaaaaaa

SEQ ID NO: 62194 - protein, 273 aa, Triticum aestivum
  peptide (1)..(273): Ceres Seq. ID no. 15226308
PLVPPPKTRVRVRAAAALFPIAIAMATGGAPKPEEETVVFPDWVMLERIFRKRCLDDLDAAGEAVNKNKTAAPVKIDGVHSCFVSFTLAAPPGSSYFNLHWPERQGSDRLSAFVRATDKNLVLFDISIPDRIRYMDAPPDLFVYTASAPSPSVQQLPRRSTRRFLAHQFITGILQLKAEHCYIVADLNVHPKKKGVWAELCVFNSGANDWRIITEVLADELPDLWWSDDVFAFDGRFLCWVDYFCGVVLCDFSKNVDSGAPLRAFSWRNQIPF

SEQ ID NO: 62195 - protein, 256 aa, Triticum aestivum
  peptide (1)..(256): Ceres Seq. ID no. 15226309
MSTPRKRAFGLNSVSSTPAPTTGESSPRCLLMSSLTSGGPMMCLLSTAVSFAGWTTSAASCYATSPKMWTQVLHFVPFPGGIKYPFDARFPRYFPGRFRSASISQGMIRYIHIDNDFHETIHSDWQVMIPPKRSQRRQQQLPHKITIWTLNSKFEWEVHCKINLDCLWAQPLYRGLPRRLPEFPVISMDDPGVLCCLLRAKEFGGKERMIMVDMNHADLQSFTDVNVEDKFSNTTQLPTVFSKYLQKANRDGMGQH

SEQ ID NO: 62196 - protein, 249 aa, Triticum aestivum
  peptide (1)..(249): Ceres Seq. ID no. 15226310
MATGGAPKPEEETVVFPDWVMLERIFRKRCLDDLDAAGEAVNKNKTAAPVKIDGVHSCFVSFTLAAPPGSSYFNLHWPERQGSDRLSAFVRATDKNLVLFDISIPDRIRYMDAPPDLFVYTASAPSPSVQQLPRRSTRRFLAHQFITGILQLKAEHCYIVADLNVHPKKKGVWAELCVFNSGANDWRIITEVLADELPDLWWSDDVFAFDGRFLCWVDYFCGVVLCDFSKNVDSGAPLRAFSWRNQIPF

SEQ ID NO: 62197 - DNA, 2147 bp, Triticum aestivum
  misc_feature (1)..(2147): Ceres Seq. ID no. 13654290
acaccatccaccacatcccatcccaggagattaaaaaaggacaagagctcgattcaaatccgatcctgcgttacgtatcgcgcttcttccgtccgtgtgttcgttccgaggccaggagtttgaggagatggcgggcggcggtgtcgaggacgtctacggcgaggacagggccaccgaggagcagctcatcacgccatggtcattctccgtcgcaagtgggcaccagcttctgagggacccccggcacaacaaggggctggccttctccgaggcggagcgcgacgcgcactacctccggggcctgcttcccccggccatcgtctcccaggagcaccaggagaagaagatcatgcacaacctccgcagttacaccgtccccctgcaccgctacgtcgccatgatggacctccaggagaggaacgagaggctcttctacaagctcctcatcgacaacgtcgaggagctgctccccgtcgtctacacgcccgtcgtcggcgaggcctgccagaagtacggcagcatctaccgccgcccgcaggggctctacatcagcctcaaggacaagggcaaggtgctcgaggtgctcaagaactggcctgagaggagcatccaggtcatcgtcgtcaccgacggcgagcgcattttggggctcggagatctgggttgccagggtatggggattccggttggcaaactgtctctgtacaccgccctcggaggagttcgcccatcagcttgcctgccaattacgatcgatgttggcaccaacaatgagacattgctgaacgacgagtactacatcgggctccgtcaacggcgtgctaccggcgaggaataccatgagcttcttcaagagttcatgaatgcagtgaagcagaactacggcgagaaagtcctggtccagtttgaggactttgccaaccacaatgcattcgatttgctcgcaaagtacagcaagagccatctcgtcttcaacgatgatattcagggcacagcatcagtggtcctcgcaggcctcttggcggccctgaggatgatcggtggaggccttgtggatcagacttacctcttccttggtgctggagaggctggaactggcattgcagaactcattgctcttgagatgtcgaaacacactgaactcccggtggacgactgccgcaagaagatctggctggtggactccaagggtctgcttgtcgagtctagaaaagagtctctgcagcacttcaagaagccgttcgctcatgagcacgaagaactcaagaccctgctggaggccgtccagtccatcaagccaaccgtgctgatcggaacctccggcgtcgggaagaccttcacccaggaagtgatcgaggccatggcctccttcaacgagaaacccgtcatcttctcgctgtcgaacccgacgtcccactcggagtgcacggccgaggaggcctacacctggagcaagggcacggcggtgttcgcgagcggcagcccgttcgaccccgtggagtacgaggggaagacgttcgtgcccgggcagtccaacaacgcctacgtgttccccggcttcggcctcggcgtcgtcatctccggcgccatccgcgtccacgacgacatgctcctcgccgcctcggaggcgctggcggaggaggcgacccaggagaacttcgacaaggggctcatcttcccgcccttcaccaacatccgcaagatctcggccagcatcgccgccaaggtggccgccaaggcctacgacctgggcctggccagccggctgccgcggcccgacgacctggtcaagtacgccgagagctgcatgtacaccccgctctaccgcagctacaggtgagcgtggcgggcagttttgcggccagcacggacggagtcaatcaataaaatcaatctccttcccccgtatgccaaccagctcaactcaaagcttcagcgacgcaacctaaaacataggctttctttccttctgtgtccgtctatgcgtatgtgtactcttgtgctcttctactttgctttactttgtactgtaatgtactgttaacgggagcacggcacgcacctgtctatccgtgtcgaggtgcgtcgtcgtcgtcgtcgtcgattcttttgtcagattgagttaaacgagtgtaatagtttgattg

SEQ ID NO: 62198 - protein, 570 aa, Triticum aestivum
  peptide (1)..(570): Ceres Seq. ID no. 13654291
MAGGGVEDVYGEDRATEEQLITPWSFSVASGHQLLRDPRHNKGLAFSEAERDAHYLRGLLPPAIVSQEHQEKKIMHNLRSYTVPLHRYVAMMDLQERNERLFYKLLIDNVEELLPVVYTPVVGEACQKYGSIYRRPQGLYISLKDKGKVLEVLKNWPERSIQVIVVTDGERILGLGDLGCQGMGIPVGKLSLYTALGGVRPSACLPITIDVGTNNETLLNDEYYIGLRQRRATGEEYHELLQEFMNAVKQNYGEKVLVQFEDFANHNAFDLLAKYSKSHLVFNDDIQGTASVVLAGLLAALRMIGGGLVDQTYLFLGAGEAGTGIAELIALEMSKHTELPVDDCRKKIWLVDSKGLLVESRKESLQHFKKPFAHEHEELKTLLEAVQSIKPTVLIGTSGVGKTFTQEVIEAMASFNEKPVIFSLSNPTSHSECTAEEAYTWSKGTAVFASGSPFDPVEYEGKTFVPGQSNNAYVFPGFGLGVVISGAIRVHDDMLLAASEALAEEATQENFDKGLIFPPFTNIRKISASIAAKVAAKAYDLGLASRLPRPDDLVKYAESCMYTPLYRSYR

SEQ ID NO: 62199 - protein, 496 aa, Triticum aestivum
  peptide (1)..(496): Ceres Seq. ID no. 13654292
MHNLRSYTVPLHRYVAMMDLQERNERLFYKLLIDNVEELLPVVYTPVVGEACQKYGSIYRRPQGLYISLKDKGKVLEVLKNWPERSIQVIVVTDGERILGLGDLGCQGMGIPVGKLSLYTALGGVRPSACLPITIDVGTNNETLLNDEYYIGLRQRRATGEEYHELLQEFMNAVKQNYGEKVLVQFEDFANHNAFDLLAKYSKSHLVFNDDIQGTASVVLAGLLAALRMIGGGLVDQTYLFLGAGEAGTGIAELIALEMSKHTELPVDDCRKKIWLVDSKGLLVESRKESLQHFKKPFAHEHEELKTLLEAVQSIKPTVLIGTSGVGKTFTQEVIEAMASFNEKPVIFSLSNPTSHSECTAEEAYTWSKGTAVFASGSPFDPVEYEGKTFVPGQSNNAYVFPGFGLGVVISGAIRVHDDMLLAASEALAEEATQENFDKGLIFPPFTNIRKISASIAAKVAAKAYDLGLASRLPRPDDLVKYAESCMYTPLYRSYR

SEQ ID NO: 62200 - protein, 480 aa, Triticum aestivum
  peptide (1)..(480): Ceres Seq. ID no. 13654293
MMDLQERNERLFYKLLIDNVEELLPVVYTPVVGEACQKYGSIYRRPQGLYISLKDKGKVLEVLKNWPERSIQVIVVTDGERILGLGDLGCQGMGIPVGKLSLYTALGGVRPSACLPITIDVGTNNETLLNDEYYIGLRQRRATGEEYHELLQEFMNAVKQNYGEKVLVQFEDFANHNAFDLLAKYSKSHLVFNDDIQGTASVVLAGLLAALRMIGGGLVDQTYLFLGAGEAGTGIAELIALEMSKHTELPVDDCRKKIWLVDSKGLLVESRKESLQHFKKPFAHEHEELKTLLEAVQSIKPTVLIGTSGVGKTFTQEVIEAMASFNEKPVIFSLSNPTSHSECTAEEAYTWSKGTAVFASGSPFDPVEYEGKTFVPGQSNNAYVFPGFGLGVVISGAIRVHDDMLLAASEALAEEATQENFDKGLIFPPFTNIRKISASIAAKVAAKAYDLGLASRLPRPDDLVKYAESCMYTPLYRSYR

SEQ ID NO: 62201 - DNA, 1173 bp, Triticum aestivum
  misc_feature (1)..(1173): Ceres Seq. ID no. 12578438
atcctacctcgctccacgccacttcccactagctagcctccaaggagagcagagcaccatgacgatgctgcgggctgtgtccgtcacggtgggcgtggccgtggcgctgctggcggcggccacggcggcggagtcgtggctgtacgaggagttcaccacggacggcaacgtgcgcgcggactacaacgcgcaggggcagcaggtggcgtcgctcatgctcacccagcagtccggcggcggcgccttcggctcccggcagaagtacctctacggcgagttcagcatccagatgaagctcgtccccggcaactccgccggcaccgtcacctccttctacctgtcgtcgggcgacggccccgggcacgacgagatcgacatggagttcatgggcaactccacggggcagccggtggtgctcaacaccaacgtgtgggccaacggcgacggcaagaaggagcaccagttcgacctctggttcgacccggccgcggactaccacacctacaccatcatctggaaccacaagaacgtcctcttcaaggtggacgacctcttcatccgctccttcaggcgccacgccgacctcccctacccgggcgccaagcccatgtccgtgcacgccacgctctgggacggcagctactgggccacgctcaagggcaaggtccccgtcgactggtccggcgcgcccttcctcgtctcctaccgcgcctactccgccgacgcctgcgtgcccgcggaaggcggcccgctctcctgccccgccggcaccgaccgctggatgaaccggcagctcgacgacgccgagcgcggcaccgtcgcctgggccaagcgcgactacatgcgctacaactactgcgacgacggctggcgattcccgcagggcttccccgccgagtgctcccgcgcctgaacacaaccgattgagatttgagttcacgtccccaatcccccgatgagattctaccttgttagcttgattcttttttctggtttcttcagcagccggctcctctacctctatgtgttcttgttttcgtcaaaaaacctctctctgttaagtgttttttcttaacgagaggggttaactctaacgataataaacgtaaattcgttgagtaaatacagtagtatttaaaaaaaaaaaaaaaaaagcttatcgataccgtcgac

SEQ ID NO: 62202 - protein, 303 aa, Triticum aestivum
  peptide (1)..(303): Ceres Seq. ID no. 12578439
SYLAPRHFPLASLQGEQSTMTMLRAVSVTVGVAVALLAAATAAESWLYEEFTTDGNVRADYNAQGQQVASLMLTQQSGGGAFGSRQKYLYGEFSIQMKLVPGNSAGTVTSFYLSSGDGPGHDEIDMEFMGNSTGQPVVLNTNVWANGDGKKEHQFDLWFDPAADYHTYTIIWNHKNVLFKVDDLFIRSFRRHADLPYPGAKPMSVHATLWDGSYWATLKGKVPVDWSGAPFLVSYRAYSADACVPAEGGPLSCPAGTDRWMNRQLDDAERGTVAWAKRDYMRYNYCDDGWRFPQGFPAECSRA

SEQ ID NO: 62203 - protein, 284 aa, Triticum aestivum
  peptide (1)..(284): Ceres Seq. ID no. 12578440
MTMLRAVSVTVGVAVALLAAATAAESWLYEEFTTDGNVRADYNAQGQQVASLMLTQQSGGGAFGSRQKYLYGEFSIQMKLVPGNSAGTVTSFYLSSGDGPGHDEIDMEFMGNSTGQPVVLNTNVWANGDGKKEHQFDLWFDPAADYHTYTIIWNHKNVLFKVDDLFIRSFRRHADLPYPGAKPMSVHATLWDGSYWATLKGKVPVDWSGAPFLVSYRAYSADACVPAEGGPLSCPAGTDRWMNRQLDDAERGTVAWAKRDYMRYNYCDDGWRFPQGFPAECSRA

SEQ ID NO: 62204 - protein, 282 aa, Triticum aestivum
  peptide (1)..(282): Ceres Seq. ID no. 12578441
MLRAVSVTVGVAVALLAAATAAESWLYEEFTTDGNVRADYNAQGQQVASLMLTQQSGGGAFGSRQKYLYGEFSIQMKLVPGNSAGTVTSFYLSSGDGPGHDEIDMEFMGNSTGQPVVLNTNVWANGDGKKEHQFDLWFDPAADYHTYTIIWNHKNVLFKVDDLFIRSFRRHADLPYPGAKPMSVHATLWDGSYWATLKGKVPVDWSGAPFLVSYRAYSADACVPAEGGPLSCPAGTDRWMNRQLDDAERGTVAWAKRDYMRYNYCDDGWRFPQGFPAECSRA

SEQ ID NO: 62205 - DNA, 757 bp, Triticum aestivum
  misc_feature (1)..(757): Ceres Seq. ID no. 12598353
aaggagggaaagacgactattttcctccgcctcgatcccatcgccgtctcccccccacacctcgatcccgccgccgccccacccaccatggcgcgggcgaagccgtcgtcggcggcggcgaagaagagccaggcggcgcagcagggcggcggggccgggcacgcggcgccgtccgggctcgcgcggtacctcgacccggaggcgccgtgggacaaggaccggctgctggacgccgtgcactggatccgccaggcggtgggcctcgcctgcggccttctctggggcgccgtcccgctcgtcggcgccgcctggatcgtcctgttcgtggccatttcttctggcataatttactggtactatgcgcacctattgaaggtcgacgaggaagaatttggaggccatggcgcgctgcttcaggaggggatgtttgcatctttcaccctttttcctgctttcatggatttctttgtgtacagtttggctcacttttgatgagaagctcctttgttgaacatacccttgatttgggatcggattggcggaaaaaaattcaccagaactctgtagattattgaagagccctagaacagcattgtatgaaatcggttcaggcagtcatgttgtctctgaatcccagtgtaattttgatagaacatcttagcataccagttgttggcagaacatgttcagtatgcttgacatgtaactattggatatcattctcctgcgtcgattcaataaaatgttttaacatgtg

SEQ ID NO: 62206 - protein, 190 aa, Triticum aestivum
  peptide (1)..(190): Ceres Seq. ID no. 12598354
GGKDDYFPPPRSHRRLPPTPRSRRRPTHHGAGEAVVGGGEEEPGGAAGRRGRARGAVRARAVPRPGGAVGQGPAAGRRALDPPGGGPRLRPSLGRRPARRRRLDRPVRGHFFWHNLLVLCAPIEGRRGRIWRPWRAASGGDVCIFHPFSCFHGFLCVQFGSLLMRSSFVEHTLDLGSDWRKKIHQNSVDY

SEQ ID NO: 62207 - protein, 163 aa, Triticum aestivum
  peptide (1)..(163): Ceres Seq. ID no. 12598355
KEGKTTIFLRLDPIAVSPPHLDPAAAPPTMARAKPSSAAAKKSQAAQQGGGAGHAAPSGLARYLDPEAPWDKDRLLDAVHWIRQAVGLACGLLWGAVPLVGAAWIVLFVAISSGIIYWYYAHLLKVDEEEFGGHGALLQEGMFASFTLFPAFMDFFVYSLAHF

SEQ ID NO: 62208 - protein, 134 aa, Triticum aestivum
  peptide (1)..(134): Ceres Seq. ID no. 12598356
MARAKPSSAAAKKSQAAQQGGGAGHAAPSGLARYLDPEAPWDKDRLLDAVHWIRQAVGLACGLLWGAVPLVGAAWIVLFVAISSGIIYWYYAHLLKVDEEEFGGHGALLQEGMFASFTLFPAFMDFFVYSLAHF

SEQ ID NO: 62209 - DNA, 967 bp, Triticum aestivum
  misc_feature (1)..(967): Ceres Seq. ID no. 13598305
ctagaacatcctaatcgaaaaacatcccgccccccacagccatccgtccacagagtcaccacagccgcaccgcagctccatcttcaccaccgtcatcgtcaacgagaagcagcggcgagcagcagcgcccggccaagagacgagacgagacgagagaacaagtgttgccatggccgcgatggagagcaagagccggaggttcgcgctggcgtgcggcgtcctcagccagtacgtcaaggcggagcagaagatgtcctcctccgccgtcgtcgccccgcccccgcgcgccccgccggccaccacgctcagcctcatgcccggcgccgacgtcggccaggaccacgccgcggcggccgctgaggaggcgggcccggccacgccgctcaccatcttctacggcggcagggtagtcgtcttcgaggacttccccgcggacaaggcggccgaggtcatgcgcatggccaccaccgccggcgtcgagcgcgcggccgccacgcccgccccggccccggcgctcgcggacctgcccatcatgcgcaaggcctccctgcagaggttcttcgagaagcgcaaggaccgcctcggcgcgcgcgcgccctacgcccgccccgccgcgccggcagccaacaagggctcggaggacaagtcggcgtcgtcctcctcgtggctcgggctggccagcgccgacggcgccttcgcgctctgatccggacggacggacggacggggcaagacggcttgctcgctcgcctcaagacatcgtttgtagagcactttcaattttaatgtattctttgggtaaaaattcgaatagcgaaagaaagaaagaaagaaacaagattgagttcatagcaagccctctttgttcgttcgtttgatttgatcgacaaattcttttgatttctgcgcggatcatcagccatggttcgcacagaaacccagttcagttcatgaaccgaacaataac

SEQ ID NO: 62210 - protein, 178 aa, Triticum aestivum
  peptide (1)..(178): Ceres Seq. ID no. 13598306
MAAMESKSRRFALACGVLSQYVKAEQKMSSSAVVAPPPRAPPATTLSLMPGADVGQDHAAAAAEEAGPATPLTIFYGGRVVVFEDFPADKAAEVMRMATTAGVERAAATPAPAPALADLPIMRKASLQRFFEKRKDRLGARAPYARPAAPAANKGSEDKSASSSSWLGLASADGAFAL

SEQ ID NO: 62211 - protein, 175 aa, Triticum aestivum
  peptide (1)..(175): Ceres Seq. ID no. 13598307
MESKSRRFALACGVLSQYVKAEQKMSSSAVVAPPPRAPPATTLSLMPGADVGQDHAAAAAEEAGPATPLTIFYGGRVVVFEDFPADKAAEVMRMATTAGVERAAATPAPAPALADLPIMRKASLQRFFEKRKDRLGARAPYARPAAPAANKGSEDKSASSSSWLGLASADGAFAL

SEQ ID NO: 62212 - protein, 151 aa, Triticum aestivum
  peptide (1)..(151): Ceres Seq. ID no. 13598308
MSSSAVVAPPPRAPPATTLSLMPGADVGQDHAAAAAEEAGPATPLTIFYGGRVVVFEDFPADKAAEVMRMATTAGVERAAATPAPAPALADLPIMRKASLQRFFEKRKDRLGARAPYARPAAPAANKGSEDKSASSSSWLGLASADGAFAL

SEQ ID NO: 62213 - DNA, 958 bp, Triticum aestivum
  misc_feature (1)..(958): Ceres Seq. ID no. 13596116
atctcatctccgaggaaccatcaatccgagatagctctacaaccagcaaagccatccaaagccatgaggttgcagtgctccctggtcctcctgatcgccctgagcgtcggctgcgcggcagcgcaggagagcgggaaacaggcgggctacgatttcttctacctcgtgctgcagtggccggggtcgtactgcgacacgaagcagagctgctgctacccgcggtccggcaaaccggcggcggacttcgggatccacgggctgtggcccaaccgcgacgacgggtcctacccgcagaactgcaaccccgacagcgccttcgatccctccaaggtgagcgacatcctgagcagcctgcgcagcagctggccgacgctggcgtgcccgaccaacgacggcctccgcttctgggcgcacgagtgggagaagcacggcacctgcgcgcagaacctcttcaacgagcacggctacttccaggccgccctccgcctgcgcggccagctccgcgtcctcgacgccctcgccaccgcgggcatctcccccgacggcgggtactacacgatgggggccatcaagggcgccatccaggaggggaccgggttcgcgcctcacgtcgactgcaaccgcgacgagtccggcaacagccagctcttccagctctacttctgcgtccacgccgacgcctcccgcttcgtcgagtgccccgtccagcccggcggcaggccctgtggcaacaggatcgagttcccggctttctgatcattatctcctccaacccaaggagttatcatgtgttccttaatttgcctcccgattcctagatattcatttggttttcatttcttgccgctggcagaataaactgagggtgcatattcgaacatgtgctcgttttctttctttcccccccttaattttcatgttaatgacctgatctcaggcagcaattgaagttacgacg

SEQ ID NO: 62214 - protein, 271 aa, Triticum aestivum
  peptide (1)..(271): Ceres Seq. ID no. 13596117
LISEEPSIRDSSTTSKAIQSHEVAVLPGPPDRPERRLRGSAGERETGGLRFLLPRAAVAGVVLRHEAELLLPAVRQTGGGLRDPRAVAQPRRRVLPAELQPRQRLRSLQGERHPEQPAQQLADAGVPDQRRPPLLGARVGEARHLRAEPLQRARLLPGRPPPARPAPRPRRPRHRGHLPRRRVLHDGGHQGRHPGGDRVRASRRLQPRRVRQQPALPALLLRPRRRLPLRRVPRPARRQALWQQDRVPGFLIIISSNPRSYHVFLNLPPDS

SEQ ID NO: 62215 - protein, 251 aa, Triticum aestivum
  peptide (1)..(251): Ceres Seq. ID no. 13596118
ISSPRNHQSEIALQPAKPSKAMRLQCSLVLLIALSVGCAAAQESGKQAGYDFFYLVLQWPGSYCDTKQSCCYPRSGKPAADFGIHGLWPNRDDGSYPQNCNPDSAFDPSKVSDILSSLRSSWPTLACPTNDGLRFWAHEWEKHGTCAQNLFNEHGYFQAALRLRGQLRVLDALATAGISPDGGYYTMGAIKGAIQEGTGFAPHVDCNRDESGNSQLFQLYFCVHADASRFVECPVQPGGRPCGNRIEFPAF

SEQ ID NO: 62216 - protein, 230 aa, Triticum aestivum
  peptide (1)..(230): Ceres Seq. ID no. 13596119
MRLQCSLVLLIALSVGCAAAQESGKQAGYDFFYLVLQWPGSYCDTKQSCCYPRSGKPAADFGIHGLWPNRDDGSYPQNCNPDSAFDPSKVSDILSSLRSSWPTLACPTNDGLRFWAHEWEKHGTCAQNLFNEHGYFQAALRLRGQLRVLDALATAGISPDGGYYTMGAIKGAIQEGTGFAPHVDCNRDESGNSQLFQLYFCVHADASRFVECPVQPGGRPCGNRIEFPAF

SEQ ID NO: 62217 - DNA, 1109 bp, Triticum aestivum
  misc_feature (1)..(1109): Ceres Seq. ID no. 13596484
aaatgctcgtactctctctcccatctcccgcccggctgcttaaaagcccattatcggcgccgcctgtgacctcacctcactccgcctcgcagtcataattctccctagcatctttcttaccactagtattagtaggaggacctcctcctgttgctgctggagtggttgcttgtgtggtagagaggagaggagagggagatggaaggaggaggcgcggacggggtgacgagggtgctgctggtggacgactccccggtggacaggaaggtggtggaactggtgctcggcagcaacaccttcgccggctccttccacgtcgtcgccgtggacagcgccaagaaggccatggagttcctggggctcaaggacggcaaggagcaggccgtcgacatggtgctcactgactactgcatgcctgagatgaccggctacgacctcctcaaagccatcaaggcgatgagtcctctcaagcccatcccggtgatcgtcatgtcgtcggagaacgagccccagaggatcagcagatgcctcaaggctggtgctgaagattacatcgtcaagcctcttcagagcaaggatgtgccgcgtctgaggagctgctcgaacgtgaaacccaaggaccctccatgcagcactgtgagcaagagctcggaccatatagctgctgtcgatggcaagtcgtcgctgcgacggcgagcacacctcaccgatattgccatggttctccactcgtcgagcgccgggctctcgcactacttcccgttcctcttcaagttcatcctgctggtctacgccatcctgtgcgtcggcgagctcctgcacagatggtccaacggctgcttcctctcctacctgaggtgatggtgccgcggtccagtgacatgctgcagctctgcaaggagtagctcgtgtgtcgtagcttatgagtgagcagtgaacctccatgtttcaacaaccatggatggagctttaggtagtagattcgtttgctttgagattctctgaccgggcgtcagttcttggccttgttgggctgacgagttgaggaagaaccccttgtatccatccttgtacaaaacgcacaatgaggcaggcggtatctgatgtcc

SEQ ID NO: 62218 - protein, 220 aa, Triticum aestivum
  peptide (1)..(220): Ceres Seq. ID no. 13596485
MEGGGADGVTRVLLVDDSPVDRKVVELVLGSNTFAGSFHVVAVDSAKKAMEFLGLKDGKEQAVDMVLTDYCMPEMTGYDLLKAIKAMSPLKPIPVIVMSSENEPQRISRCLKAGAEDYIVKPLQSKDVPRLRSCSNVKPKDPPCSTVSKSSDHIAAVDGKSSLRRRAHLTDIAMVLHSSSAGLSHYFPFLFKFILLVYAILCVGELLHRWSNGCFLSYLR

SEQ ID NO: 62219 - protein, 171 aa, Triticum aestivum
  peptide (1)..(171): Ceres Seq. ID no. 13596486
MEFLGLKDGKEQAVDMVLTDYCMPEMTGYDLLKAIKAMSPLKPIPVIVMSSENEPQRISRCLKAGAEDYIVKPLQSKDVPRLRSCSNVKPKDPPCSTVSKSSDHIAAVDGKSSLRRRAHLTDIAMVLHSSSAGLSHYFPFLFKFILLVYAILCVGELLHRWSNGCFLSYLR

SEQ ID NO: 62220 - protein, 156 aa, Triticum aestivum
  peptide (1)..(156): Ceres Seq. ID no. 13596487
MVLTDYCMPEMTGYDLLKAIKAMSPLKPIPVIVMSSENEPQRISRCLKAGAEDYIVKPLQSKDVPRLRSCSNVKPKDPPCSTVSKSSDHIAAVDGKSSLRRRAHLTDIAMVLHSSSAGLSHYFPFLFKFILLVYAILCVGELLHRWSNGCFLSYLR

SEQ ID NO: 62221 - DNA, 966 bp, Triticum aestivum
  misc_feature (1)..(966): Ceres Seq. ID no. 13583358
atggatggctgattctccaccggtacatcccgtcaccggtaaaaaaacttattcggcagctcccagccgtgcgccgtctcaactctcaagcgccgctcgccagcgaaacccgatccaagacaacaatacccactcccaaccttctgtggcgatggcagcactggcgaggagggcgggaggatcccctgcggcggcgctgtgggccgcggccaggggattcgcgtcggtcggctccgacatcgtctccgcggcgcccggcgtgtcgctgcagaaggcgcggtcctgggacgagggggtcgccaccaagttctccaccacccctctcaaggacatcttccatgggaagaaagtcgtcatcttcgggttgccgggtgcatacacaggagtatgttcgcagtcccacgttcctagttacaagaacaacattgataagttgaaagcaaaagggatcgactctgttatctgtgtagctgtaaatgatccctatgtgctgaatggatgggcagaaaaattacaggcaaaagatgcaattgagttttatggtgaccttgacgggagcttccacaaaagcttggatttggaaatagatctctctgctgctttgcttggtcgacgctcccacaggtggtcggcctttgtcgatgatgggaagatcaaggcattcaacgttgagaaagccccttctgacttcaaggtttctggtgctgaggtgatcttggatcaaatctgagctgatcggtaatcggtgctctgttttgcttttgtgatgcaaataagtgacagctcgagaatctgtgtgaagatgttgctgtctgtcgtgctagttccaggacagtcattttgctgctgcaaatctttatttcttttgttccagaacagtcatcgaattagtcaccggttcgtgtatgcgacagtttctgttatttggcgtttgatgaagagctgtgctcgcgtgcaggtaatccg

SEQ ID NO: 62222 - protein, 242 aa, Triticum aestivum
  peptide (1)..(242): Ceres Seq. ID no. 13583359
WMADSPPVHPVTGKKTYSAAPSRAPSQLSSAARQRNPIQDNNTHSQPSVAMAALARRAGGSPAAALWAAARGFASVGSDIVSAAPGVSLQKARSWDEGVATKFSTTPLKDIFHGKKVVIFGLPGAYTGVCSQSHVPSYKNNIDKLKAKGIDSVICVAVNDPYVLNGWAEKLQAKDAIEFYGDLDGSFHKSLDLEIDLSAALLGRRSHRWSAFVDDGKIKAFNVEKAPSDFKVSGAEVILDQI

SEQ ID NO: 62223 - protein, 241 aa, Triticum aestivum
  peptide (1)..(241): Ceres Seq. ID no. 13583360
MADSPPVHPVTGKKTYSAAPSRAPSQLSSAARQRNPIQDNNTHSQPSVAMAALARRAGGSPAAALWAAARGFASVGSDIVSAAPGVSLQKARSWDEGVATKFSTTPLKDIFHGKKVVIFGLPGAYTGVCSQSHVPSYKNNIDKLKAKGIDSVICVAVNDPYVLNGWAEKLQAKDAIEFYGDLDGSFHKSLDLEIDLSAALLGRRSHRWSAFVDDGKIKAFNVEKAPSDFKVSGAEVILDQI

SEQ ID NO: 62224 - protein, 192 aa, Triticum aestivum
  peptide (1)..(192): Ceres Seq. ID no. 13583361
MAALARRAGGSPAAALWAAARGFASVGSDIVSAAPGVSLQKARSWDEGVATKFSTTPLKDIFHGKKVVIFGLPGAYTGVCSQSHVPSYKNNIDKLKAKGIDSVICVAVNDPYVLNGWAEKLQAKDAIEFYGDLDGSFHKSLDLEIDLSAALLGRRSHRWSAFVDDGKIKAFNVEKAPSDFKVSGAEVILDQI

SEQ ID NO: 62225 - DNA, 745 bp, Triticum aestivum
  misc_feature (1)..(745): Ceres Seq. ID no. 15224932
attaagtgtccgcggctgctagctcctcctccctctgtggtacgatcatcctcctctgctacgttgaccaagatggccgcgcgccttgcgcttgtggcgacgctcctgtgcgccggagccgcggccgccgcggcgcagcaggcgagcaacgtccgcgcgacctaccactactaccgcccggccgagaacggctgggacctgggcgcccctgccgtgagcgcctactgctccacctgggacgccggcaagccgtactcgtggcggtccaagtacggctggacggccttctgcggccccgccggcccccgcggccaggcgtcgtgcgggaggtgcatccgggtgaccaacacggggacgggggcgcagatcacggccaggatcgtggaccagtgcgccaacggcgggctggacctcgactgggacaccgtgttcgtcaagatcgataccgatggcatggggtaccagaggggccacctcatcgtcaactacgagttcgtcgactgcggcgacaaccacatcaacttccatggaaagaacgagacgctaccggccagcactggtgctgttgagtaagtaaaagctagtagcacatgcatgcattgatgttgcattgttgcgctgtacgcaaacatgtatgcatgcatggcacggaagttgaataagtcaaacgggaagttggaatgaatttcatgtatgaatcttatgattgtaacagcggaaagtgaaataaatctcagaagttgac

SEQ ID NO: 62226 - protein, 190 aa, Triticum aestivum
  peptide (1)..(190): Ceres Seq. ID no. 15224933
IKCPRLLAPPPSVVRSSSSATLTKMAARLALVATLLCAGAAAAAAQQASNVRATYHYYRPAENGWDLGAPAVSAYCSTWDAGKPYSWRSKYGWTAFCGPAGPRGQASCGRCIRVTNTGTGAQITARIVDQCANGGLDLDWDTVFVKIDTDGMGYQRGHLIVNYEFVDCGDNHINFHGKNETLPASTGAVE

SEQ ID NO: 62227 - protein, 166 aa, Triticum aestivum
  peptide (1)..(166): Ceres Seq. ID no. 15224934
MAARLALVATLLCAGAAAAAAQQASNVRATYHYYRPAENGWDLGAPAVSAYCSTWDAGKPYSWRSKYGWTAFCGPAGPRGQASCGRCIRVTNTGTGAQITARIVDQCANGGLDLDWDTVFVKIDTDGMGYQRGHLIVNYEFVDCGDNHINFHGKNETLPASTGAVE

SEQ ID NO: 62228 - DNA, 889 bp, Triticum aestivum
  misc_feature (1)..(889): Ceres Seq. ID no. 12587358
actttcccttaaaaaaaaggtgaggagggtgtggatcaatcgaatccaatcgaatcctaagctgaggatggcggcggtgctcaaggtgtatgcggaccggctgtcgcagccgtcgcgcgccatcatcatcttgtgcaaggtcaaccggatcgacttccaggagctcaccgtggatctcgccaagggacaacaccgcgcaccagaattcaccaaaatcaaccccatggcacaggtcccaacaatcgtcgatggaagattcaaactctttgaaagccatgccattctgaggtatcttgccaccgtcttccccggggttccagatcactggtatccggccgacttatttaccagagcaaaactcgagtctgtcttggattggcatcactctaatctgcgccgtggtgcagcaacctatgtactgcacaccgcgttgggtcctgctctcggcctcacaccgaatcctgaaaccgcaaaagaggccgagaagttgctgtcgcgatcactgggaacgatcgaaaccgtgtggctcaaaggcgatgcaaaattcttgaatggcaacccccagccatcaatcgcagacctcagcctcgtgtgcgagataatgcagctggaggttgttggtgatgagcgacgtgacagaattctgggacctcacgacaaggtgcgcgcttggatggagaatgtgaagaaggccaccagccctcattttgatgaggtccatgagctcatcttcaaactcaaggcacgcttgaacccagcagcatccaagctctgaagagatggatcctacacacatttacccaattcttctttcttcttgtcttgggattaaaacaagtactagcatccatgtactgtacgatgaaagaaagaaatactagtatgtttc

SEQ ID NO: 62229 - protein, 257 aa, Triticum aestivum
  peptide (1)..(257): Ceres Seq. ID no. 12587359
LSLKKKVRRVWINRIQSNPKLRMAAVLKVYADRLSQPSRAIIILCKVNRIDFQELTVDLAKGQHRAPEFTKINPMAQVPTIVDGRFKLFESHAILRYLATVFPGVPDHWYPADLFTRAKLESVLDWHHSNLRRGAATYVLHTALGPALGLTPNPETAKEAEKLLSRSLGTIETVWLKGDAKFLNGNPQPSIADLSLVCEIMQLEVVGDERRDRILGPHDKVRAWMENVKKATSPHFDEVHELIFKLKARLNPAASKL

SEQ ID NO: 62230 - protein, 235 aa, Triticum aestivum
  peptide (1)..(235): Ceres Seq. ID no. 12587360
MAAVLKVYADRLSQPSRAIIILCKVNRIDFQELTVDLAKGQHRAPEFTKINPMAQVPTIVDGRFKLFESHAILRYLATVFPGVPDHWYPADLFTRAKLESVLDWHHSNLRRGAATYVLHTALGPALGLTPNPETAKEAEKLLSRSLGTIETVWLKGDAKFLNGNPQPSIADLSLVCEIMQLEVVGDERRDRILGPHDKVRAWMENVKKATSPHFDEVHELIFKLKARLNPAASKL

SEQ ID NO: 62231 - protein, 183 aa, Triticum aestivum
  peptide (1)..(183): Ceres Seq. ID no. 12587361
MAQVPTIVDGRFKLFESHAILRYLATVFPGVPDHWYPADLFTRAKLESVLDWHHSNLRRGAATYVLHTALGPALGLTPNPETAKEAEKLLSRSLGTIETVWLKGDAKFLNGNPQPSIADLSLVCEIMQLEVVGDERRDRILGPHDKVRAWMENVKKATSPHFDEVHELIFKLKARLNPAASKL

SEQ ID NO: 62232 - DNA, 897 bp, Triticum aestivum
  misc_feature (1)..(897): Ceres Seq. ID no. 12584664
acgacgcggtctctcctccgctccgctccggtcaacccaagttcctcctcgcctcccaagccgtcttcctcctcctcgcagtgatggctgatgaggatgagtaccgatgcttcgttgggaacctgtcctggtccacaactgatgaaagcctcaaggatgcattctcaaaatatggcaaagttaccgaggcaaaggtggttatggacaagttttctggacgttcacgtggatttgcctttgtgacctttgatgagaagaaagccatggaagaagctatcgaggacatgaatggattggacttggaagggagggccatcactgttgataaagctcagcctcaaggggctggtagagatcgtaacggtgaccgtgattttgatcgtgaccgtgggtctcgtggtggccgtgactatggcggtggtcgtgcgccgcgtggtggtggtggtggggactgcttcaagtgcggcaaacctggacactttgctagagagtgtccagatggtgacggcgggagaggtgaccgatatggtggcagagatgataggtatggtggtggtagatctgaccgtggcggtgatcgttctgaccgtggcggcgatcgttctgaccgtgaccgttctgaccgtggcggcgaccgttctgatcgtgacggtgatcgatctgagcgtggcagtgaccgatattctagccgtagccgagatggtggaagcgggggtgatcgttacagtcgtgaccgatcaggtccctactgatggcctggatcttgagaagtgtgtttcatccaggtatgaaaaccctatctactatcatgaggtgtgtttccttgtgtctgaaactttgtgatcatgtatttgaatcataatgatgtcccgtgagtaagcagatcctttattacag

SEQ ID NO: 62233 - protein, 249 aa, Triticum aestivum
  peptide (1)..(249): Ceres Seq. ID no. 12584665
DAVSPPLRSGQPKFLLASQAVFLLLAVMADEDEYRCFVGNLSWSTTDESLKDAFSKYGKVTEAKVVMDKFSGRSRGFAFVTFDEKKAMEEAIEDMNGLDLEGRAITVDKAQPQGAGRDRNGDRDFDRDRGSRGGRDYGGGRAPRGGGGGDCFKCGKPGHFARECPDGDGGRGDRYGGRDDRYGGGRSDRGGDRSDRGGDRSDRDRSDRGGDRSDRDGDRSERGSDRYSSRSRDGGSGGDRYSRDRSGPY

SEQ ID NO: 62234 - protein, 222 aa, Triticum aestivum
  peptide (1)..(222): Ceres Seq. ID no. 12584666
MADEDEYRCFVGNLSWSTTDESLKDAFSKYGKVTEAKVVMDKFSGRSRGFAFVTFDEKKAMEEAIEDMNGLDLEGRAITVDKAQPQGAGRDRNGDRDFDRDRGSRGGRDYGGGRAPRGGGGGDCFKCGKPGHFARECPDGDGGRGDRYGGRDDRYGGGRSDRGGDRSDRGGDRSDRDRSDRGGDRSDRDGDRSERGSDRYSSRSRDGGSGGDRYSRDRSGPY

SEQ ID NO: 62235 - protein, 184 aa, Triticum aestivum
  peptide (1)..(184): Ceres Seq. ID no. 12584667
MDWTWKGGPSLLIKLSLKGLVEIVTVTVILIVTVGLVVAVTMAVVVRRVVVVVGTASSAANLDTLLESVQMVTAGEVTDMVAEMIGMVVVDLTVAVIVLTVAAIVLTVTVLTVAATVLIVTVIDLSVAVTDILAVAEMVEAGVIVTVVTDQVPTDGLDLEKCVSSRYENPIYYHEVCFLVSETL

SEQ ID NO: 62236 - DNA, 778 bp, Triticum aestivum
  misc_feature (1)..(778): Ceres Seq. ID no. 13596564
agctatcatcctgctagcacccgtgaactccagccattcacgctgcgtcgatcgtttggtttcgtgcgtgcgttgtttgtgatcgtgtgatctgttcgggagatggaggcttacatgctgttcccgcggagcaatggaaagagctgcgaggaggagcaggaggaggacatcggctgcccgtccgagtccgaggtgtcggcggccggctccatgctgtcgtcggacgaggagctcgacgacgacgccacctccagctccagctcctccggatccaccgacaacttccagatgtcctccctcatggcgcagctcccgctcaagaggggtctgtccaagttcttcgacggcaagtcgcagtcgttcgcgtcgctcgcggcggtgggcggcctggaggacctggccaagccgccgggcaagcggatcaagacgtcgcggagctgcgaggtcgggctgcaggacgcgcaccgccggcggttcgcgcgccacaatgccgcggccttcaagaaggtgtccaaagggcggctgtccgcgctcggcagggcgccgccgctccggccgctgacagcgagcgcggcgaggcccaagggcttgcccgtgcgggctccgctgttcgtttaggagatttcgcccgcagattagtcgtgtcggttgtggcgtgctcaaagagcagttggtgcggttgttacgtggattttgacatggtaactgaccggaaggtggccggctggtcgatggatgtgtaaatacagaaatgagaaacatgccttgttcagtatcc

SEQ ID NO: 62237 - protein, 171 aa, Triticum aestivum
  peptide (1)..(171): Ceres Seq. ID no. 13596565
MEAYMLFPRSNGKSCEEEQEEDIGCPSESEVSAAGSMLSSDEELDDDATSSSSSSGSTDNFQMSSLMAQLPLKRGLSKFFDGKSQSFASLAAVGGLEDLAKPPGKRIKTSRSCEVGLQDAHRRRFARHNAAAFKKVSKGRLSALGRAPPLRPLTASAARPKGLPVRAPLFV

SEQ ID NO: 62238 - protein, 167 aa, Triticum aestivum
  peptide (1)..(167): Ceres Seq. ID no. 13596566
MLFPRSNGKSCEEEQEEDIGCPSESEVSAAGSMLSSDEELDDDATSSSSSSGSTDNFQMSSLMAQLPLKRGLSKFFDGKSQSFASLAAVGGLEDLAKPPGKRIKTSRSCEVGLQDAHRRRFARHNAAAFKKVSKGRLSALGRAPPLRPLTASAARPKGLPVRAPLFV

SEQ ID NO: 62239 - protein, 142 aa, Triticum aestivum
  peptide (1)..(142): Ceres Seq. ID no. 13596567
MERAARRSRRRTSAARPSPRCRRPAPCCRRTRSSTTTPPPAPAPPDPPTTSRCPPSWRSSRSRGVCPSSSTASRSRSRRSRRWAAWRTWPSRRASGSRRRGAARSGCRTRTAGGSRATMPRPSRRCPKGGCPRSAGRRRSGR

SEQ ID NO: 62240 - DNA, 703 bp, Triticum aestivum
  misc_feature (1)..(703): Ceres Seq. ID no. 13583505
aaaaaaaacgtgaccccctccccgtccctacccctcttcctcctcggacaagccctccccctcgccgccgccgccgccgccgccgccccgcaggtcgccggctccgcttcgcgccgtaccgatggcggaagaagcagctgccaatgcggcgaagaaggaggaggaggagttcagcaccgggcccctgtccctgctcctcatgagcgtcaagaacaatactcaggtgcttatcaactgccggaacaacaagaagctacttggtcgcgtgagggcatttgaccgtcattgcaacatggttcttgagaatgtccgggagatgtggactgaggttccaaagactggcaaaggcaagaagaaggcccttccagtgaacaaggacaggttcatcagcaagatgttcctccgcggcgactcggtcatcattgttctcaggaacccgaaatgagttagacgacgacgacgacacatcgtacgcccagaagagtctctttgctatgtagtcgctgttaagtttgtgatactgaatactctaaaacagtgagtgcttaagagatgatatcaagccgagatttagcagtattgattaccggtccagtgttgtagtttgggatgttctgagttttgcctgtcctgtatctaaattgcgctcgtagtttgtatttggaccatcaatatatcggcagaacacaatttaaaaagtttg

SEQ ID NO: 62241 - protein, 107 aa, Triticum aestivum
  peptide (1)..(107): Ceres Seq. ID no. 13583506
MAEEAAANAAKKEEEEFSTGPLSLLLMSVKNNTQVLINCRNNKKLLGRVRAFDRHCNMVLENVREMWTEVPKTGKGKKKALPVNKDRFISKMFLRGDSVIIVLRNPK

SEQ ID NO: 62242 - protein, 92 aa, Triticum aestivum
  peptide (1)..(92): Ceres Seq. ID no. 13583507
KKNVTPSPSLPLFLLGQALPLAAAAAAAAPQVAGSASRRTDGGRSSCQCGEEGGGGVQHRAPVPAPHERQEQYSGAYQLPEQQEATWSREGI

SEQ ID NO: 62243 - protein, 81 aa, Triticum aestivum; identical to SEQ ID NO: 12478
  peptide (1)..(81): Ceres Seq. ID no. 13583508

SEQ ID NO: 62244 - DNA, 690 bp, Triticum aestivum
  misc_feature (1)..(690): Ceres Seq. ID no. 12587363
actaaaactccggtcgaaaaaaaagagagagaaagaaacgaaaacaacagccggccgaagcctccgctgcgccgccgccggtacaggagccaagcagcgcctcccttcgtcgagcagcaacgccgccgcccggagctacgccggcgacgaatacatagaacagggcatcaacattgtcaattggagaggcttggagctgctttggcatccacagtagagcaaacaagaagtatcgacatggattccagcactacacagtctgaaggttctcagccacctgttcctcctaaaagccctaccatgtcgtcgtgccggaagaagaaaactgatgatgatgctaccttcctcaaagatgtgaaagagcacattgatgagttcatccatgcctccatggatgagcacaagacctgcttcaagaagaccatccagaagatgttcgggatgtcaaaggctgttgcggagcggtccgctgcagcaaaggaagctgaagtcgaaagtgctttgcctcttgagaccagtgtgtcccggtaggagattgcattggtggtggccagttcttgctttctggtggcatggttcttgtatcaggaatctagcaaatgtttttttcctattgttgctgtatggtcactatatattttttctgttagaaatgttgaataatattaacatgagtataaactgagactg

SEQ ID NO: 62245 - protein, 176 aa, Triticum aestivum
  peptide (1)..(176): Ceres Seq. ID no. 12587364
TKTPVEKKERERNENNSRPKPPLRRRRYRSQAAPPFVEQQRRRPELRRRRIHRTGHQHCQLERLGAALASTVEQTRSIDMDSSTTQSEGSQPPVPPKSPTMSSCRKKKTDDDATFLKDVKEHIDEFIHASMDEHKTCFKKTIQKMFGMSKAVAERSAAAKEAEVESALPLETSVSR

SEQ ID NO: 62246 - protein, 104 aa, Triticum aestivum
  peptide (1)..(104): Ceres Seq. ID no. 12587365
MSSSMPPWMSTRPASRRPSRRCSGCQRLLRSGPLQQRKLKSKVLCLLRPVCPGRRLHWWWPVLAFWWHGSCIRNLANVFFLLLLYGHYIFFLLEMLNNINMSIN

SEQ ID NO: 62247 - protein, 100 aa, Triticum aestivum
  peptide (1)..(100): Ceres Seq. ID no. 12587366
MPPWMSTRPASRRPSRRCSGCQRLLRSGPLQQRKLKSKVLCLLRPVCPGRRLHWWWPVLAFWWHGSCIRNLANVFFLLLLYGHYIFFLLEMLNNINMSIN

SEQ ID NO: 62248 - protein, 97 aa, Triticum aestivum
  peptide (1)..(97): Ceres Seq. ID no. 12587367
MDSSTTQSEGSQPPVPPKSPTMSSCRKKKTDDDATFLKDVKEHIDEFIHASMDEHKTCFKKTIQKMFGMSKAVAERSAAAKEAEVESALPLETSVSR

SEQ ID NO: 62249 - DNA, 812 bp, Triticum aestivum
  misc_feature (1)..(812): Ceres Seq. ID no. 12587328
aacaacaacaacaacatccaaaatccaaacccaagccaagaacacacgctgttctgaatctgtccatcagtctccgcttccactgattcgtccagccgagaagaagaagagctgcagaagatgagcaagctctggaccatcctcacccacctccacaccctcgcagggcctggcgtgatgctcctgtacccgctgtacgcgtcggtgcaggcgatggagagcccgtcgaagctggacgacgagcagtggctggcctactggatcctctactccttcgtcacgctcgtcgagatggtcctcgagtccctcatctactggataccgatctggtacgagctgaagctgctgttcctggcgtggctggcgctgcccaacttcaggggagcggccttcatctacgacaggttcgtcagggagcagctcaggaagcacggcctcaccaaccaccccggcagcggcatcagcagcagcaagaaggagaacggcggcaagtcgtcctcgccgttgacgtcccccaaggagaaggagaacgccaagagcaggttcctctcctttggcgctcccaagaaagaccactgaagtagattggggcagtaaccagagatccctgcggctagcttcttggcttgtggtgtttttttggtttgtttgagattttagcttgtggtcttgggagtattacatgtcttgtccaaaaaagttgtactagcactccatagatgaggccctcggttgcaggctagctagatggtggcttgtggtgttgtagtattattacatatatctgtcccgaaaaatgttccggggttggg

SEQ ID NO: 62250 - protein, 152 aa, Triticum aestivum
  peptide (1)..(152): Ceres Seq. ID no. 12587329
MSKLWTILTHLHTLAGPGVMLLYPLYASVQAMESPSKLDDEQWLAYWILYSFVTLVEMVLESLIYWIPIWYELKLLFLAWLALPNFRGAAFIYDRFVREQLRKHGLTNHPGSGISSSKKENGGKSSSPLTSPKEKENAKSRFLSFGAPKKDH

SEQ ID NO: 62251 - protein, 133 aa, Triticum aestivum
  peptide (1)..(133): Ceres Seq. ID no. 12587330
MLLYPLYASVQAMESPSKLDDEQWLAYWILYSFVTLVEMVLESLIYWIPIWYELKLLFLAWLALPNFRGAAFIYDRFVREQLRKHGLTNHPGSGISSSKKENGGKSSSPLTSPKEKENAKSRFLSFGAPKKDH

SEQ ID NO: 62252 - protein, 121 aa, Triticum aestivum
  peptide (1)..(121): Ceres Seq. ID no. 12587331
MESPSKLDDEQWLAYWILYSFVTLVEMVLESLIYWIPIWYELKLLFLAWLALPNFRGAAFIYDRFVREQLRKHGLTNHPGSGISSSKKENGGKSSSPLTSPKEKENAKSRFLSFGAPKKDH

SEQ ID NO: 62253 - DNA, 703 bp, Triticum aestivum
  misc_feature (1)..(703): Ceres Seq. ID no. 13583509
aactccccagcccagcttggcctagctgccaccacccctcttcctcctcctcctaggctagctccctccggcagactctcccttccatggcggatcggcacggcgagggcggcgtggcctcggcgcggcggccggggcgcacggacctggacgacccgtcgacgacgctgctgcagcgcgtgcaggcgcacctcccgaacgcgacgcaggtggtgggcctgctgaccctgctgctcgccggcgcggcgctgctggtgctggcggggctgacgttcacgggcgcggtggtggcgctcgtcttcctcggcccgctggcgctgctgaccagccccatctgggtgccgttctccttcgcgctcctggtcgtggccgtggcggcgctctccttcgtcgggttcgccgtggccgccctcgccgcggccacctgggcgtaccggtacttcacggggcggcaccccgtgggcgccgaccgcgtggatcgcgcccgcagccgcctcgccgacaccgccagccacgtcaaggactacgcccgccgcgagtacggcggatacctcggcaaccgcaccaaggacgccgccccgggcgcctaggcacgtcgcggctagatcgttattacgatatgttcttctctctttgcgtctctgtactctcccagctgttggtaatctcgtcgtcttcacgtgtatgaactactattagttcc

SEQ ID NO: 62254 - protein, 167 aa, Triticum aestivum
  peptide (1)..(167): Ceres Seq. ID no. 13583510
MADRHGEGGVASARRPGRTDLDDPSTTLLQRVQAHLPNATQVVGLLTLLLAGAALLVLAGLTFTGAVVALVFLGPLALLTSPIWVPFSFALLVVAVAALSFVGFAVAALAAATWAYRYFTGRHPVGADRVDRARSRLADTASHVKDYARREYGGYLGNRTKDAAPGA

SEQ ID NO: 62255 - DNA, 633 bp, Triticum aestivum
  misc_feature (1)..(633): Ceres Seq. ID no. 13583494
ctcgaaggcggaagttctcgaagacgtaaacctgccagctccctccccaacccctggaaacgctctggtagtctccgccgcgggagaggcggagatggagaacgcggtggtgctccgggagtggttcgaccgcgtcgacgccgccggcaccggcaacatcacggctcctcagctccagagcgcgctggccgtgggcaacctcgacttccccctctccgtcgtgcagcagatgatcaggatgtacgactttgatcggaacggcaccatgagcttcgaagagttcttggctcttaacaagttccttcagaaggtgcagactgttttctcctccctagaaaggggccgtggatttctcagccttgaggatgtgtatgaggcgttaatcaaactcggtttctctttggattcacctgccttttacactgtctgtgagagcttcgacaagagcaagaaagggatggttcgtttggatgagttcatatcgatctgcatctttgtgcagtcagctcgtaacttgttcagctcatttgacacaaccaagcaagggaaagtgactttggatttcaaccagttcgtctactgcacggcaaactgcaggatatagctgtattacctgaaacctgtacatggaag

SEQ ID NO: 62256 - protein, 200 aa, Triticum aestivum
  peptide (1)..(200): Ceres Seq. ID no. 13583495
SKAEVLEDVNLPAPSPTPGNALVVSAAGEAEMENAVVLREWFDRVDAAGTGNITAPQLQSALAVGNLDFPLSVVQQMIRMYDFDRNGTMSFEEFLALNKFLQKVQTVFSSLERGRGFLSLEDVYEALIKLGFSLDSPAFYTVCESFDKSKKGMVRLDEFISICIFVQSARNLFSSFDTTKQGKVTLDFNQFVYCTANCRI

SEQ ID NO: 62257 - protein, 169 aa, Triticum aestivum
  peptide (1)..(169): Ceres Seq. ID no. 13583496
MENAVVLREWFDRVDAAGTGNITAPQLQSALAVGNLDFPLSVVQQMIRMYDFDRNGTMSFEEFLALNKFLQKVQTVFSSLERGRGFLSLEDVYEALIKLGFSLDSPAFYTVCESFDKSKKGMVRLDEFISICIFVQSARNLFSSFDTTKQGKVTLDFNQFVYCTANCRI

SEQ ID NO: 62258 - protein, 124 aa, Triticum aestivum
  peptide (1)..(124): Ceres Seq. ID no. 13583497
MIRMYDFDRNGTMSFEEFLALNKFLQKVQTVFSSLERGRGFLSLEDVYEALIKLGFSLDSPAFYTVCESFDKSKKGMVRLDEFISICIFVQSARNLFSSFDTTKQGKVTLDFNQFVYCTANCRI

SEQ ID NO: 62259 - DNA, 574 bp, Triticum aestivum
  misc_feature (1)..(574): Ceres Seq. ID no. 12584760
cggaaaagctttttttttaaaaaaaaaaatttttttttttttttttttttttttttttttttttttttttttttttttttttttttttttttttttttttttttttttttttttttttttttttctaaagtacatgtttcttgtcatattatatataatttgtgatcaaagacaaacaaataatcagtatcaaataatcccgcactacaacctcgtaaaaggggaaaaaatgccttttggttactgccagttcgttacagaatgatttacatatcggttctttggctgttgtcatctctacttccctaaaacaaccttctaaggaaacttcttcttggtcttcttgattttacatcttttattctcccagcctttaacaaagcttcctcggcaattggtttccattgctgagcacaagaaaaacggaggcccatccctacagtcagcccacgcaacagttgtatcgtccgaagcaccgaaaataattcctctgggaagctctctactccaactttattcagtgaagaatcatcagcaaagggcgagagcacggttactccaggcggtaatcttg

SEQ ID NO: 62260 - protein, 87 aa, Triticum aestivum
  peptide (1)..(87): Ceres Seq. ID no. 12584761
GKAFFLKKKIFFFFFFFFFFFFFFFFFFFFFFFFFFFFFFFLKYMFLVILYIICDQRQTNNQYQIIPHYNLVKGEKMPFGYCQFVTE

SEQ ID NO: 62261 - protein, 54 aa, Triticum aestivum
  peptide (1)..(54): Ceres Seq. ID no. 12584762
RKSFFFKKKNFFFFFFFFFFFFFFFFFFFFFFFFFFFFFFFSKVHVSCHIIYNL

SEQ ID NO: 62262 - protein, 43 aa, Triticum aestivum
  peptide (1)..(43): Ceres Seq. ID no. 12584763
MFLVILYIICDQRQTNNQYQIIPHYNLVKGEKMPFGYCQFVTE

SEQ ID NO: 62263 - DNA, 859 bp, Triticum aestivum
  misc_feature (1)..(859): Ceres Seq. ID no. 12584695
attcgttccgcggccgcttcttcagcacaggcacggcgatctgtcccacggcggcgatggcgctctcctcctccaggccacaccacctcctccgccgcttccacgcttccgcgcgggctctgtcgcgggtggaaccgcacgagttctcgcagcccagcgactacctcgggagctgggcggagcgcgcccccgccacggtcgccgcgggcggcggcgacacacgggaggcttgggcacggctggagcgcctgcgcaaggggtacgcgcgcgaggttggggagctacggcgtcagtacgcctacgaggcgcaactgctggaggccgagcggcagcgcaaggcggaggcacgtgccgaggccgcccgcctcgccaacgaggagcgcaaagccgccaaggctgccgccgctcagaccagggcggccgagcgccgcgccttcgagctcgatttccgccaggccctcatgaaagaaagagctcagaagccggagagccggaggaacaaggagaagctgaaagcacagaagaaggcggagcacagggagctcttgcgcaggcagagttctgtttgggttgctgaggataaaatggaaaagaaaattcttgaggctatcatgcataccacccctctttgaggttcatgctgtgaggtctgcaggaaactagatgatgtatcctggacagtacaaatgaagcttgtttgctattccctcttaagaactactatttcgcagttgtctaaggaataacgacatttcttctagccttaagtttttttgtttctgaagctgtgttgtaatgttcagttgttagactggacgaacatcgagccggcgttgtgtttcggaatttaattttcttc

SEQ ID NO: 62264 - protein, 209 aa, Triticum aestivum
  peptide (1)..(209): Ceres Seq. ID no. 12584696
SFRGRFFSTGTAICPTAAMALSSSRPHHLLRRFHASARALSRVEPHEFSQPSDYLGSWAERAPATVAAGGGDTREAWARLERLRKGYAREVGELRRQYAYEAQLLEAERQRKAEARAEAARLANEERKAAKAAAAQTRAAERRAFELDFRQALMKERAQKPESRRNKEKLKAQKKAEHRELLRRQSSVWVAEDKMEKKILEAIMHTTPL

SEQ ID NO: 62265 - protein, 191 aa, Triticum aestivum
  peptide (1)..(191): Ceres Seq. ID no. 12584697
MALSSSRPHHLLRRFHASARALSRVEPHEFSQPSDYLGSWAERAPATVAAGGGDTREAWARLERLRKGYAREVGELRRQYAYEAQLLEAERQRKAEARAEAARLANEERKAAKAAAAQTRAAERRAFELDFRQALMKERAQKPESRRNKEKLKAQKKAEHRELLRRQSSVWVAEDKMEKKILEAIMHTTPL

SEQ ID NO: 62266 - protein, 191 aa, Triticum aestivum
  peptide (1)..(191): Ceres Seq. ID no. 12584698
FVPRPLLQHRHGDLSHGGDGALLLQATPPPPPLPRFRAGSVAGGTARVLAAQRLPRELGGARPRHGRRGRRRHTGGLGTAGAPAQGVRARGWGATASVRLRGATAGGRAAAQGGGTCRGRPPRQRGAQSRQGCRRSDQGGRAPRLRARFPPGPHERKSSEAGEPEEQGEAESTEEGGAQGALAQAEFCLGC

SEQ ID NO: 62267 - DNA, 1687 bp, Triticum aestivum
  misc_feature (1)..(1687): Ceres Seq. ID no. 13596803
ccttcccccttccccgtctgactttttctccaagttcaactccgccgcccgccccctctccccgatcccgggagagagagagagagatgtcctggcggtgggctctggcgcggcgcgtcgccacgctcgtcggcggcggcaccggcggcccaggcgccgcccaggcgcagaggctcttctcctcctccggcgccctcccggggaggctccaccctgcgccgcctcagattcggaacaaggtggtgggttgcagaggagctgctttcgtgaactcgcggtggctgcatgatgccacccaatgccagactcgccaggacggagtttcgagggctgaagaacaacatgatccatttgaattggttgctgatgaactatcgattcttggaaatagactacggtccatggtggttgctgaggtccctaaactagaatcagctgctgaatatttttttaaagtaggagctgagggaaaaagattccgacctacggttttattgctgatggcatcagctctgaaattcccaataccagaatcgacagatgttggagttttcagtatattggcaagtaagctgcgcacacggcagcaaaacattgccgagataactgaaatgatccatgttgcaagtcttctgcatgatgatgttctggatgatgctgacactaggcgaggtgtcacttcattgaattgcattatgggcaacaagctttctgttttggctggtgactttctcctgtccagagcatgtgtggcacttgcagcacttgggaatacagaggtggtatctctaatggcaactgcagttggacatctagttactggtgaaactatgcaaatgtcaacaagcagagagcaacggcgaagtatggagtactacttgcagaagacgtactacaaaacagcatcattgatatcaaacagttgcaaggctgttgctattcttgcagggcacactgctgagatttcagtgcttgcatacgaatatggtcgaaacctgggtctagccttccagttgatcgacgatgttcttgatttcacaggaacctctgcttcacttgggaagggttcattatctgatattcgtcatggaatcattactgctccaatgctatatgcgatggaagaattcccacaactacaagatgtcgttgaccagggttttgacaatcctgcaaatgttgagatcgccttggactacctccagaagagccggggaatcgaaagaacaaaagagcttgcgcaagaacacgttaaccttgcggtcaaagccatcgaatctctcccagacagtgacgatgaagatgttctgatttcaaggcgcgctcttattgatatcacacagagagtcatcacaaggacaaaatagcatgattatacacagggtggagaagataaggcggagtttcgccacaggtgtagtgttccgcttggaaatttttggtcgccttggtcattgcattctttccattgcccgggttttgtgtaacatttgatgagacttcagggtaaccattcctgggaatcatcctaagtcgcagctgtagtggttttagttactggtggcagcagaatctgtgtattaatatcacgattggcgattgcacgatgacctgatcataagactgtaaccttataaatcgaagtatgtaacactatatacgaggaaaaagtaacctgcttgtgttg

SEQ ID NO: 62268 - protein, 454 aa, Triticum aestivum
  peptide (1)..(454): Ceres Seq. ID no. 13596804
FPLPRLTFSPSSTPPPAPSPRSREREREMSWRWALARRVATLVGGGTGGPGAAQAQRLFSSSGALPGRLHPAPPQIRNKVVGCRGAAFVNSRWLHDATQCQTRQDGVSRAEEQHDPFELVADELSILGNRLRSMVVAEVPKLESAAEYFFKVGAEGKRFRPTVLLLMASALKFPIPESTDVGVFSILASKLRTRQQNIAEITEMIHVASLLHDDVLDDADTRRGVTSLNCIMGNKLSVLAGDFLLSRACVALAALGNTEVVSLMATAVGHLVTGETMQMSTSREQRRSMEYYLQKTYYKTASLISNSCKAVAILAGHTAEISVLAYEYGRNLGLAFQLIDDVLDFTGTSASLGKGSLSDIRHGIITAPMLYAMEEFPQLQDVVDQGFDNPANVEIALDYLQKSRGIERTKELAQEHVNLAVKAIESLPDSDDEDVLISRRALIDITQRVITRTK

SEQ ID NO: 62269 - protein, 426 aa, Triticum aestivum
  peptide (1)..(426): Ceres Seq. ID no. 13596805
MSWRWALARRVATLVGGGTGGPGAAQAQRLFSSSGALPGRLHPAPPQIRNKVVGCRGAAFVNSRWLHDATQCQTRQDGVSRAEEQHDPFELVADELSILGNRLRSMVVAEVPKLESAAEYFFKVGAEGKRFRPTVLLLMASALKFPIPESTDVGVFSILASKLRTRQQNIAEITEMIHVASLLHDDVLDDADTRRGVTSLNCIMGNKLSVLAGDFLLSRACVALAALGNTEVVSLMATAVGHLVTGETMQMSTSREQRRSMEYYLQKTYYKTASLISNSCKAVAILAGHTAEISVLAYEYGRNLGLAFQLIDDVLDFTGTSASLGKGSLSDIRHGIITAPMLYAMEEFPQLQDVVDQGFDNPANVEIALDYLQKSRGIERTKELAQEHVNLAVKAIESLPDSDDEDVLISRRALIDITQRVITRTK

SEQ ID NO: 62270 - protein, 321 aa, Triticum aestivum
  peptide (1)..(321): Ceres Seq. ID no. 13596806
MVVAEVPKLESAAEYFFKVGAEGKRFRPTVLLLMASALKFPIPESTDVGVFSILASKLRTRQQNIAEITEMIHVASLLHDDVLDDADTRRGVTSLNCIMGNKLSVLAGDFLLSRACVALAALGNTEVVSLMATAVGHLVTGETMQMSTSREQRRSMEYYLQKTYYKTASLISNSCKAVAILAGHTAEISVLAYEYGRNLGLAFQLIDDVLDFTGTSASLGKGSLSDIRHGIITAPMLYAMEEFPQLQDVVDQGFDNPANVEIALDYLQKSRGIERTKELAQEHVNLAVKAIESLPDSDDEDVLISRRALIDITQRVITRTK

SEQ ID NO: 62271 - DNA, 1783 bp, Triticum aestivum
  misc_feature (1)..(1783): Ceres Seq. ID no. 13502952
ctagaacatcctaatcgaaaagaacaaaagcaagaagtctgctacccaatcccatctactaccccccatctctcttcctgctccgtggtgtacttgtggtctcgaggatgaggagctccatggccctcttggcggcggcgctgctgctgctggtgtcgctggcggcggcggcggacatgtcgatcgtgtcgtacggggagcggagcgaggaggaggtgcggcggatgtacgccgagtggatgtccgagcaccgcaggacgtacaacgccatcggcgaggaggagcgccgcttcgaggtcttcagggacaacctccgctacatcgaccagcacaacgccgccgccgacgccgggctccactccttccgcctcggcctcaaccgcttcgccgacctcaccaacgaggagtaccgcagcacgtacctgggcgcccggaccaagccggaccgggagcggaagctcagcgccaggtaccaggccgacgacaacgaggagctgccggagaccgtcgactggaggaagaagggggccgttgctgccatcaaggaccagggcggctgcgggagctgctgggctttctcagcaatagcagctgttgaaggcatcaaccagattgttacgggcgacatgatccctctgtccgagcaagagcttgttgactgtgacacttcatacaacgagggatgcaatggaggtctgatggactatgcgtttgagttcatcattaacaatggcggtatcgactctgaggaggactacccctacaaggagagggacaaccgttgcgatgctaacaagaaaaatgcgaaggttgttaccattgatgggtacgaggatgtgcccgtgaacagtgagaagagtctgcagaaggcagttgcaaaccagcccatcagtgttgcgattgaggctggtggcagggcattccagctctacaaatcgggtatcttcactggaacctgtggaacagcacttgaccatggtgtcgccgccgttggttatggtacagagaacggcaaggactactggctcgtcaggaactcctggggtaccgtctggggagaggatggttacatccggatggagcgtaacatcaaggcatccagtggcaaatgtggtattgccgttgagccttcctacccgacgaagacgggcgagaacccccctaaccccggcccaactccaccatctcccgccccaccgtcttccgtctgtgacagctacaacgagtgccccgcgagcacgacctgctgctgcatctacgagtacggcaaggagtgcttcgcctggggctgttgcccactcgagggtgctacctgctgcgatgatcactacagctgctgccctcataactatcccatctgcaacacccagcagggaacctgccttgcggccaaggacagtccactgtcagtgaaggctcagaggcgtaccctggccaagcctatcggtgctttctctgtcattgcaactgacggcaagaaaagtagcgcgtaaacatttgcatcaccacaatcctacagccaacggccatggtggttaacttctgcaaatgatcacctggtgacccacgatagaaggcgcagcatggcaatagctgtgctctcaagtatcttctttatagtagatgctcctgtacataatcctaaaatcgggttcggttgttcacagaaccgccacatttgcttttgcatatgtatatgtaaattcagcacattcccaggcagtttggggctgctattgttatatggaattcatcaagaaacaagataagcagatttcttgtc

SEQ ID NO: 62272 - protein, 461 aa, Triticum aestivum
  peptide (1)..(461): Ceres Seq. ID no. 13502953
MRSSMALLAAALLLLVSLAAAADMSIVSYGERSEEEVRRMYAEWMSEHRRTYNAIGEEERRFEVFRDNLRYIDQHNAAADAGLHSFRLGLNRFADLTNEEYRSTYLGARTKPDRERKLSARYQADDNEELPETVDWRKKGAVAAIKDQGGCGSCWAFSAIAAVEGINQIVTGDMIPLSEQELVDCDTSYNEGCNGGLMDYAFEFIINNGGIDSEEDYPYKERDNRCDANKKNAKVVTIDGYEDVPVNSEKSLQKAVANQPISVAIEAGGRAFQLYKSGIFTGTCGTALDHGVAAVGYGTENGKDYWLVRNSWGTVWGEDGYIRMERNIKASSGKCGIAVEPSYPTKTGENPPNPGPTPPSPAPPSSVCDSYNECPASTTCCCIYEYGKECFAWGCCPLEGATCCDDHYSCCPHNYPICNTQQGTCLAAKDSPLSVKAQRRTLAKPIGAFSVIATDGKKSSA

SEQ ID NO: 62273 - protein, 457 aa, Triticum aestivum
  peptide (1)..(457): Ceres Seq. ID no. 13502954
MALLAAALLLLVSLAAAADMSIVSYGERSEEEVRRMYAEWMSEHRRTYNAIGEEERRFEVFRDNLRYIDQHNAAADAGLHSFRLGLNRFADLTNEEYRSTYLGARTKPDRERKLSARYQADDNEELPETVDWRKKGAVAAIKDQGGCGSCWAFSAIAAVEGINQIVTGDMIPLSEQELVDCDTSYNEGCNGGLMDYAFEFIINNGGIDSEEDYPYKERDNRCDANKKNAKVVTIDGYEDVPVNSEKSLQKAVANQPISVAIEAGGRAFQLYKSGIFTGTCGTALDHGVAAVGYGTENGKDYWLVRNSWGTVWGEDGYIRMERNIKASSGKCGIAVEPSYPTKTGENPPNPGPTPPSPAPPSSVCDSYNECPASTTCCCIYEYGKECFAWGCCPLEGATCCDDHYSCCPHNYPICNTQQGTCLAAKDSPLSVKAQRRTLAKPIGAFSVIATDGKKSSA

SEQ ID NO: 62274 - protein, 438 aa, Triticum aestivum
  peptide (1)..(438): Ceres Seq. ID no. 13502955
MSIVSYGERSEEEVRRMYAEWMSEHRRTYNAIGEEERRFEVFRDNLRYIDQHNAAADAGLHSFRLGLNRFADLTNEEYRSTYLGARTKPDRERKLSARYQADDNEELPETVDWRKKGAVAAIKDQGGCGSCWAFSAIAAVEGINQIVTGDMIPLSEQELVDCDTSYNEGCNGGLMDYAFEFIINNGGIDSEEDYPYKERDNRCDANKKNAKVVTIDGYEDVPVNSEKSLQKAVANQPISVAIEAGGRAFQLYKSGIFTGTCGTALDHGVAAVGYGTENGKDYWLVRNSWGTVWGEDGYIRMERNIKASSGKCGIAVEPSYPTKTGENPPNPGPTPPSPAPPSSVCDSYNECPASTTCCCIYEYGKECFAWGCCPLEGATCCDDHYSCCPHNYPICNTQQGTCLAAKDSPLSVKAQRRTLAKPIGAFSVIATDGKKSSA

SEQ ID NO: 62275 - DNA, 1372 bp, Triticum aestivum
  misc_feature (1)..(1372): Ceres Seq. ID no. 13596807
gtgtctggcactggcactgagatggcactgccggtgagctcggccggcctcgtctcgctcctcgtcccctgcctcctctccttcgtcctcctccgcttctccgccctgctggaccccggcgccgccgtgccccgcgtcaagaggtcccctcccctgcccctgcgcttccgccatgacggcgccttcaagatcctccaggtggcggacatgcacttcggcaacggcgccgccacgcgctgccgggacgtggcgccggaggtcggcggcgcgcgctgctccgaccgcaacaccacgcgcttcctgcgccggctcatcgaagcggagaggcccgacctcatagccttcaccggggataacatatttgggggcagtgcaactgatgcagcagaatcactgctcagagcaattagccctgctatagagtacaaggtaccatgggccgccatattaggaaatcatgaccaggaatctacaatgacgcgagaggaactgatgatgttcttgtctttgatggattactcagtatctcaagtaaaccctcctggttttctggtacatgggtttggcaattaccatgttggcatacatgggccatttggatcggggttggtcaatactagtctgcttaacctttacttcctggatagtggggatcgtgaagtggtcgacggaattaaaacttatggatggatcaaagaatctcaacttgcttggctcagtgctacttcaagagaactccagaaaaattcgcttgcccccgcgttatcattcttccacatcccaaatccagaagtccgagagctgtggtacacagattttaagggtgagtatcaggaaggagtggcttgctcattaattaactctggtgtccttgacaccctcgtctccatgggagatgtgaaaggtgtctttcttggtcatgatcatcttaatgatttctgtggcaaccttaacggcatatggttctgttatggcggtggctttggttaccatgcctatggaaggcctcattggccgaggagagctcgggtaatttacactcaactcaagaaagggcagaggtcatggatgggagtcgagtcgatacagacttggaagttgcttgacgacgagaacctttccaagatcgatgagcaggttctctggagagacagtgacaatgactcttaccagagtgtccacttgtaagctccggacactaaaagatctctttgtatgttgtaaacatatttgatcaattacaatacatcaaattggtaggtttgatcaaattagtcatggttggccatggaccaaattagacacctgtatatgatactgctgtatcttgttcatatgcaaatcccttgcttgggttgttgagaccagttcc

SEQ ID NO: 62276 - protein, 395 aa, Triticum aestivum
  peptide (1)..(395): Ceres Seq. ID no. 15221975
VSGTGTEMALPVSSAGLVSLLVPCLLSFVLLRFSALLDPGAAVPRVKRSPPLPLRFRHDGAFKILQVADMHFGNGAATRCRDVAPEVGGARCSDRNTTRFLRRLIEAERPDLIAFTGDNIFGGSATDAAESLLRAISPAIEYKVPWAAILGNHDQESTMTREELMMFLSLMDYSVSQVNPPGFLVHGFGNYHVGIHGPFGSGLVNTSLLNLYFLDSGDREVVDGIKTYGWIKESQLAWLSATSRELQKNSLAPALSFFHIPNPEVRELWYTDFKGEYQEGVACSLINSGVLDTLVSMGDVKGVFLGHDHLNDFCGNLNGIWFCYGGGFGYHAYGRPHWPRRARVIYTQLKKGQRSWMGVESIQTWKLLDDENLSKIDEQVLWRDSDNDSYQSVHL

SEQ ID NO: 62277 - protein, 388 aa, Triticum aestivum
  peptide (1)..(388): Ceres Seq. ID no. 15221976
MALPVSSAGLVSLLVPCLLSFVLLRFSALLDPGAAVPRVKRSPPLPLRFRHDGAFKILQVADMHFGNGAATRCRDVAPEVGGARCSDRNTTRFLRRLIEAERPDLIAFTGDNIFGGSATDAAESLLRAISPAIEYKVPWAAILGNHDQESTMTREELMMFLSLMDYSVSQVNPPGFLVHGFGNYHVGIHGPFGSGLVNTSLLNLYFLDSGDREVVDGIKTYGWIKESQLAWLSATSRELQKNSLAPALSFFHIPNPEVRELWYTDFKGEYQEGVACSLINSGVLDTLVSMGDVKGVFLGHDHLNDFCGNLNGIWFCYGGGFGYHAYGRPHWPRRARVIYTQLKKGQRSWMGVESIQTWKLLDDENLSKIDEQVLWRDSDNDSYQSVHL

SEQ ID NO: 62278 - protein, 326 aa, Triticum aestivum
  peptide (1)..(326): Ceres Seq. ID no. 15221977
MHFGNGAATRCRDVAPEVGGARCSDRNTTRFLRRLIEAERPDLIAFTGDNIFGGSATDAAESLLRAISPAIEYKVPWAAILGNHDQESTMTREELMMFLSLMDYSVSQVNPPGFLVHGFGNYHVGIHGPFGSGLVNTSLLNLYFLDSGDREVVDGIKTYGWIKESQLAWLSATSRELQKNSLAPALSFFHIPNPEVRELWYTDFKGEYQEGVACSLINSGVLDTLVSMGDVKGVFLGHDHLNDFCGNLNGIWFCYGGGFGYHAYGRPHWPRRARVIYTQLKKGQRSWMGVESIQTWKLLDDENLSKIDEQVLWRDSDNDSYQSVHL

SEQ ID NO: 62279 - DNA, 630 bp, Triticum aestivum
  misc_feature (1)..(630): Ceres Seq. ID no. 13596513
aacatttcacatgccatctagcatcactcactgcaatcacactctatcactagctagctcagctgccctacagtgcacgcggattaactagccatggcagctcacgactcggacctcggcggcgccgtccacgtcctcctgctcccgtacccgagccagggccacatcaaccccatcctccagttcggcaagcgcctcgcctcccacgccggcgtccgctgcacgctcgccgtcacgcgctacctcctcggccagggccgggacccgtgcccgggcgccgtgcacctcgccgagatctccgacggctttgaccgcggcggcttcgccgaggccgacggcgacgtcgcggcgtacctcgcccggctggagtccgtcgggtcacgcactgtcgacgagctgctgcggtccgaggcggagaagggccggcccgtgcgcgccgtggtgtacgacgcgttcctgcagccgtgggcgccccgcgtggcccggcagcacggcgccgcgtgcgcgtccctcttcacgcaggcgcccgcggtgaacgtggcgtacgcgcacgccggtgctgggcgcnngnccgttcngntcctcgcgggcacggtgccgccggagcttcccgggctgcctgccgggctc

SEQ ID NO: 62280 - protein, 179 aa, Triticum aestivum
  peptide (1)..(179): Ceres Seq. ID no. 13596514
  misc_feature (159)..(159): Xaa is any aa, unknown or other
  misc_feature (160)..(160): Xaa is any aa, unknown or other
  misc_feature (162)..(162): Xaa is any aa, unknown or other
  misc_feature (163)..(163): Xaa is any aa, unknown or other
MAAHDSDLGGAVHVLLLPYPSQGHINPILQFGKRLASHAGVRCTLAVTRYLLGQGRDPCPGAVHLAEISDGFDRGGFAEADGDVAAYLARLESVGSRTVDELLRSEAEKGRPVRAVVYDAFLQPWAPRVARQHGAACASLFTQAPAVNVAYAHAGAGRXXVXXLAGTVPPELPGLPAGL

SEQ ID NO: 62281 - DNA, 1286 bp, Triticum aestivum
  misc_feature (1)..(1286): Ceres Seq. ID no. 12625255
ggtccgtagttcacagccgaggtccgtaaacccttggatttcctccatctccacaccagtgcggctccagtccgtccgagaccggcatggccaccacggccgccgccgccgccgcggtcccagacgctattccagccgcggcgcccgcggccccgtccgcgcaaccgcatcccgttccagacaaatgtacgaattataaaaaccatttgcaagagtggactcaaaggaatgatcagaagttgccagcttataatactgagtcgaaacgtgaccatcatcgacttgagttcagaagcaccgttgaggtgggtggcgagcggtttcaatcagctcgcaatcatagccgccgcaaggatgcggagcaggatgctgccagagtggcatatgaaatcttggtgacaaagacagtaaatgatgatgatcatacagatgcgcttgggctgattgatcagggcgtgctgttctgcaaatcaattctccatgaatttgctgttaagacaaaagctgaacagcccacttactccgcagatcatccagaaggggtatcacccatgcccctgtttgtttcatctgtgttgtttgctgggaacacttatactggtgaagctgcaacatgtaagaaggacgcagagcagaaggctgctcgtgttgcagtcaaatctattttagctacaaagaacacttgtatgcatcaaattgtcagatcaaagaaagagcttatcattgccatcacatcttctgggttcaacaaagaaagaggagttgtaagccaggaaaactgcaatgctccaacaaatgcaattactcctataaaatttgtgcctgctggtgaagctgctggtctaactgcggatcaaggagcgaccaacgttcctgaagatgatccatgtgcacaagctgtatctggctcggaaaagcgcaagaagcacagaaaggtttgatgagaagactctcacccatcgtaacatgagattttgtcgtctatggtggtggaagtgaaggggctgctggttatgtggcgctgtgtatgacatgtttttggatcattgctaggatgcttgttggaatgacgttgactaaggcatccactgtccgtatgtttccgtgattagcttagcttggtatcaggaactcaggtttctatcgaagtggcttcgctctgtcgggaactctggatctctgtgatgtaacttgtcgttcgtcgtaccgtttccaacctgtgtttgtgtcagatcagatctcttgaggacgtgtttggttcaagcaatattacccatcattgccgt

SEQ ID NO: 62282 - protein, 284 aa, Triticum aestivum
  peptide (1)..(284): Ceres Seq. ID no. 12625256
MATTAAAAAAVPDAIPAAAPAAPSAQPHPVPDKCTNYKNHLQEWTQRNDQKLPAYNTESKRDHHRLEFRSTVEVGGERFQSARNHSRRKDAEQDAARVAYEILVTKTVNDDDHTDALGLIDQGVLFCKSILHEFAVKTKAEQPTYSADHPEGVSPMPLFVSSVLFAGNTYTGEAATCKKDAEQKAARVAVKSILATKNTCMHQIVRSKKELIIAITSSGFNKERGVVSQENCNAPTNAITPIKFVPAGEAAGLTADQGATNVPEDDPCAQAVSGSEKRKKHRKV

SEQ ID NO: 62283 - DNA, 816 bp, Triticum aestivum
  misc_feature (1)..(816): Ceres Seq. ID no. 13596812
cctagaacattctaatcgaaaaacacacccaacccccccacccccccaccccctcccccagcagccgccgcaaaagagagcaggaagcgaggaggaactttacaagatagggcatcgaatccgcctccttcttcctcgcgcggtcgtctccgaggcctccgacatggcgaacgcggcatcgggcatggctgtggacgacgaatgcaagctcaagttcctggagctgaaggcgaagcgaacccaccgcttcatcatctacaagatagacgacaagaagaagatggttgttgtggagaaagtcggtgagcctgccctgaactatgaggactttgctgccagcctccccaccaatgaatgcagatacgcgatattcgactatgactttgtcaccgaggagaactgccaaaagagcaagatattcttcgtcgcatggtctcctgacaccgcacgcgtgaggagcaagatgatctacgcaagctccaaggagaggttcaagagggagctcgacggcatccaggtggagctgcaggcgacagacccgaccgaggtcggcttcgatgtcatccaaggccgtgccaactgagcaccatggctgtgctgctgcttaccttaagtatgagcctctgatgaggatttagcgtgctcgccgaggctggtcatgagctgtttaccatgaggcaattgtgatttgagttgccagtatgtaccacctaaggaagatgtaagctatgactggcgcgacgacaaatgtatcctttctggttgttgattcgtggatcctgatatccccttcttgcctgctaaagatcagttgcg

SEQ ID NO: 62284 - protein, 193 aa, Triticum aestivum
  peptide (1)..(193): Ceres Seq. ID no. 13596813
LEHSNRKTHPTPPPPHPLPQQPPQKRAGSEEELYKIGHRIRLLLPRAVVSEASDMANAASGMAVDDECKLKFLELKAKRTHRFIIYKIDDKKKMVVVEKVGEPALNYEDFAASLPTNECRYAIFDYDFVTEENCQKSKIFFVAWSPDTARVRSKMIYASSKERFKRELDGIQVELQATDPTEVGFDVIQGRAN

SEQ ID NO: 62285 - protein, 139 aa, Triticum aestivum
  peptide (1)..(139): Ceres Seq. ID no. 13596814
MANAASGMAVDDECKLKFLELKAKRTHRFIIYKIDDKKKMVVVEKVGEPALNYEDFAASLPTNECRYAIFDYDFVTEENCQKSKIFFVAWSPDTARVRSKMIYASSKERFKRELDGIQVELQATDPTEVGFDVIQGRAN

SEQ ID NO: 62286 - protein, 132 aa, Triticum aestivum
  peptide (1)..(132): Ceres Seq. ID no. 13596815
MAVDDECKLKFLELKAKRTHRFIIYKIDDKKKMVVVEKVGEPALNYEDFAASLPTNECRYAIFDYDFVTEENCQKSKIFFVAWSPDTARVRSKMIYASSKERFKRELDGIQVELQATDPTEVGFDVIQGRAN

SEQ ID NO: 62287 - DNA, 1258 bp, Triticum aestivum
  misc_feature (1)..(1258): Ceres Seq. ID no. 13596816
acacaccagctcctagtagcagtgggtagcactggagagcagcagatacagacagggggctagctagcagcaatggccaggcaggatgttgcttccatgtttgccgttgctctcttcatcggagcattcgtttctgttcctacaagtgtgcaatccatcggcgtgtgctacggcgtgatcgccaacaacctcccgccggcgaacgacgtggtgcagctctacaggtccaagggcatcaccggcatgcgcatctacttcgccgacgccaaggccctctccgcgctccgtaactccggcatcagcctcatcctcgacgtcggcaacgaccagctcgccagcctcgccgccagcacctccaacgcggcgtcctgggtgcagaaaaacgtccggccatactacccggccgtgaacatcaagtacatcgccgccggtaacgaggtccagggaggcgccacccagagcatcgtgccggccatgcggaacctcaacgcggctctctccgccgctgggctcggcgccatcaaggtgtccacctccatccggttcgacgaggtggccaagtccttcccgccctccgagggcgtgttcgcgaatgcctacatgacggacgtggcccggctcctggcgagcaccggcgcgccgctgctggccaacgtgtacccctacttcgcctacaagcgcgacccgcagaacatcaagctcaactacgccacgttccggccgggacccacggtgcgggacgacaagaacgggctgacctacacgtgcctgttcgacgcgatggtggacgccgtggtcgccgccctggagaaggccggggcgccgggggtgagggtggtggtgtcggagagcgggtggccgtcggcgagcgggttcgctgcgacggcggacaacgcgagagcctacaaccagggactgatcgaccacgtcggcgggggcacgcccaagaggcgtggcgcgctggagacgtacatcttcggcatgttcaacgaaaacttcaagagaggggagctcgtggagaagcacttcgggctgttcaacccggacaagtcgccggcgtaccccatccagttcaagtgatctagtcttctagtctagtcgagctagcttacacgtgtacgtacccaggtcttctagtctagtaagtacacacgttcgacacgtactccatgggagagggaagccaatgacttcctgttcctggtggtgatacatcatcatgttatgaataaagagagggaagcagttatgaatttgt

SEQ ID NO: 62288 - protein, 335 aa, Triticum aestivum
  peptide (1)..(335): Ceres Seq. ID no. 13596817
MARQDVASMFAVALFIGAFVSVPTSVQSIGVCYGVIANNLPPANDVVQLYRSKGITGMRIYFADAKALSALRNSGISLILDVGNDQLASLAASTSNAASWVQKNVRPYYPAVNIKYIAAGNEVQGGATQSIVPAMRNLNAALSAAGLGAIKVSTSIRFDEVAKSFPPSEGVFANAYMTDVARLLASTGAPLLANVYPYFAYKRDPQNIKLNYATFRPGPTVRDDKNGLTYTCLFDAMVDAVVAALEKAGAPGVRVVVSESGWPSASGFAATADNARAYNQGLIDHVGGGTPKRRGALETYIFGMFNENFKRGELVEKHFGLFNPDKSPAYPIQFK

SEQ ID NO: 62289 - protein, 327 aa, Triticum aestivum
  peptide (1)..(327): Ceres Seq. ID no. 13596818
MFAVALFIGAFVSVPTSVQSIGVCYGVIANNLPPANDVVQLYRSKGITGMRIYFADAKALSALRNSGISLILDVGNDQLASLAASTSNAASWVQKNVRPYYPAVNIKYIAAGNEVQGGATQSIVPAMRNLNAALSAAGLGAIKVSTSIRFDEVAKSFPPSEGVFANAYMTDVARLLASTGAPLLANVYPYFAYKRDPQNIKLNYATFRPGPTVRDDKNGLTYTCLFDAMVDAVVAALEKAGAPGVRVVVSESGWPSASGFAATADNARAYNQGLIDHVGGGTPKRRGALETYIFGMFNENFKRGELVEKHFGLFNPDKSPAYPIQFK

SEQ ID NO: 62290 - protein, 278 aa, Triticum aestivum
  peptide (1)..(278): Ceres Seq. ID no. 13596819
MRIYFADAKALSALRNSGISLILDVGNDQLASLAASTSNAASWVQKNVRPYYPAVNIKYIAAGNEVQGGATQSIVPAMRNLNAALSAAGLGAIKVSTSIRFDEVAKSFPPSEGVFANAYMTDVARLLASTGAPLLANVYPYFAYKRDPQNIKLNYATFRPGPTVRDDKNGLTYTCLFDAMVDAVVAALEKAGAPGVRVVVSESGWPSASGFAATADNARAYNQGLIDHVGGGTPKRRGALETYIFGMFNENFKRGELVEKHFGLFNPDKSPAYPIQFK

SEQ ID NO: 62291 - DNA, 1499 bp, Triticum aestivum
  misc_feature (1)..(1499): Ceres Seq. ID no. 15226216
aggagcattcattcaggcaagcagacaatcaccgcgacagacgacgagcagcagcacacacccataaaccagaagcggccgtccaagccaaggcgcccacaggacgccaccaagaactcggagccaccttccaatcgaccaagccccctccatccggccaccggatcgggcccgccgatctctcgagctccccggccgccccctcccgcggcggcgtgcaatgggggccgccgccgaggacgccgtcaggcagctcggcatcctcatggatcaagtggacgcgccgctgaggaggacgttccagaatgtgcaccaaggccaccctagagaaacaatgttgcgctttctcaaggctagagaatggaacgtttccaaggctcataaaatgcttgtagattctttgaattggaggattgaaaatgaaattgatagtgtattggagagacctatactcccagtagatttatacagatcaatacgtgattcacaacttgttggactctcaggatacaccaaggagggtcttccagtttttggcattggtgttggtcagagcacatacgacaaagcttcggtgcactactatgtgcaatctcatattcagattaacgaataccgtgatcgcataattttgcccatgttgacggaaaagtttggacgcccgatcaccacttgcgttaaagttctcgacatgactggtttaaagttgtcagcactgagccaaatgaagatgctgagttcaatatcaactgttgatgatctgaactaccctgagaagtcagagacatattacatagttaatgttccatatatattctctgcatgctggaaggttgtgaagcccctattgcaggagaggacaaaaaagaaggttaaagttttgagtggttgtgggagagatgaacttctaaagattatggactactcagctctcccccatttctgccgacgagagggatcaggctcatccaagcattcatcttccaacgccgacgattgcttctcccctgaccaccctttccacaaagagctctacgagctcaccaaccagcaatcgtcgcacaaggagctcctcaagatgggatcattgcatgtgagcatcccggagcctgacccaaacgacgcgaagatcgtcgaggtgatccaggccgagttccacaagatgggggagcagaacggatcgaccaacgggcacaaggtctgatgccgcgccaccaccgaagacggccatctgcatgcggagcaccttaaccaatgcaagcgacctccgattaaactgatgatttaacctgtccatgttggttggctccctcgggacccctggggggatatagcagcgaaggctccgtgatgcatagggtgacgccggcctgggatcatagttggaagagatgaaccggacagtgtatatccattagcatagaacctgcatatgttaaactggtactataacaagatccatggatgatggatgtttattataacagcttgtaagcttc

SEQ ID NO: 62292 - protein, 327 aa, Triticum aestivum
  peptide (1)..(327): Ceres Seq. ID no. 15226217
MGAAAEDAVRQLGILMDQVDAPLRRTFQNVHQGHPRETMLRFLKAREWNVSKAHKMLVDSLNWRIENEIDSVLERPILPVDLYRSIRDSQLVGLSGYTKEGLPVFGIGVGQSTYDKASVHYYVQSHIQINEYRDRIILPMLTEKFGRPITTCVKVLDMTGLKLSALSQMKMLSSISTVDDLNYPEKSETYYIVNVPYIFSACWKVVKPLLQERTKKKVKVLSGCGRDELLKIMDYSALPHFCRREGSGSSKHSSSNADDCFSPDHPFHKELYELTNQQSSHKELLKMGSLHVSIPEPDPNDAKIVEVIQAEFHKMGEQNGSTNGHKV

SEQ ID NO: 62293 - protein, 312 aa, Triticum aestivum
  peptide (1)..(312): Ceres Seq. ID no. 15226218
MDQVDAPLRRTFQNVHQGHPRETMLRFLKAREWNVSKAHKMLVDSLNWRIENEIDSVLERPILPVDLYRSIRDSQLVGLSGYTKEGLPVFGIGVGQSTYDKASVHYYVQSHIQINEYRDRIILPMLTEKFGRPITTCVKVLDMTGLKLSALSQMKMLSSISTVDDLNYPEKSETYYIVNVPYIFSACWKVVKPLLQERTKKKVKVLSGCGRDELLKIMDYSALPHFCRREGSGSSKHSSSNADDCFSPDHPFHKELYELTNQQSSHKELLKMGSLHVSIPEPDPNDAKIVEVIQAEFHKMGEQNGSTNGHKV

SEQ ID NO: 62294 - protein, 289 aa, Triticum aestivum
  peptide (1)..(289): Ceres Seq. ID no. 15226219
MLRFLKAREWNVSKAHKMLVDSLNWRIENEIDSVLERPILPVDLYRSIRDSQLVGLSGYTKEGLPVFGIGVGQSTYDKASVHYYVQSHIQINEYRDRIILPMLTEKFGRPITTCVKVLDMTGLKLSALSQMKMLSSISTVDDLNYPEKSETYYIVNVPYIFSACWKVVKPLLQERTKKKVKVLSGCGRDELLKIMDYSALPHFCRREGSGSSKHSSSNADDCFSPDHPFHKELYELTNQQSSHKELLKMGSLHVSIPEPDPNDAKIVEVIQAEFHKMGEQNGSTNGHKV

SEQ ID NO: 62295 - DNA, 1347 bp, Triticum aestivum
  misc_feature (1)..(1347): Ceres Seq. ID no. 14302840
tctctcgactcattctcacggtcgtcaccagctatcgattcgcaacacagccgtcaagcccagccccgaggaaggaaggaaggaaaggaaggaataggtcggcgccgccatggagatgctgagcatgctgaaggtggggtacacggtgctgcgcagcgagacgccggcgacggacctcgtcaacaccttcatggactgggcggctcgccggtcgctcctccttctggcgctcttcatgcccccctactacgtctacaagctcaccgcgtcggccgccgccaccgtcgcgccgcaggacgtcgcggggaaggtcgtgctcgtcacgggcgcctcctccggcatcggcgagcaaatagcttaccagtacgcgaagaagggagcgaggctggccctggtggcacggagggagggaagcctgcgcgaggtcgccgccaaggcgaccgatctcggctcgccggacgtgctcgttgtgcccggggacgtggcgaggccggaggactgtaaggcgttcgtccaggccacagtcgagcgctttggccggttggatcatctcgtgaacaatgccggtctggtcaacgtgtgctggttcgaggagatgcccgacgtcgccactttcaagcaagtcttggacgtgaacttctggggcacggtgcatccaacccacgccgctcttcctcacctgacgaggagccgcggcaagatcttcgtcaactcctcggccgcggcggtgctggcaatgcctaggatgagcttctacaatgctagcaaggctgccgtgctgagcttcgccgacaccctgcggatggagctcggcgacgaggtgggcgtcacggtggcgacgcccggatggatcgagtccgagatgaccaaggggaagcacctctccaaaggagggagagtcgaggtcgatcaagacacgagggatgctcaggtggggctgtttccggtggtgcgtgccgagcggtgcgccgaggccatcgtggacgccgtttgccgcggccggcgcagcgtcaccgtgccgctgtggtaccgggcgctgttcctctggcggtcgttggcgccggaggtgggcgacgtcctgcaacgcgtgttctaccgccggagctccggcgacgggggcaggcagatgagggcgaggagggtcctggaggtcacgggcgccaagcgcgtgctgcagccgccgtcgctgcacacctcggatatcaaacgggagtagatgctacgtgaataaatgaatgttccggtgtcgtactgcaaagaaaataagatagaatggcgaggtgtagatggatggtttgtgtaaatttaagttgcgttcgaactaagtatgattttgtttctacctac

SEQ ID NO: 62296 - protein, 368 aa, Triticum aestivum
  peptide (1)..(368): Ceres Seq. ID no. 14302841
MEMLSMLKVGYTVLRSETPATDLVNTFMDWAARRSLLLLALFMPPYYVYKLTASAAATVAPQDVAGKVVLVTGASSGIGEQIAYQYAKKGARLALVARREGSLREVAAKATDLGSPDVLVVPGDVARPEDCKAFVQATVERFGRLDHLVNNAGLVNVCWFEEMPDVATFKQVLDVNFWGTVHPTHAALPHLTRSRGKIFVNSSAAAVLAMPRMSFYNASKAAVLSFADTLRMELGDEVGVTVATPGWIESEMTKGKHLSKGGRVEVDQDTRDAQVGLFPVVRAERCAEAIVDAVCRGRRSVTVPLWYRALFLWRSLAPEVGDVLQRVFYRRSSGDGGRQMRARRVLEVTGAKRVLQPPSLHTSDIKRE

SEQ ID NO: 62297 - protein, 366 aa, Triticum aestivum
  peptide (1)..(366): Ceres Seq. ID no. 14302842
MLSMLKVGYTVLRSETPATDLVNTFMDWAARRSLLLLALFMPPYYVYKLTASAAATVAPQDVAGKVVLVTGASSGIGEQIAYQYAKKGARLALVARREGSLREVAAKATDLGSPDVLVVPGDVARPEDCKAFVQATVERFGRLDHLVNNAGLVNVCWFEEMPDVATFKQVLDVNFWGTVHPTHAALPHLTRSRGKIFVNSSAAAVLAMPRMSFYNASKAAVLSFADTLRMELGDEVGVTVATPGWIESEMTKGKHLSKGGRVEVDQDTRDAQVGLFPVVRAERCAEAIVDAVCRGRRSVTVPLWYRALFLWRSLAPEVGDVLQRVFYRRSSGDGGRQMRARRVLEVTGAKRVLQPPSLHTSDIKRE

SEQ ID NO: 62298 - protein, 363 aa, Triticum aestivum
  peptide (1)..(363): Ceres Seq. ID no. 14302843
MLKVGYTVLRSETPATDLVNTFMDWAARRSLLLLALFMPPYYVYKLTASAAATVAPQDVAGKVVLVTGASSGIGEQIAYQYAKKGARLALVARREGSLREVAAKATDLGSPDVLVVPGDVARPEDCKAFVQATVERFGRLDHLVNNAGLVNVCWFEEMPDVATFKQVLDVNFWGTVHPTHAALPHLTRSRGKIFVNSSAAAVLAMPRMSFYNASKAAVLSFADTLRMELGDEVGVTVATPGWIESEMTKGKHLSKGGRVEVDQDTRDAQVGLFPVVRAERCAEAIVDAVCRGRRSVTVPLWYRALFLWRSLAPEVGDVLQRVFYRRSSGDGGRQMRARRVLEVTGAKRVLQPPSLHTSDIKRE

SEQ ID NO: 62299 - DNA, 1711 bp, Triticum aestivum
  misc_feature (1)..(1711): Ceres Seq. ID no. 13596925
ctgtaactcccgctttcagctcactccgatcaatctcgatttgccagccctccgcgacgccggcaggtcgctgttgagcctgactactccccgtagcggacatgggatcgacggcgctcggtggtgcggctccggcgcgcgccggattggcccccaagagtggagtccttggatctactttcaagccatgtggtggtttcaagctcaaaacaactactaaggttggacgctcttcagtttgtgtgagggtatccattgcttcttcaccacaaaaacagtactctcctaagacatcagcagttaaatcaggggaggaagtgcgcattgcggtgctaggagccagcggttataccggggctgagattgttcggcttctagcaaaccaccctcagttccgtatcacagtgatgaccgcagacagaaaagctggtgaacagtttggatctgtatttcctcacttgataacacaagacctgccaaatttagttgcgattaaagatgcagatttttcagatgttgatgctgttttttgttgcttgccacatggaacaacacaggaaattattaaaggcttaccccaacaactgaagattgttgatctctctgcggatttccgattgcgtaacatcaatgagtatgctgagtggtatggccatgctcatagggcaccagaacttcaggaagaggctgtttatggtttgacggaggttcttcgagatgaaataagaaatgcacggcttgttgccaacccgggatgttatcccacgtctattcagctccctcttgttcctctaataaaggcaaaactgatcaagctgagcaatataataattgatgcaaaatctggggttaccggggcaggacgtggagctaaggaagcaaatctgtacaccgagatagctgaaggcattcatgcttatggaataaaaggccaccgtcatgttcctgaggttgaacaaggattgtcagaggctgctgaatccaaagttactatcagcttcactccaaatcttatctgcatgaaacgtgggatgcaatctactatgtttgttgaaatggcacctggagtgactgtcagtgatttgtatcagcatctcaagtctacttatgagggtgaagaatttgtcaagctgttaaatggcagcaatgttcctcacacacgccatgttgttggatcaaattactgcttcatgaatgtcttcgaggacagaattcctggaagggcaatcatcatctctgtcatagacaatcttgtaaagggagcatctggccaggccgtgcagaacctcaatctgatgatgggactgcctgagaacatggggctgcaatatcagcccctatttccttgatatgttgtgcctttgttgtgctctttctcgatgatgctttggagttaagcacccatctctgttttccgttgagaagcaaagagctgaatgtcggagtgtaaccaaactcgctcaacagcaaaacttggtttgtgctggtgtagtatttagagaggagcaacaattagcagttgaataagagtatgaactgagtggcttggtgtaatgaaagtccaaaggctattatatcctacagtggattgttgtcatgagatcaataaagcagtgtaaaacccgattcagagacatcaaccattgctgtcagcattggataatagttagaagtgtgttacttttaaatattaaaggataaattagttttc

SEQ ID NO: 62300 - protein, 415 aa, Triticum aestivum
  peptide (1)..(415): Ceres Seq. ID no. 13596926
MGSTALGGAAPARAGLAPKSGVLGSTFKPCGGFKLKTTTKVGRSSVCVRVSIASSPQKQYSPKTSAVKSGEEVRIAVLGASGYTGAEIVRLLANHPQFRITVMTADRKAGEQFGSVFPHLITQDLPNLVAIKDADFSDVDAVFCCLPHGTTQEIIKGLPQQLKIVDLSADFRLRNINEYAEWYGHAHRAPELQEEAVYGLTEVLRDEIRNARLVANPGCYPTSIQLPLVPLIKAKLIKLSNIIIDAKSGVTGAGRGAKEANLYTEIAEGIHAYGIKGHRHVPEVEQGLSEAAESKVTISFTPNLICMKRGMQSTMFVEMAPGVTVSDLYQHLKSTYEGEEFVKLLNGSNVPHTRHVVGSNYCFMNVFEDRIPGRAIIISVIDNLVKGASGQAVQNLNLMMGLPENMGLQYQPLFP

SEQ ID NO: 62301 - protein, 313 aa, Triticum aestivum
  peptide (1)..(313): Ceres Seq. ID no. 13596927
MTADRKAGEQFGSVFPHLITQDLPNLVAIKDADFSDVDAVFCCLPHGTTQEIIKGLPQQLKIVDLSADFRLRNINEYAEWYGHAHRAPELQEEAVYGLTEVLRDEIRNARLVANPGCYPTSIQLPLVPLIKAKLIKLSNIIIDAKSGVTGAGRGAKEANLYTEIAEGIHAYGIKGHRHVPEVEQGLSEAAESKVTISFTPNLICMKRGMQSTMFVEMAPGVTVSDLYQHLKSTYEGEEFVKLLNGSNVPHTRHVVGSNYCFMNVFEDRIPGRAIIISVIDNLVKGASGQAVQNLNLMMGLPENMGLQYQPLFP

SEQ ID NO: 62302 - DNA, 1448 bp, Triticum aestivum
  misc_feature (1)..(1448): Ceres Seq. ID no. 13654728
agcagaggcagcggcgagagcgagagcgagcacagccgcggagacagacagacgcacgcacgcacgcacgccacgccattacaaatcgcccccagcgagccaagcaccaaaccctacccaaccaggcaaccaccgcccgccagccctcccgcggacggatcctcctgcccgccctcacctctcgccttcctctcgtctcgtctgccttttttttctctcccgccgccgcgccatggaggaggggaggagggggacgaggacggtgcgggtgcggaacatctcagatctggccggggagcgcgaggtgcgcgagttcttctccttctccggcgaaatcgaccacgtcgacatcacccctgacggggcggcggcggggaggacggcctacgtcaccttcaaggacgccaaggccctggagatcgcgctgctgctctcgggagcaacaattgtggatcgagttgtgaacataacctctgctgaagattacatctacatccctgttaatgaacagcaacttatggtgaatgaggtgacaagtacagctcctactgcagatttggaacaacctactgaggccaacgcaagccccactagcgtttatgccagcaaggctcatgatgtcatgacaactgtgatcgcaaggggttcagcaattcgacaagatgctgtgaacaaagctaaatcatttgacgagaggcatcagttgagggctaatgcgtcagctaggatcagttccttcgataggcgtgttggcctttcagagaagttaaatactgggatatcggccgtaaatgaaaaggtgaaaactgtggaccaaaggttacatgtttctgacaaaacaatggctgctttgctggttgcagagcgcaagctaaacaatacaggctctgctgtgaaaaccaacaggtatgtgtctgctggaacaagctggctaaatggtgcgttcagcaaggttgccaaggctggtcatgttgctggctcaagaacaagagaaaagttccagatagctgtgtcaaatatatcagccaaagggcctgctgtcgttgcttgagctttgttctgggactgggagctcttcttcctggggaaaatctgttggaaatcttgagcaagcaccttccattggttgtgtcatcaagctgtggcttgtaactgtgtatttctctattgattttttcttcttcttcgaggagaactttttcagggagtcttgtcagatttggtacataggggatctaaattttctttagaattttagaaccactattctttttagtgcttgtgttcaattgattataggtggtagtgacactttgcaccatgttcctggctcggtgtggtttcatgattgccattgatgtcaaatgtgtcgtgcctctactttctgcagaaattgttactcaaattgagtaatttggaacgtatgaaactgcaatgcttctttgtgt

SEQ ID NO: 62303 - protein, 349 aa, Triticum aestivum
  peptide (1)..(349): Ceres Seq. ID no. 13654729
AEAAARARASTAAETDRRTHARTPRHYKSPPASQAPNPTQPGNHRPPALPRTDPPARPHLSPSSRLVCLFFLSRRRAMEEGRRGTRTVRVRNISDLAGEREVREFFSFSGEIDHVDITPDGAAAGRTAYVTFKDAKALEIALLLSGATIVDRVVNITSAEDYIYIPVNEQQLMVNEVTSTAPTADLEQPTEANASPTSVYASKAHDVMTTVIARGSAIRQDAVNKAKSFDERHQLRANASARISSFDRRVGLSEKLNTGISAVNEKVKTVDQRLHVSDKTMAALLVAERKLNNTGSAVKTNRYVSAGTSWLNGAFSKVAKAGHVAGSRTREKFQIAVSNISAKGPAVVA

SEQ ID NO: 62304 - protein, 272 aa, Triticum aestivum
  peptide (1)..(272): Ceres Seq. ID no. 13654730
MEEGRRGTRTVRVRNISDLAGEREVREFFSFSGEIDHVDITPDGAAAGRTAYVTFKDAKALEIALLLSGATIVDRVVNITSAEDYIYIPVNEQQLMVNEVTSTAPTADLEQPTEANASPTSVYASKAHDVMTTVIARGSAIRQDAVNKAKSFDERHQLRANASARISSFDRRVGLSEKLNTGISAVNEKVKTVDQRLHVSDKTMAALLVAERKLNNTGSAVKTNRYVSAGTSWLNGAFSKVAKAGHVAGSRTREKFQIAVSNISAKGPAVVA

SEQ ID NO: 62305 - protein, 177 aa, Triticum aestivum
  peptide (1)..(177): Ceres Seq. ID no. 13654731
MVNEVTSTAPTADLEQPTEANASPTSVYASKAHDVMTTVIARGSAIRQDAVNKAKSFDERHQLRANASARISSFDRRVGLSEKLNTGISAVNEKVKTVDQRLHVSDKTMAALLVAERKLNNTGSAVKTNRYVSAGTSWLNGAFSKVAKAGHVAGSRTREKFQIAVSNISAKGPAVVA

SEQ ID NO: 62306 - DNA, 1039 bp, Triticum aestivum
  misc_feature (1)..(1039): Ceres Seq. ID no. 13596515
ccaccgattccgccggcgggactcctgtccgggaaacgccgatctagaatggcggccaacttctggacgtcgtcgcacagcaagcagctgctggacccggaggaggtggacgtggtgccggcgcaagaccgggagcggggcgtcacgcccgtggagttccgcctcgtcaagatccacatgtccttccatatatggcggttggcccagcaggtcaaagttagacaaagagtcatagctactgcaatcacgtacttcaggtgtgtgtacacaagaaagagcatgacagagtatgatcctcgtttggtagcaccagcttgtttgtatttggcatcaaaggtagaggaaagcacagtgcaagcaaggcttcttgtattttacataaagaagatgtgtggttcggatgacaagtaccgatttgaaatcaaagatatccttgaaatggaaatgaagctcctggaagcacttgactattatttggttgtttaccatccataccgtcctcttctacagttattgcaggatgctggcataacagatctgacacaatttgcctggggcctcgtcaatgatacttacaagatggatctcattctcatatatcctccttatatgattgcattggcctgcatatacattgcaagcgttcttaaagataaggacacaacctcatggtttgaagaactccgtgttgacatgaacattgttaagaatatctcaatggaaatcttggacttctacgacacctacaagattgatcctcaaaggggcctccaggaggataagatcatccctgtgatgaacaagttgccatcaaaggcctgaaggccgatttgacacctgaccatttaaccaccttacaccgcctcatctggattgtgtaaccccgtagccctgaacatcttcggaggcgagagatccagggaatggcatcaaattgttaggcgccgcgatggcaatcccaatgttagggggttatctgtaatacttaagcatctgatttctgtatcatacaaaacccaagtggaattgtttcaacttg

SEQ ID NO: 62307 - protein, 273 aa, Triticum aestivum
  peptide (1)..(273): Ceres Seq. ID no. 13596516
PPIPPAGLLSGKRRSRMAANFWTSSHSKQLLDPEEVDVVPAQDRERGVTPVEFRLVKIHMSFHIWRLAQQVKVRQRVIATAITYFRCVYTRKSMTEYDPRLVAPACLYLASKVEESTVQARLLVFYIKKMCGSDDKYRFEIKDILEMEMKLLEALDYYLVVYHPYRPLLQLLQDAGITDLTQFAWGLVNDTYKMDLILIYPPYMIALACIYIASVLKDKDTTSWFEELRVDMNIVKNISMEILDFYDTYKIDPQRGLQEDKIIPVMNKLPSKA

SEQ ID NO: 62308 - protein, 257 aa, Triticum aestivum
  peptide (1)..(257): Ceres Seq. ID no. 13596517
MAANFWTSSHSKQLLDPEEVDVVPAQDRERGVTPVEFRLVKIHMSFHIWRLAQQVKVRQRVIATAITYFRCVYTRKSMTEYDPRLVAPACLYLASKVEESTVQARLLVFYIKKMCGSDDKYRFEIKDILEMEMKLLEALDYYLVVYHPYRPLLQLLQDAGITDLTQFAWGLVNDTYKMDLILIYPPYMIALACIYIASVLKDKDTTSWFEELRVDMNIVKNISMEILDFYDTYKIDPQRGLQEDKIIPVMNKLPSKA

SEQ ID NO: 62309 - protein, 214 aa, Triticum aestivum
  peptide (1)..(214): Ceres Seq. ID no. 13596518
MSFHIWRLAQQVKVRQRVIATAITYFRCVYTRKSMTEYDPRLVAPACLYLASKVEESTVQARLLVFYIKKMCGSDDKYRFEIKDILEMEMKLLEALDYYLVVYHPYRPLLQLLQDAGITDLTQFAWGLVNDTYKMDLILIYPPYMIALACIYIASVLKDKDTTSWFEELRVDMNIVKNISMEILDFYDTYKIDPQRGLQEDKIIPVMNKLPSKA

SEQ ID NO: 62310 - DNA, 1638 bp, Triticum aestivum
  misc_feature (1)..(1638): Ceres Seq. ID no. 14301830
cccgatccgcctttcacggcgcgccaccctcgtcggttcactggagcacttcccactgccgcccggccgcgtggagatctgagcaggaagcccgcgccgcagcttatataacggcgcctcctcctccacattctcagcgcccatcacacccccgcagagccggaagccacacacacacgccttcctccttcctctgctcgcatctcggatcggggagaaggaggatctgaggctttcggcagggccggggacgatggcgccgctgctcaaggacgagctggacatcgtcatcccgacgatccggaacctggacttcctcgagatgtggaggcccttcttccagccgtaccacctcatcatcgtgcaggacggcgaccccacgaggaccgtcatggtgcccgagggcttcgactacgagctctacaaccgcaacgacatcaaccgcatcctcggccccaaggcctcctgcatctccttcaaggactccgcctgccgctgcttcggctacatggtctccaagaagaagtacgtctacaccatcgacgacgactgcttcgtggccaaggacccgacggggaaggacattgacgcgctggccaagcacatccagaacctgctctgcccctccacgccgctcttcttcaacaccctgtacgacccctaccaggagggcgccgacttcgtgcgcggctacccgttcagcctccgggagggcgtgcccaccgccgtgtcgcacggcctctggctcaacatccccgactacgacgcccccacgcagctggtcaagccgcgggagcgcaacggcaggtacgtcgacgccgtcatgaccatccccaagggctccctcttccccatgtgcggcatgaacctcgccttcgaccgcgagctcatcggcccggccatgtacttcggcctcatgggcgacggccagcccatcggacgctacgacgacatgtgggccggctggtgcgtcaaggtgatctgcgaccaccttgggctgggcgtcaagacggggctgccctacatctggcacagcaaggccagcaacccgttcgtgaacctgaagaaggagtacaagggcatcttctggcaggaggacatcatccccttcttccaggccgcgaagctgaccaaggaatgcgacaccgtgcagaagtgctacatctcgctctcgcagcaggtcaaggagaagctcggcaagatcgacccctacttcgtcaagctcgccgatgccatggtcacctggatcgaggcctgggacatgctcaactccaaggactccaaggaggccgatgccaacggcaagctcaaggggaggtagatcgagatcgagggagagaaccttttttgcactagcatactgagcaggcggtgaggcggcatataccggtttcttcagttcgtaggttcagtgcgtgcatcaggtattcaggttcaggctgttgtgtactacaaaacattagctgccgttctatcttacgtttacgttgagggtcgcgttaatttcccccttctttaatttcattattaagagatgatgtcgttttctcaagggtttagtactacggttatacttgtggctgctaatgtttccgtgtaatcttgtgtacactgaaatgtgagaataaaaagttgttc

SEQ ID NO: 62311 - protein, 355 aa, Triticum aestivum
  peptide (1)..(355): Ceres Seq. ID no. 14301831
MAPLLKDELDIVIPTIRNLDFLEMWRPFFQPYHLIIVQDGDPTRTVMVPEGFDYELYNRNDINRILGPKASCISFKDSACRCFGYMVSKKKYVYTIDDDCFVAKDPTGKDIDALAKHIQNLLCPSTPLFFNTLYDPYQEGADFVRGYPFSLREGVPTAVSHGLWLNIPDYDAPTQLVKPRERNGRYVDAVMTIPKGSLFPMCGMNLAFDRELIGPAMYFGLMGDGQPIGRYDDMWAGWCVKVICDHLGLGVKTGLPYIWHSKASNPFVNLKKEYKGIFWQEDIIPFFQAAKLTKECDTVQKCYISLSQQVKEKLGKIDPYFVKLADAMVTWIEAWDMLNSKDSKEADANGKLKGR

SEQ ID NO: 62312 - protein, 332 aa, Triticum aestivum
  peptide (1)..(332): Ceres Seq. ID no. 14301832
MWRPFFQPYHLIIVQDGDPTRTVMVPEGFDYELYNRNDINRILGPKASCISFKDSACRCFGYMVSKKKYVYTIDDDCFVAKDPTGKDIDALAKHIQNLLCPSTPLFFNTLYDPYQEGADFVRGYPFSLREGVPTAVSHGLWLNIPDYDAPTQLVKPRERNGRYVDAVMTIPKGSLFPMCGMNLAFDRELIGPAMYFGLMGDGQPIGRYDDMWAGWCVKVICDHLGLGVKTGLPYIWHSKASNPFVNLKKEYKGIFWQEDIIPFFQAAKLTKECDTVQKCYISLSQQVKEKLGKIDPYFVKLADAMVTWIEAWDMLNSKDSKEADANGKLKGR

SEQ ID NO: 62313 - protein, 309 aa, Triticum aestivum
  peptide (1)..(309): Ceres Seq. ID no. 14301833
MVPEGFDYELYNRNDINRILGPKASCISFKDSACRCFGYMVSKKKYVYTIDDDCFVAKDPTGKDIDALAKHIQNLLCPSTPLFFNTLYDPYQEGADFVRGYPFSLREGVPTAVSHGLWLNIPDYDAPTQLVKPRERNGRYVDAVMTIPKGSLFPMCGMNLAFDRELIGPAMYFGLMGDGQPIGRYDDMWAGWCVKVICDHLGLGVKTGLPYIWHSKASNPFVNLKKEYKGIFWQEDIIPFFQAAKLTKECDTVQKCYISLSQQVKEKLGKIDPYFVKLADAMVTWIEAWDMLNSKDSKEADANGKLKGR

SEQ ID NO: 62314 - DNA, 692 bp, Triticum aestivum
  misc_feature (1)..(692): Ceres Seq. ID no. 12584771
gcactcacactagttcactctcgcatcaactaacctcgctctcgtgcgcaggatgcggagcggtgtcagcgcgcgccttctgccgcaggcggtggccatcgccatcgccgtggccgtcgcctgctgcatggccgccgcaccgtcgtcggcgcaggggacgacgacgcccgcggacgccagcggcgcggtgccgtcgtgcgcgtcgaagctcgtgacgtgcgcgggctacctgaacaccaccgacacgccgccggagtcgtgctgcgacccgctcaaggaggcggcgaccacgcaggcggcgtgcatgtgcgccatcctcatgaacaaggccgcgctgcaggcgttcggcgtggcgccggagcagggggtgctcctcgccaagcgctgcggcgtcaccaccgacgcgtccacctgcgccaagtacaccgccggcgccggttccgatgctgcaactgcaggtagcacagccgcttcttcagcatccacgggaactgctgcttctacagttgccaagccaacggcaagcggaggaaccacgcatcccctgagcttgatcgccgcatcttcatttgtaggcttcagtttcatctggtggacgatcatggcgtagtaagagatgccaatgagtatgaactgttatgtaaaaaaaaactgtatcgtctcaataaacataactatctggttgtcacttc

SEQ ID NO: 62315 - protein, 185 aa, Triticum aestivum
  peptide (1)..(185): Ceres Seq. ID no. 12584772
MRSGVSARLLPQAVAIAIAVAVACCMAAAPSSAQGTTTPADASGAVPSCASKLVTCAGYLNTTDTPPESCCDPLKEAATTQAACMCAILMNKAALQAFGVAPEQGVLLAKRCGVTTDASTCAKYTAGAGSDAATAGSTAASSASTGTAASTVAKPTASGGTTHPLSLIAASSFVGFSFIWWTIMA

SEQ ID NO: 62316 - protein, 160 aa, Triticum aestivum
  peptide (1)..(160): Ceres Seq. ID no. 12584773
MAAAPSSAQGTTTPADASGAVPSCASKLVTCAGYLNTTDTPPESCCDPLKEAATTQAACMCAILMNKAALQAFGVAPEQGVLLAKRCGVTTDASTCAKYTAGAGSDAATAGSTAASSASTGTAASTVAKPTASGGTTHPLSLIAASSFVGFSFIWWTIMA

SEQ ID NO: 62317 - protein, 101 aa, Triticum aestivum
  peptide (1)..(101): Ceres Seq. ID no. 12584774
MCAILMNKAALQAFGVAPEQGVLLAKRCGVTTDASTCAKYTAGAGSDAATAGSTAASSASTGTAASTVAKPTASGGTTHPLSLIAASSFVGFSFIWWTIMA

SEQ ID NO: 62318 - DNA, 722 bp, Triticum aestivum
  misc_feature (1)..(722): Ceres Seq. ID no. 13583431
cggcctacccaccccctgccgctccctgcctagggttttgagtcccgcccccctccgccgcgcaccatgggccccgacgagctccccaaggccgccgccgccggtgccgaggaggccgccccgttctccttcagcatctggccgccgacgcagcggacgcgggacgccgtggtgcggcgcctggtggacacgctggccggcgacaccctcctctgcaagcgctacggcgccgtgccggccgccgacgccgagcccgccgcgcgggccatcgaggccgaggccttcgacgccgccgccgtcaccggcggggccgccgcctccgtcgaggagggcatcgaggcgctgcagctctactccaaggaggtcagccgccgccctcctcgacttcgtcaagtcccgctccgccgccgccaaggccgagccgccggccgaggaggcgctcgccgtcaaggaggagacctcccaggcctgagccccggacgagaaccgttcgtttcgattatgcttcgagataaaattcatttgcatctagagttcgtgtgcggcgttggcctctgcttgggatgagttgcctgtaggttgttcgcgtgcctgtgctgttattgttctttcagtagctgctggttacctttttttttagtgtgttcgtttattacttccgtttgtatctgtgaacaagaattatcttcaccttgtcgtggcaatgatccaagatttgaccg

SEQ ID NO: 62319 - protein, 166 aa, Triticum aestivum
  peptide (1)..(166): Ceres Seq. ID no. 13583432
MGPDELPKAAAAGAEEAAPFSFSIWPPTQRTRDAVVRRLVDTLAGDTLLCKRYGAVPAADAEPAARAIEAEAFDAAAVTGGAAASVEEGIEALQLYSKEVSRRPPRLRQVPLRRRQGRAAGRGGARRQGGDLPGLSPGREPFVSIMLRDKIHLHLEFVCGVGLCLG

SEQ ID NO: 62320 - protein, 156 aa, Triticum aestivum
  peptide (1)..(156): Ceres Seq. ID no. 13583433
GLPTPCRSLPRVLSPAPLRRAPWAPTSSPRPPPPVPRRPPRSPSASGRRRSGRGTPWCGAWWTRWPATPSSASATAPCRPPTPSPPRGPSRPRPSTPPPSPAGPPPPSRRASRRCSSTPRRSAAALLDFVKSRSAAAKAEPPAEEALAVKEETSQA

SEQ ID NO: 62321 - DNA, 1037 bp, Triticum aestivum
  misc_feature (1)..(1037): Ceres Seq. ID no. 13596535
aacacaacaccaccgcaatctttactcgagaaaagaaaaacacaacaccgcaatcgccacctgcaccgaaccggagcaaatctccggcgagctcgagccgaagcggcgaacccgcgcgagcaggagagatggatccggacgaggtgaagtcgaagctccaaggcctggccttcggcaacgtcctggccgccgccgcccgcgactacaagaaggaagttatagctaaagagaaggctcaagcagcacctgcgatcccatgatgaagtcgatcttgatgagttactggatgacccagagcttgagaaattgcatgctgaacggcttgctgctcttaagagagaggtcgagaagcgtgaggtgctaaagaggcaaggtcatggtgaatacagggaaataaccgaaggggacttcttaggagaggtcactcgtggtgacaaggtcatctgtcatttctaccatcgtgaattttaccgctgcaagatcatggataagcatttgaaggcacttgcaccggtctatttgggaactaaattcgtcaagcttgatgccgaaaatgctcccttctttgtggcaaaactagcaatcaaaacgttgccatgtgttatattgttcaagaagggtattgctcttgatcggttggttggtttcgatgaccttggaagtaaagatgatttttctaccagggctttggaaaatgtactgaagaggaaaggtataattgaggaaaagaagaaagacgatgatgacgaagatgatgagactgacatgtcaaaggataggagggttagatcttccactgcttacgattcggattcagattgaaaagatgaagtgatatgatcctgtcttttgtaacattataattttgtctcttttgtactctagctctcggaagttccttatgatttatgtgtgccgtattgtatcgaacaagagaactggaagccggatgtattagtgatctgtcagtaactccagttttacaccagttatcggagtacaatacatatgtatgactaagtattagtgctgcaatt

SEQ ID NO: 62322 - protein, 112 aa, Triticum aestivum
  peptide (1)..(112): Ceres Seq. ID no. 15221914
MDKHLKALAPVYLGTKFVKLDAENAPFFVAKLAIKTLPCVILFKKGIALDRLVGFDDLGSKDDFSTRALENVLKRKGIIEEKKKDDDDEDDETDMSKDRRVRSSTAYDSDSD

SEQ ID NO: 62323 - protein, 85 aa, Triticum aestivum
  peptide (1)..(85): Ceres Seq. ID no. 15221915
HNTTAIFTREKKNTTPQSPPAPNRSKSPASSSRSGEPARAGEMDPDEVKSKLQGLAFGNVLAAAARDYKKEVIAKEKAQAAPAIP

SEQ ID NO: 62324 - protein, 74 aa, Triticum aestivum
  peptide (1)..(74): Ceres Seq. ID no. 15221916
TQHHRNLYSRKEKHNTAIATCTEPEQISGELEPKRRTRASRRDGSGRGEVEAPRPGLRQRPGRRRPRLQEGSYS

SEQ ID NO: 62325 - DNA, 1045 bp, Triticum aestivum
  misc_feature (1)..(1045): Ceres Seq. ID no. 13598382
aggacatcaagcacctgagctccacatcgatcagtacccacggccactccactctcagctcagggactcggtgtcagggcgacccaagacagaagaatcggatccagaagaatcatggattccctgacggcgtcgacgacggcgaagcccaccctccgagtggccgcattctgcggctccctccgcaaggactcgtggcaccgcggcctcatccgcgccgcggaggagctttgcgaggagtccatcccggggctgcgcatcgaccacgtggacatctccggcctgcccatggtcaacccggacctggagaccgacggcggcaagggcttcccgccggccgtggaggcgctccgcgacagcgtccgcgccgcagactgcttcctcttcgcctcgcccgagtacaactactcggtcacagcgtccctgaagaacgcgctggactgggcgtcgaggggcaagcgcaactgctgggcggacagggcggcggcgatcgtgtgcgcggggggcgacttcggcggggccagggcgtcgctccacctccgccagatcggggtgttcctcgacctccacttcatcaacaagccggagctccacgtgagggcgtttgcggagccgcccaagttcgacgaggaggggaacctcatcgacgccgagaccagggagcggctcaggaaggtgctcctctcgctccaggccttcgcgctcaggctccagcacaacatggacgactgactgactcaagatcgatcgatgatacctggctctgtgtaccgtgcgcgctggttaatttgcattgcccttcagtttgacgacgttgtgctctatgcactagtattcgtggttccgtgagaagtctgtgctacctttgtgtaataaagcgccgaagcgtgcaaaaaaaaaaagtaataaatcgccgaagaattgcactgtaaaaaaaagaacgtgtgcgtgcgtatgtgttttaccgatgctactagtagaacgcaagggcgcatcggctacgttgagaaaacaatagaactgttgaagaaattgatattgtcgt

SEQ ID NO: 62326 - protein, 268 aa, Triticum aestivum
  peptide (1)..(268): Ceres Seq. ID no. 13598383
DIKHLSSTSISTHGHSTLSSGTRCQGDPRQKNRIQKNHGFPDGVDDGEAHPPSGRILRLPPQGLVAPRPHPRRGGALRGVHPGAAHRPRGHLRPAHGQPGPGDRRRQGLPAGRGGAPRQRPRRRLLPLRLARVQLLGHSVPEERAGLGVEGQAQLLGGQGGGDRVRGGRLRRGQGVAPPPPDRGVPRPPLHQQAGAPREGVCGAAQVRRGGEPHRRRDQGAAQEGAPLAPGLRAQAPAQHGRLTDSRSIDDTWLCVPCALVNLHCPSV

SEQ ID NO: 62327 - protein, 205 aa, Triticum aestivum
  peptide (1)..(205): Ceres Seq. ID no. 13598384
MDSLTASTTAKPTLRVAAFCGSLRKDSWHRGLIRAAEELCEESIPGLRIDHVDISGLPMVNPDLETDGGKGFPPAVEALRDSVRAADCFLFASPEYNYSVTASLKNALDWASRGKRNCWADRAAAIVCAGGDFGGARASLHLRQIGVFLDLHFINKPELHVRAFAEPPKFDEEGNLIDAETRERLRKVLLSLQAFALRLQHNMDD

SEQ ID NO: 62328 - protein, 147 aa, Triticum aestivum
  peptide (1)..(147): Ceres Seq. ID no. 13598385
MVNPDLETDGGKGFPPAVEALRDSVRAADCFLFASPEYNYSVTASLKNALDWASRGKRNCWADRAAAIVCAGGDFGGARASLHLRQIGVFLDLHFINKPELHVRAFAEPPKFDEEGNLIDAETRERLRKVLLSLQAFALRLQHNMDD

SEQ ID NO: 62329 - DNA, 1156 bp, Triticum aestivum
  misc_feature (1)..(1156): Ceres Seq. ID no. 13583434
attacacacctgcatctcggaatcatcgcgcagcatcaggcgattcgacctcgccgttgcccaggcgccggagacgacgacgccgacgagatgacggtgttccacttcctcaactgcgcggtcctcaccttcggcccccacgtcgtctactactccgccacccccctgtcagagtatgacacgattggcaccagtgtaaaagcagctgttgtttatcttggagcagcacttgtaaagcttgtttgtttagcaacgttcctcaaagtacctgatgcgaatgatagctttgatccctaccaggaattaatgaaaattctaattgggtttatagatgttgctggcctttattttgctttgacacagttgacccacagaaacatctcccagaaccataagttccaggctgttggtcttggctgggcttttgctgattcagttctgcacaggcttgcacctctctggattggggcacgagggcttgaatttacttgggagtacatattccaaggacttgaagcaaatgccaatcttgtgatgaccctctcccttgctgcattaggatccttgatgtggctgaggaagaacaaacctaggactttaattccaataatttatgcatgtgctctgcttctggcaacaatgccatctatcaccagttacttgcggagatcattggagtggcagactcccaaggtggttggcttcgagctctcctcctccttggttatggctttcatcagctggcagctgttctcggcttgtcagaggccgatgtaatcaacgaaacaaagcactgcgggatttgccggagatttggtgctcccaagatgtctcttgttgtacttgggcaaaattagaatgctgcttagagcctcggcgctaccgtaacatatattttgaggttcagttgcagaacgttttactttatttgtcggccatagtgcagaaacacatgatctgatgagtgctactgctactgtaacaggtgctcttgtaggaatcgagctaaaacgtagcaccttattccctgttgtatcacatattctgctcaatagcattgcatcttctagtctgaagccaagacattcacttatgccgacagattatgagaaaatacactgtcgtttcatctttggtacgatacatggttttggtc

SEQ ID NO: 62330 - protein, 258 aa, Triticum aestivum
  peptide (1)..(258): Ceres Seq. ID no. 13583435
ITHLHLGIIAQHQAIRPRRCPGAGDDDADEMTVFHFLNCAVLTFGPHVVYYSATPLSEYDTIGTSVKAAVVYLGAALVKLVCLATFLKVPDANDSFDPYQELMKILIGFIDVAGLYFALTQLTHRNISQNHKFQAVGLGWAFADSVLHRLAPLWIGARGLEFTWEYIFQGLEANANLVMTLSLAALGSLMWLRKNKPRTLIPIIYACALLLATMPSITSYLRRSLEWQTPKVVGFELSSSLVMAFISWQLFSACQRPM

SEQ ID NO: 62331 - protein, 228 aa, Triticum aestivum
  peptide (1)..(228): Ceres Seq. ID no. 13583436
MTVFHFLNCAVLTFGPHVVYYSATPLSEYDTIGTSVKAAVVYLGAALVKLVCLATFLKVPDANDSFDPYQELMKILIGFIDVAGLYFALTQLTHRNISQNHKFQAVGLGWAFADSVLHRLAPLWIGARGLEFTWEYIFQGLEANANLVMTLSLAALGSLMWLRKNKPRTLIPIIYACALLLATMPSITSYLRRSLEWQTPKVVGFELSSSLVMAFISWQLFSACQRPM

SEQ ID NO: 62332 - protein, 156 aa, Triticum aestivum
  peptide (1)..(156): Ceres Seq. ID no. 13583437
MKILIGFIDVAGLYFALTQLTHRNISQNHKFQAVGLGWAFADSVLHRLAPLWIGARGLEFTWEYIFQGLEANANLVMTLSLAALGSLMWLRKNKPRTLIPIIYACALLLATMPSITSYLRRSLEWQTPKVVGFELSSSLVMAFISWQLFSACQRPM

SEQ ID NO: 62333 - DNA, 776 bp, Triticum aestivum
  misc_feature (1)..(776): Ceres Seq. ID no. 12587829
gaaaaatcacaagctagcaagcccacctagctcagccacaagcctagccagtacactctagttggccacttgcttcatcaacatagcaatggcgccctccaagctcgctctcttcctcgccctgaaccaggtcctcttggcagccgtgcatggctgcgggtcgtactgcggcaatacaccggccgtcccagtgccaacatcaccgatcgccgtgtctccgcccgccatcccagtccctgcccccgccgacaaccggaggaggcagcggcacctgctcgatcaacacgctgaagctgaaggtgtgcgccaacgtactgaacctgctgaagctcaacttagccgtgctggcgagcgacgactgctgcccgctgttgggcgggctcgccgacctcgacgtcgccgtgtgcctctacaccgccatcaaggccaatgtcctcggcatcaagctcaacgtccccgtcgacctcgttctcctcctcaaccagtgcggcaagacctgccccgccgacttcacctgccccagctgatccacccatcatccctcgaaccatgcatcacaaaccatgtgtcgtcgtcatcatactcgtctttggtttgcatgccatcacacccgtcactcgtgcatgcatgcacgcttacgtgttcatttcttccagggactgcttataagatagtcgttgatcattgtattccgataggatatctaaatgcatggttcgcatatttgtaaaatgatatacatacgtggaataaaatgattcaagttgtgttaactc

SEQ ID NO: 62334 - protein, 213 aa, Triticum aestivum
  peptide (1)..(213): Ceres Seq. ID no. 12587830
MAPSKLALFLALNQVLLAAVHGCGSYCGNTPAVPVPTSPIAVSPPAIPVPAPADNRRRQRHLLDQHAEAEGVRQRTEPAEAQLSRAGERRLLPAVGRARRPRRRRVPLHRHQGQCPRHQAQRPRRPRSPPQPVRQDLPRRLHLPQLIHPSSLEPCITNHVSSSSYSSLVCMPSHPSLVHACTLTCSFLPGTAYKIVVDHCIPIGYLNAWFAYL

SEQ ID NO: 62335 - protein, 125 aa, Triticum aestivum
  peptide (1)..(125): Ceres Seq. ID no. 12587831
MAAGRTAAIHRPSQCQHHRSPCLRPPSQSLPPPTTGGGSGTCSINTLKLKVCANVLNLLKLNLAVLASDDCCPLLGGLADLDVAVCLYTAIKANVLGIKLNVPVDLVLLLNQCGKTCPADFTCPS

SEQ ID NO: 62336 - DNA, 1330 bp, Triticum aestivum
  misc_feature (1)..(1330): Ceres Seq. ID no. 15179743
agttttccccgtcggtctcctcccccagatccacatccacccatcgccatggcgatctccccccgcctcctcctcccgctcctcctcgcggcggcggccgcctccgccttcgccggcgccaacgacctggtcggcgagctccagtccctccgctcccgctcccccgccggcgtgatccacctcaccgacacctccgtcacccgcttcctctcctcgccggccccgcgcccctactccgtcctcgtcttcttcgacgccacctcgctccactccaagaccgacctccacctcccccagctccgccgcgagttcgcgctcctctccgcctccttccacgccaacaaccccgactcctccgacctcttcttcgccgacatcgagttctccgagtcgcagcactccttctcccagttcggcgtcaactccctcccccacgtccgcctcatccgcccggagcactcccgcctcgccgactcggagcagatggaccagtcccacttctcccgcctcgccgactccatggtcgagttcgtggaggcccgcaccggcctcgaggtcggccccatcgtccgcccgcctctcgtctcccgcaaccagatgatcctgctcggcctcttgttcctgatctccatcccgttcgggatcaagaggatcatggaaggggacaccctgcttcatgaccgcaagctttggatggccggggcgctgttcgtctacttcttcagcgtctcagggggcatgtacgggatcatcaggcatacgcccatgttcatcaccgaccgggaggatccaaacaagctcgtcttcttctaccagggctcagggatgcagctcggcgcagaggggtttgctgtcggtttcctgtacaccctcgtggggctgatgatagctgtggtgacacacttgctggtgaaggtggagagcctgcagacacagcgatttgcgatgctggcagtcatggccatcgggtggtgggcagtcaggaaggtgatttacctggataactggaagactgggtacggcattcataccttctggccgagtagctggaggtaaatgttgtctcaaccggcgatcgatgcttctttcctttggttgcagaggacgcggagtcatccagatcggccatactgagatagagcatcattttggttgtaacgtcgtactagcaagtttagcatttcaattctctggtgctttattgtggaatatagagaaccgagtcattttataccgaggattttaacttgcagtattacttgaacaatggtaaatcctagctgatatttgttttcaggcagtaaccccggccaaggatattaaccgtggg

SEQ ID NO: 62337 - protein, 351 aa, Triticum aestivum
  peptide (1)..(351): Ceres Seq. ID no. 15179744
SFPRRSPPPDPHPPIAMAISPRLLLPLLLAAAAASAFAGANDLVGELQSLRSRSPAGVIHLTDTSVTRFLSSPAPRPYSVLVFFDATSLHSKTDLHLPQLRREFALLSASFHANNPDSSDLFFADIEFSESQHSFSQFGVNSLPHVRLIRPEHSRLADSEQMDQSHFSRLADSMVEFVEARTGLEVGPIVRPPLVSRNQMILLGLLFLISIPFGIKRIMEGDTLLHDRKLWMAGALFVYFFSVSGGMYGIIRHTPMFITDREDPNKLVFFYQGSGMQLGAEGFAVGFLYTLVGLMIAVVTHLLVKVESLQTQRFAMLAVMAIGWWAVRKVIYLDNWKTGYGIHTFWPSSWR

SEQ ID NO: 62338 - protein, 335 aa, Triticum aestivum
  peptide (1)..(335): Ceres Seq. ID no. 15179745
MAISPRLLLPLLLAAAAASAFAGANDLVGELQSLRSRSPAGVIHLTDTSVTRFLSSPAPRPYSVLVFFDATSLHSKTDLHLPQLRREFALLSASFHANNPDSSDLFFADIEFSESQHSFSQFGVNSLPHVRLIRPEHSRLADSEQMDQSHFSRLADSMVEFVEARTGLEVGPIVRPPLVSRNQMILLGLLFLISIPFGIKRIMEGDTLLHDRKLWMAGALFVYFFSVSGGMYGIIRHTPMFITDREDPNKLVFFYQGSGMQLGAEGFAVGFLYTLVGLMIAVVTHLLVKVESLQTQRFAMLAVMAIGWWAVRKVIYLDNWKTGYGIHTFWPSSWR

SEQ ID NO: 62339 - protein, 225 aa, Triticum aestivum
  peptide (1)..(225): Ceres Seq. ID no. 15179746
FSPSVSSPRSTSTHRHGDLPPPPPPAPPRGGGRLRLRRRQRPGRRAPVPPLPLPRRRDPPHRHLRHPLPLLAGPAPLLRPRLLRRHLAPLQDRPPPPPAPPRVRAPLRLLPRQQPRLLRPLLRRHRVLRVAALLLPVRRQLPPPRPPHPPGALPPRRLGADGPVPLLPPRRLHGRVRGGPHRPRGRPHRPPASRLPQPDDPARPLVPDLHPVRDQEDHGRGHPAS

SEQ ID NO: 62340 - DNA, 726 bp, Triticum aestivum
  misc_feature (1)..(726): Ceres Seq. ID no. 12592975
aaatctaccaccgctctccctctcccggcctgcactcacaagcagcggcgaagccttctctgccttcctcctcctctctctttctgccatgaagccccctcacttcactggggaagcggcagccagcgcctcatgggctcacgaggtcaagcaggccctccgtgacaagctccggtggacacccgccgcgggcaccacgggcaccggcggccacggcgccgcgaggccgccgacggcctcctcggctgtgaccgccgagccggcggtgcagccggcccacggcgccgactgccggggcttggccgccgccgaggaccccatcaggagggtcatgttcttggccccctggggccacacataaacgagaaaagcaagtgcacgcacggccatgccttgtcttggccggatctgcaattgcacctcaacaaaaatatggactagtacgtatatatatgtggccgtatggaccatcaactgatgaacatgaactcatcaaggaccaattaaaaactgggactagatcgggagaagaagatgtggtgcttgaggtatttgttcatgtttctcttggagagatgcatgcatgcatggggagatctcgcctgacgggtttggtgcatatatatggcctatgggtgttgctgcctggccggttgaagctgcagctttgttgtagccatgaacctgttttttttgtttctctccagaaaatctgtaccaagagcc

SEQ ID NO: 62341 - protein, 119 aa, Triticum aestivum
  peptide (1)..(119): Ceres Seq. ID no. 12592976
NLPPLSLSRPALTSSGEAFSAFLLLSLSAMKPPHFTGEAAASASWAHEVKQALRDKLRWTPAAGTTGTGGHGAARPPTASSAVTAEPAVQPAHGADCRGLAAAEDPIRRVMFLAPWGHT

SEQ ID NO: 62342 - protein, 91 aa, Triticum aestivum
  peptide (1)..(91): Ceres Seq. ID no. 12592977
MWPYGPSTDEHELIKDQLKTGTRSGEEDVVLEVFVHVSLGEMHACMGRSRLTGLVHIYGLWVLLPGRLKLQLCCSHEPVFFVSLQKICTKS

SEQ ID NO: 62343 - protein, 90 aa, Triticum aestivum
  peptide (1)..(90): Ceres Seq. ID no. 12592978
MKPPHFTGEAAASASWAHEVKQALRDKLRWTPAAGTTGTGGHGAARPPTASSAVTAEPAVQPAHGADCRGLAAAEDPIRRVMFLAPWGHT

SEQ ID NO: 62344 - DNA, 986 bp, Triticum aestivum
  misc_feature (1)..(986): Ceres Seq. ID no. 14302449
aaaaatcgccttcgtctttccccgtcgtctccaccaacgccagtttttccccgtcgtctccaccaacgccagtccaaatccaaacccgaaggaggaagagaggctagctagctagggttccgcctcccgccggccggagagagggagagagaggatgacgacggcggcgcggccaacgtgggcgccagcgaagggcgggaacgagcagggcggcacgcgtatcttcgggccctccgggaagtactcctcccgcgacctcgccgcacacacctccctcaagcccagaaaagagggacaacaaactcaagaggaggtacagaagaggaatcttagggatgaacttgaggagcgtgaacgcaagcacttctcatccaaggataagtcctatgttgacgagagggaccggcgaaaaagttcaggcctgctcttagaaggttcaaaacgggatgaggataagatagttccacgtgaaattgatgcagatgactctgacgtggaactaaaaagtgatgatgaaagcgacgatgatgacgacgacgatgacactgaggcactaatggcagagcttgaaaggattaaaaaagaaagagccgaggacaggcttagaaaggagcgtcagcaagcagaagaagaggccaagatgaaggaggctgagctgatgcgaggaaacccactgatcaatatgaataattctggctccttcaatgtgaagagaaggtgggatgatgatgttgtattcaagaaccaggctcgtggagagactaagacaccgaaacggttcatcaatgacaccatcagaagtgatttccaccgcaagtttctgcataggtacatgaaatgatgctgctgtatgctttatgttgtctggacagtatgcatgctgaaagagcctgtgatgtttctgtattctgaagatcgatttgtatgacataactgtaacagctacgttatcttaatggtgatatgtttaccctgttcctaagagt

SEQ ID NO: 62345 - protein, 228 aa, Triticum aestivum; identical to SEQ ID NO: 55870
  peptide (1)..(228): Ceres Seq. ID no. 14302450

SEQ ID NO: 62346 - DNA, 1003 bp, Triticum aestivum
  misc_feature (1)..(1003): Ceres Seq. ID no. 15173911
gactttggcttgatcaagtaggtatatatacatatcctctgctgctcctcccccgcaaacgatcgacgggcctggccggcgcagcctgcgacgtccgagctcccgccgcgccgtctccggccatggggttccccctggtgtgctactgcgtcgccatccccaagccgatcatcgccttctgcaagctcgtcgccgccgtccgggacgccctcctcctgctgctctccctcgtcggcctctgccgctccccgcgccgctccgtccacgacgccccgctgcccgaggaggtcaaggagcgcctcccggccgtcgagttctccttgctggcgcgtccggcgcagcagcagcaggggtgccacgacggggacgccgcggcggcggcgacgtgcatcgtgtgcctggagcggctgcgggcggcggacgaggtgcggcggctgggcaactgcgcgcacgccttccaccgcggctgcatcgacgggtggatcgacctcggccggaccacctgcccgctgtgccgctcccacctactgccccgccccgcggagggacggcccgctcgccagcctcctcacgcgcgtttggtgacgaccaaccgcgccactcgttcgttagctccaaggccacgtctttccttgtcccagcgcggtggcggccgacacagagattcgcgatctcgaccggctgcacgtatatttattgtgggtttacatcgtctcaaaatcgggattttatttagtaatttagtttagggcgccactttgtatagccatccaatcacgaggtcaccaataggtgcacaagcatagttttttttttccgtagagaaggattagtcggtcaaatatatgcgtggtcgtgtttggctagtggatctgaaatgtcaacagctcgagaacgcatgtcgctgttcgacttgtccaatcccactcgtgggactacgacgtacagttgtagtataactcatacttgattcttcatatcaaattgatgattgtttgctgcc

SEQ ID NO: 62347 - protein, 248 aa, Triticum aestivum
  peptide (1)..(248): Ceres Seq. ID no. 15173912
LWLDQVGIYTYPLLLLPRKRSTGLAGAACDVRAPAAPSPAMGFPLVCYCVAIPKPIIAFCKLVAAVRDALLLLLSLVGLCRSPRRSVHDAPLPEEVKERLPAVEFSLLARPAQQQQGCHDGDAAAAATCIVCLERLRAADEVRRLGNCAHAFHRGCIDGWIDLGRTTCPLCRSHLLPRPAEGRPARQPPHARLVTTNRATRSLAPRPRLSLSQRGGGRHRDSRSRPAARIFIVGLHRLKIGILFSNLV

SEQ ID NO: 62348 - protein, 208 aa, Triticum aestivum
  peptide (1)..(208): Ceres Seq. ID no. 15173913
MGFPLVCYCVAIPKPIIAFCKLVAAVRDALLLLLSLVGLCRSPRRSVHDAPLPEEVKERLPAVEFSLLARPAQQQQGCHDGDAAAAATCIVCLERLRAADEVRRLGNCAHAFHRGCIDGWIDLGRTTCPLCRSHLLPRPAEGRPARQPPHARLVTTNRATRSLAPRPRLSLSQRGGGRHRDSRSRPAARIFIVGLHRLKIGILFSNLV

SEQ ID NO: 62349 - DNA, 1191 bp, Triticum aestivum
  misc_feature (1)..(1191): Ceres Seq. ID no. 12625265
gattccccacagccaaaaagagagaaaacatcggaagaggacgggagagggaggaaatttggagtcgagggggcaggagaaggggagagcagagaagcttggagggcggagcgcgtcggcgatggacggcgagtggtggaggaagaagtgggtggcgtgggcggcggcggcggccatcttcgtggtgctcatgctcgtcacgcccgccatcccgcaggacgaggactaccacgacttcgccgaccagcgcgacctcttcctagggatccctaacacattgaatgtgctctcaaatatccctttcctctttgttggtctcgctgggctcatcctgtgccactacaaaaactacttcaggctatgctcacagggggagctctggagttggacactcttctatgctggtgtcactactgtcggtgttggttcatcctactaccatctctacccaaacgatgccaccttagtttgggacagattgcctatgacgattgctttcacgtctattgtggccattttcatcattgaaagggttgatgatagagcaggaacaaagtcccttgcaccccttgttattgctggtgcactgagcatcctgtactggagtttctttgatgatcttcggccatatgcaataatccagttcgttccatgcattgtaatacctgtgatggctatagttattccaccaatgtatacacattcaagctactggttgtgggcagcaggattttaccttcttgccaaagtggaagaggctgcggacaaacctatatataggtggacacatgacattgttagcggacacactcttaaacatctatgtgctgcgatggtacctgttttcttgactctcatgttggcaaagaggacaattgaacctgatagggtaagcttactccagatgtggaagatcagttggagagaacgtggttcccaagatagcaacactgtagacgtcaaatatgattatgctgcagtttcaactacgtctgaacaacagtagatatgtgttcttcatatgtactctactcccgaagtgtaaaaatagcatcgatctgaatatcaggagccccagcttgcacggttgtgtatcattgcctgctaatcaacgttcgtatgttgttgttcctgatcaaaacttcctgatcatatcttgtacaggaaggaaaaatatatattagttccctt

SEQ ID NO: 62350 - protein, 334 aa, Triticum aestivum
  peptide (1)..(334): Ceres Seq. ID no. 12625266
IPHSQKERKHRKRTGEGGNLESRGQEKGRAEKLGGRSASAMDGEWWRKKWVAWAAAAAIFVVLMLVTPAIPQDEDYHDFADQRDLFLGIPNTLNVLSNIPFLFVGLAGLILCHYKNYFRLCSQGELWSWTLFYAGVTTVGVGSSYYHLYPNDATLVWDRLPMTIAFTSIVAIFIIERVDDRAGTKSLAPLVIAGALSILYWSFFDDLRPYAIIQFVPCIVIPVMAIVIPPMYTHSSYWLWAAGFYLLAKVEEAADKPIYRWTHDIVSGHTLKHLCAAMVPVFLTLMLAKRTIEPDRVSLLQMWKISWRERGSQDSNTVDVKYDYAAVSTTSEQQ

SEQ ID NO: 62351 - protein, 294 aa, Triticum aestivum
  peptide (1)..(294): Ceres Seq. ID no. 12625267
MDGEWWRKKWVAWAAAAAIFVVLMLVTPAIPQDEDYHDFADQRDLFLGIPNTLNVLSNIPFLFVGLAGLILCHYKNYFRLCSQGELWSWTLFYAGVTTVGVGSSYYHLYPNDATLVWDRLPMTIAFTSIVAIFIIERVDDRAGTKSLAPLVIAGALSILYWSFFDDLRPYAIIQFVPCIVIPVMAIVIPPMYTHSSYWLWAAGFYLLAKVEEAADKPIYRWTHDIVSGHTLKHLCAAMVPVFLTLMLAKRTIEPDRVSLLQMWKISWRERGSQDSNTVDVKYDYAAVSTTSEQQ

SEQ ID NO: 62352 - protein, 271 aa, Triticum aestivum
  peptide (1)..(271): Ceres Seq. ID no. 12625268
MLVTPAIPQDEDYHDFADQRDLFLGIPNTLNVLSNIPFLFVGLAGLILCHYKNYFRLCSQGELWSWTLFYAGVTTVGVGSSYYHLYPNDATLVWDRLPMTIAFTSIVAIFIIERVDDRAGTKSLAPLVIAGALSILYWSFFDDLRPYAIIQFVPCIVIPVMAIVIPPMYTHSSYWLWAAGFYLLAKVEEAADKPIYRWTHDIVSGHTLKHLCAAMVPVFLTLMLAKRTIEPDRVSLLQMWKISWRERGSQDSNTVDVKYDYAAVSTTSEQQ

SEQ ID NO: 62353 - DNA, 587 bp, Triticum aestivum
  misc_feature (1)..(587): Ceres Seq. ID no. 13596922
agaacatcctaatcgaaaaactcctccacactcttaagctaagctaagcaagccagcatctcgatctactcttcctccagcaatggcgtcgtccaggagagccctcatcctgctggccgtcgtgctggcggcggtgccggcggcgctgagccagaagacgacggccccggcgcccgaggcggcgcccgagacgccggaggcgcctgcggcggggacgacgcccaaggcggcggcggcgccgaacgtgacggcggtgctggagaaggccgggcagtacaccaagttcatccggctgatggcgtcgacgcagcaggacacgcagctgaacgcgcaggccaacgactcggacacgggcttcacggtgttcgcccccaccgacagcgccttcaacagcctcaagccgggcaccctcaactcgctctcgcagcaggaccaggtgacgctggtgcaggcccacatcgtccccaccttctactccatggagtccttcgagaccgccagcaaccccgtccgcacccaggcctccggcaccgacgggccctgcaccgtcaacgtcaccgccaccagcaacagcgccgtcaacgtct

SEQ ID NO: 62354 - protein, 168 aa, Triticum aestivum
  peptide (1)..(168): Ceres Seq. ID no. 13596923
MASSRRALILLAVVLAAVPAALSQKTTAPAPEAAPETPEAPAAGTTPKAAAAPNVTAVLEKAGQYTKFIRLMASTQQDTQLNAQANDSDTGFTVFAPTDSAFNSLKPGTLNSLSQQDQVTLVQAHIVPTFYSMESFETASNPVRTQASGTDGPCTVNVTATSNSAVNV

SEQ ID NO: 62355 - protein, 97 aa, Triticum aestivum
  peptide (1)..(97): Ceres Seq. ID no. 13596924
MASTQQDTQLNAQANDSDTGFTVFAPTDSAFNSLKPGTLNSLSQQDQVTLVQAHIVPTFYSMESFETASNPVRTQASGTDGPCTVNVTATSNSAVNV

SEQ ID NO: 62356 - DNA, 952 bp, Triticum aestivum
  misc_feature (1)..(952): Ceres Seq. ID no. 15173907
gaaagacaaaaaccttgaggacttggctgcctagctatacttactaggcgtactctgaaattgaaatggagactccttctctgctttttctcaccaccttgttggcctttgcattcaaggcctccgttgctcaatggacgcctgcatatgcaacattctacggcggcagcgacgcgtcagacaccatgggtggtgcgtgcgggtacgggaacttgtacaatgctgggtacggggttaattcagccgcgttgagcacggcgctcttcaacaacggcgcatcatgcggcatgtgcttcactatcacctgcgacgctagcaagacgcagtcgtgcaaacagggcacgtccatcaccatcacggccaccaacttctgcccgcccaactacgccctggccagcgacaacggcggatggtgcaacccgccgcggcagcacttcgacatgtcgcaacccgcgtgggagaccatcgctgtctaccaagccggcattgtgcccgtcaactacaggagggttccctgccagaggagtgggggcatgaggttcaccattaacgggaacgactactttgagctcgtgacggtggcaaatgtcgccggtagcggcgtggtgtcccaaatgtggataaaggggtccaagaccgactggatggtaatgagcaggaactggggtgccagctggcagagcaatgcttacctcaacggccagagcttgtccttcaaggtacagaccgacgacggccgggtcgtcacggccgacaatgttgcgccatacaactggtggttcggtggcacctacacttcgtggcagcagttctaacatcttgcgaggttgatgatttcatttgtgggtactcaaataaacaggcccgatgatttcatccgaggctatatctcctattttgtttctttgtatctatgttttgcttgtccaagtttgtgtacttagcttgcctc

SEQ ID NO: 62357 - protein, 249 aa, Triticum aestivum
  peptide (1)..(249): Ceres Seq. ID no. 15173908
METPSLLFLTTLLAFAFKASVAQWTPAYATFYGGSDASDTMGGACGYGNLYNAGYGVNSAALSTALFNNGASCGMCFTITCDASKTQSCKQGTSITITATNFCPPNYALASDNGGWCNPPRQHFDMSQPAWETIAVYQAGIVPVNYRRVPCQRSGGMRFTINGNDYFELVTVANVAGSGVVSQMWIKGSKTDWMVMSRNWGASWQSNAYLNGQSLSFKVQTDDGRVVTADNVAPYNWWFGGTYTSWQQF

SEQ ID NO: 62358 - protein, 209 aa, Triticum aestivum
  peptide (1)..(209): Ceres Seq. ID no. 15173909
MGGACGYGNLYNAGYGVNSAALSTALFNNGASCGMCFTITCDASKTQSCKQGTSITITATNFCPPNYALASDNGGWCNPPRQHFDMSQPAWETIAVYQAGIVPVNYRRVPCQRSGGMRFTINGNDYFELVTVANVAGSGVVSQMWIKGSKTDWMVMSRNWGASWQSNAYLNGQSLSFKVQTDDGRVVTADNVAPYNWWFGGTYTSWQQF

SEQ ID NO: 62359 - protein, 175 aa, Triticum aestivum
  peptide (1)..(175): Ceres Seq. ID no. 15173910
MCFTITCDASKTQSCKQGTSITITATNFCPPNYALASDNGGWCNPPRQHFDMSQPAWETIAVYQAGIVPVNYRRVPCQRSGGMRFTINGNDYFELVTVANVAGSGVVSQMWIKGSKTDWMVMSRNWGASWQSNAYLNGQSLSFKVQTDDGRVVTADNVAPYNWWFGGTYTSWQQF

SEQ ID NO: 62360 - DNA, 1403 bp, Triticum aestivum
  misc_feature (1)..(1403): Ceres Seq. ID no. 13596780
cgaaaaaaaatagatcatggcgacccctcagatctaccgcaaaaccctcctccccgtcctcctcctgctcgccgccgcggcgctctacccagccgccgccgacggcgacgaggtgctcgccctcacggagtccaccttcgagaaggaggtcggccaggatcgtggcgcgctcgtcgagttctacgctccctggtgtggccactgcaagaagcttgctccagaatatgagaagcttgctgcaagttttaaaaaggctaaatcagtcttgattgccaaggttgactgcgatgagcacaagagtgtgtgcagcaagtatggagtttctggctaccccacaatccagtggtttcccaaaggttccttggagcccaagaagtatgagggtcaacgcactgctgaagcccttacagaatatgttaactctgaagcagcaaccaatgtgaagatagcagcagttccttcaagtgttgtggttctgaccgaggaaacctttgactcagttgtccttgatgaaaccaaagatgtccttgttgagttctatgccccatggtgtggtcactgcaagagtcttgctccgatatatgagaaggtggcctctgttttcaagcaagatgagggtgtcgtgattgctaatcttgatgctgacaaatacacaagcttggctgagaagtatggagtttctggttttcccacattgaagttcttcccgaagggtaacaaagctggtgaagagtatgagagcggtcgggagttggatgactttgttaagttcattaatgagaaaagtggaactagccgtgattcgaagggtcagcttacttcagaggctgggcttgtggcaagtttggatgctcttgtcaaggaattccacagtgctgctgatgacaagcggaaggaaatcctctctaaaattgaagaggaggctgcgaagctcagtggtcctgctgtcaagcacggaaagatctatgtgaatgttgcaaagaagatattgcagaagggctctgactataccaagaaggaaactgagaggcttcatcgcttgttggagaagtcgatcagtccttccaaagccgatgaattcgccatcaagaagaacattctttcagccttctcctcttagtggtggtgacccacgtgccatagtcagtagtgcaacagtaccacctgccacaagagagaagtgaagaaagacaaagagagatagagatcagagagatggcagtgaaagtttagcggcgatagatttatcttattttggttcaatgttgaacaacatctgatatctgttttctctgccgtttacctttatggttacagggatttactttagcagtaaaagggtttactcaagaacaaacagtaccaactggtaatgacattaataaatttgccatttgtgtttg

SEQ ID NO: 62361 - protein, 367 aa, Triticum aestivum
  peptide (1)..(367): Ceres Seq. ID no. 13596781
MATPQIYRKTLLPVLLLLAAAALYPAAADGDEVLALTESTFEKEVGQDRGALVEFYAPWCGHCKKLAPEYEKLAASFKKAKSVLIAKVDCDEHKSVCSKYGVSGYPTIQWFPKGSLEPKKYEGQRTAEALTEYVNSEAATNVKIAAVPSSVVVLTEETFDSVVLDETKDVLVEFYAPWCGHCKSLAPIYEKVASVFKQDEGVVIANLDADKYTSLAEKYGVSGFPTLKFFPKGNKAGEEYESGRELDDFVKFINEKSGTSRDSKGQLTSEAGLVASLDALVKEFHSAADDKRKEILSKIEEEAAKLSGPAVKHGKIYVNVAKKILQKGSDYTKKETERLHRLLEKSISPSKADEFAIKKNILSAFSS

SEQ ID NO: 62362 - DNA, 1394 bp, Triticum aestivum
  misc_feature (1)..(1394): Ceres Seq. ID no. 14301576
actcttctcgtaacttccacactcgtgtccctttctttcctccccgtcgcttccgcagatcaaaattcaaaaccctagcgaactcctccgcaagcacgtgatcgaccggccatggcttccgccctcggagcccaggtggctgccgtggcgccgattggttcggatggtcgccactacaggagttgttcttcgctcaagggtaataactcccgcaataagtcatggactggaaaattagcatgggaaaacaagaccctgcaaccaagacatacgaagaaggtcttttgtatgtccgtgcaacaagcaagcaaaagtaaatgtaaagttgctattaaacctctggaactggagaatacaaaggagccacccctcaacttgtacaaaccaaagggaccctacacagcctcaattgtctccgttgagagaattgtaggtcctaaagctcctggtgaaacatgtcacattgtcattgaccatggtggtaatgtcccatactgggaaggacaaagttatggtgtcattcctccaggagagaacccaaagaaacctggggccccaaataccgtccgactctattctattgcgtctactaggtatggcgattcttttgatggaaggactgctagtctttgtgtgcgccgtgctgtttattatgatcctgaaactggaaaagaagatccttcaaagaagggtatctgcagtaacttcttgtgtgactcaaaaccaggtgacaaaattcagatcacaggcccctcaggcaaaataatgcttctgcctgaggatgacccaaacgcaactcatatcatgattggaactggcacgggtgttgctcctttccgtggctacctacgtcgtatgttcatggaagatgtcccatctttcaagtttggtggtctggcttggctctttcttggtgttgccaatactgacagcctgctctatgacgaagagttcacaaactaccttcagcagtatccagaaaatttcaggtatgacaaagcactaagccgggagcagaaaaacaagagcggtggcaagatgtatgtgcaggacaggatcgaggagtacagtgatgaaatcttcaagcttttggatgatggtgcacacatctacttctgtggtttgaaggggatgatgctagggattcaggacacactcaagagagtagctgagcaaagaggtgagagttgggatcagaagctgtcacagctgaaaaagaacaagcaatggcacgtcgaggtttactaggttacaatggctgagattgttaattattgtttcccggggagatggaaaacagaaagataagtaggtcattctcttcccattgtaaaattgtcaatattattcatacgcgtgtgcgtcgcatgattaataaaacaatgtgcaattac

SEQ ID NO: 62363 - protein, 378 aa, Triticum aestivum
  peptide (1)..(378): Ceres Seq. ID no. 14301577
MASALGAQVAAVAPIGSDGRHYRSCSSLKGNNSRNKSWTGKLAWENKTLQPRHTKKVFCMSVQQASKSKCKVAIKPLELENTKEPPLNLYKPKGPYTASIVSVERIVGPKAPGETCHIVIDHGGNVPYWEGQSYGVIPPGENPKKPGAPNTVRLYSIASTRYGDSFDGRTASLCVRRAVYYDPETGKEDPSKKGICSNFLCDSKPGDKIQITGPSGKIMLLPEDDPNATHIMIGTGTGVAPFRGYLRRMFMEDVPSFKFGGLAWLFLGVANTDSLLYDEEFTNYLQQYPENFRYDKALSREQKNKSGGKMYVQDRIEEYSDEIFKLLDDGAHIYFCGLKGMMLGIQDTLKRVAEQRGESWDQKLSQLKKNKQWHVEVY

SEQ ID NO: 62364 - protein, 319 aa, Triticum aestivum
  peptide (1)..(319): Ceres Seq. ID no. 14301578
MSVQQASKSKCKVAIKPLELENTKEPPLNLYKPKGPYTASIVSVERIVGPKAPGETCHIVIDHGGNVPYWEGQSYGVIPPGENPKKPGAPNTVRLYSIASTRYGDSFDGRTASLCVRRAVYYDPETGKEDPSKKGICSNFLCDSKPGDKIQITGPSGKIMLLPEDDPNATHIMIGTGTGVAPFRGYLRRMFMEDVPSFKFGGLAWLFLGVANTDSLLYDEEFTNYLQQYPENFRYDKALSREQKNKSGGKMYVQDRIEEYSDEIFKLLDDGAHIYFCGLKGMMLGIQDTLKRVAEQRGESWDQKLSQLKKNKQWHVEVY

SEQ ID NO: 62365 - DNA, 1282 bp, Triticum aestivum
  misc_feature (1)..(1282): Ceres Seq. ID no. 14302303
aacccaaacggcacgcccaaacccaaagccaagtcgcactcctcctcctatcctcttcctcgccgaggcggcgaccggccagcgccgcagcagcaaccccggccgccgccagctccacctccaccgcccgcgcgtctccgattcggcgaatttggggctgaggaaagaggaggagcgacttctctctgctctggtggttgcaacttcaggacaaggttttgagcttttgtctgtttccctgggatggatgccaagaagttcctgcagatggtcgaagacaagaagaagagactccttgagaagaaggaagccccactgaaatggcagcagaaactggaagcggcaattaaggccactgaagagaaggagaagaagctcaagtcaaaaaagcacaggaggcgaagctattcttcctcagagtctgacagtgaatccgagagcgacagtgatcggaaacacaggaagaggaaggaccgcaaaaggcacaggaaacatggccactctgactctgatggtgccaggaggcgcaagcacaggtcaaagaggaggagcttggactctagtgatgagagcgacagtgatgaatatgatagcgaatctgaagaagagcgcccaaggaagaagcactcgcacaggaggaagcatcaccgacactctccaaggtcagagtctgatgcttcagattacagcagcgatgatgatgagcggagatcaaccaggaaggaccacacaaggagccgcaggcgtcgccaccgatcattagacgatgaatctgaggacaagatcaggtcgaggcataggaagcgtcacagatcaagtgacgaggacaagccatcagattctgacatccataagcgtcacaggagccgctctatgtccttggatgatggtgctgctggtgagccagacaagatgaatgatggtaaggggtctcacaaaagccggcaccaccgccgccatcaccatcaccatcatgatcaccatggcaactctgctgaacccagtgacgggaagcaactcgtgtaagttgttaatgcctcagaacctgattggcgtcatcactgggctctgtgacgggaaggtttgccccagttggctagttgctgaatgaaagcatgtatctttcataatgttactgtctcggctctgctgcgacttctgaagcctgtacttgttgtactgaaaaatttggcgacaccagatgttatttccagcatttcctctgttgagacatggcttggttgctgatttggtggttaaacatgcctgtttcatttgctgc

SEQ ID NO: 62366 - protein, 260 aa, Triticum aestivum
  peptide (1)..(260): Ceres Seq. ID no. 14302304
MDAKKFLQMVEDKKKRLLEKKEAPLKWQQKLEAAIKATEEKEKKLKSKKHRRRSYSSSESDSESESDSDRKHRKRKDRKRHRKHGHSDSDGARRRKHRSKRRSLDSSDESDSDEYDSESEEERPRKKHSHRRKHHRHSPRSESDASDYSSDDDERRSTRKDHTRSRRRRHRSLDDESEDKIRSRHRKRHRSSDEDKPSDSDIHKRHRSRSMSLDDGAAGEPDKMNDGKGSHKSRHHRRHHHHHHDHHGNSAEPSDGKQLV

SEQ ID NO: 62367 - protein, 252 aa, Triticum aestivum
  peptide (1)..(252): Ceres Seq. ID no. 14302305
MVEDKKKRLLEKKEAPLKWQQKLEAAIKATEEKEKKLKSKKHRRRSYSSSESDSESESDSDRKHRKRKDRKRHRKHGHSDSDGARRRKHRSKRRSLDSSDESDSDEYDSESEEERPRKKHSHRRKHHRHSPRSESDASDYSSDDDERRSTRKDHTRSRRRRHRSLDDESEDKIRSRHRKRHRSSDEDKPSDSDIHKRHRSRSMSLDDGAAGEPDKMNDGKGSHKSRHHRRHHHHHHDHHGNSAEPSDGKQLV

SEQ ID NO: 62368 - DNA, 1628 bp, Triticum aestivum
  misc_feature (1)..(1628): Ceres Seq. ID no. 13596921
aaagaaattctcgccccccaacccaacccccaaccaaccaaccaaacccaaccgaagaagccgagccgaaccccactccgccgatcagccgctatgcgctgaggccgaatcgccgcagcccgaggaggagaagggggtggaggggatggaggggagtggcgggtccgcgtcgctgccgccgttcctcaccaagacgtacgagatggtggacgagccggccacggacgcggtggtggcgtggacgccgtccggcaccagcttcgtcgtcctcagccaggccgacttctgccgggatcttctccccaagtacttcaagcacaacaacttctccagcttcgtgcgccagctcaacacctacggctttaggaaggtagatccagaacaatgggaatttgcaaatgaagaattcctacgagatcagcggcatcggttgaaaaatatccatagacgcaagccaatattcagccattcatcacacactcagggtgccggaccattagctgatagtgaaaggagggactatgaggaggaaattgagaggctcaagtgtgataatgcatcactaaatttacagcttgagaggaagaaaactgatatggagagtaaaatgaaggctttggaagacaaactatttgctattgaggatcagcagaaaaatcttatatcttatgtcagagaaattgtgaatgcacctggatttctttctagcttcgtagaacaatctgatcatcatggaaagaagaggagactgcctaaaccaatttcattccatgatgatgcttgtactcaggggaaccagattatgcattgtgacttggtcaactcaccagctcatgaactttttaggtcatcatttgacaaaatggaatcatccttaaattccttggagaatttcttcaaagaagcgagtgaggcatttggtaatgatgtttcatctgatggtgatgtcccaggtcattcttcagctgttgttcttacagagctccattcaactggggagagtgacccccacgcgcaatcacctccgtccatgatgcatacttgttcagctggtgtaggagattcacactcttctcgtgatatagcagagtccgccagctgtccagagagtcctctgcttccccaagctcattctcgtgcagattcacgagctaaggtctccgagatagatgtcaatttagaacctgctgttacagaaaatggtccatcgagagatcaacaacccacccaagaccttcctgctgacgcaaatgatggattttggcagcagtttcttaccgagcagcctgggttgacccatgcacaccaggaggcccaatcagaacggcgagacagagaagcaaatcaaacaacagcaggagaccgcggaagtttttggttggacaagagcagcatcgaacagatgacaaaaaaactggggcatctcacctcagctgagaaaacctgagtatgtatttctcatttcttgtagctgaaaatgaccagtacagaaacattaggaccatggcacctcccagtgaggtatgcctgctaacatttactttgcagtgtatcagaattgtgtgtgttagattgttgcagactatgtgctatatactaccttgatatacgttcatactttgttagcg

SEQ ID NO: 62369 - protein, 481 aa, Triticum aestivum
  peptide (1)..(481): Ceres Seq. ID no. 15222003
KKFSPPNPTPNQPTKPNRRSRAEPHSADQPLCAEAESPQPEEEKGVEGMEGSGGSASLPPFLTKTYEMVDEPATDAVVAWTPSGTSFVVLSQADFCRDLLPKYFKHNNFSSFVRQLNTYGFRKVDPEQWEFANEEFLRDQRHRLKNIHRRKPIFSHSSHTQGAGPLADSERRDYEEEIERLKCDNASLNLQLERKKTDMESKMKALEDKLFAIEDQQKNLISYVREIVNAPGFLSSFVEQSDHHGKKRRLPKPISFHDDACTQGNQIMHCDLVNSPAHELFRSSFDKMESSLNSLENFFKEASEAFGNDVSSDGDVPGHSSAVVLTELHSTGESDPHAQSPPSMMHTCSAGVGDSHSSRDIAESASCPESPLLPQAHSRADSRAKVSEIDVNLEPAVTENGPSRDQQPTQDLPADANDGFWQQFLTEQPGLTHAHQEAQSERRDREANQTTAGDRGSFWLDKSSIEQMTKKLGHLTSAEKT

SEQ ID NO: 62370 - protein, 433 aa, Triticum aestivum
  peptide (1)..(433): Ceres Seq. ID no. 15222004
MEGSGGSASLPPFLTKTYEMVDEPATDAVVAWTPSGTSFVVLSQADFCRDLLPKYFKHNNFSSFVRQLNTYGFRKVDPEQWEFANEEFLRDQRHRLKNIHRRKPIFSHSSHTQGAGPLADSERRDYEEEIERLKCDNASLNLQLERKKTDMESKMKALEDKLFAIEDQQKNLISYVREIVNAPGFLSSFVEQSDHHGKKRRLPKPISFHDDACTQGNQIMHCDLVNSPAHELFRSSFDKMESSLNSLENFFKEASEAFGNDVSSDGDVPGHSSAVVLTELHSTGESDPHAQSPPSMMHTCSAGVGDSHSSRDIAESASCPESPLLPQAHSRADSRAKVSEIDVNLEPAVTENGPSRDQQPTQDLPADANDGFWQQFLTEQPGLTHAHQEAQSERRDREANQTTAGDRGSFWLDKSSIEQMTKKLGHLTSAEKT

SEQ ID NO: 62371 - protein, 414 aa, Triticum aestivum
  peptide (1)..(414): Ceres Seq. ID no. 15222005
MVDEPATDAVVAWTPSGTSFVVLSQADFCRDLLPKYFKHNNFSSFVRQLNTYGFRKVDPEQWEFANEEFLRDQRHRLKNIHRRKPIFSHSSHTQGAGPLADSERRDYEEEIERLKCDNASLNLQLERKKTDMESKMKALEDKLFAIEDQQKNLISYVREIVNAPGFLSSFVEQSDHHGKKRRLPKPISFHDDACTQGNQIMHCDLVNSPAHELFRSSFDKMESSLNSLENFFKEASEAFGNDVSSDGDVPGHSSAVVLTELHSTGESDPHAQSPPSMMHTCSAGVGDSHSSRDIAESASCPESPLLPQAHSRADSRAKVSEIDVNLEPAVTENGPSRDQQPTQDLPADANDGFWQQFLTEQPGLTHAHQEAQSERRDREANQTTAGDRGSFWLDKSSIEQMTKKLGHLTSAEKT

SEQ ID NO: 62372 - DNA, 1488 bp, Triticum aestivum
  misc_feature (1)..(1488): Ceres Seq. ID no. 13596541
gtggattttttagcgtgcattccctcgaacgagctcagtagagccagcctcgccggtctaggctgaatcggtaatgtaaccaaccacgccctaaacgagcaggcggaaagggtggttcagttgcgttcgctcgattgatccaaaaaaaaaagttgcgttcgctcgatcgagcagcagggaaacaagccatggagagctcgccgcccaccatcaccgtccaggtgaagttcgccggccgaaccattccggtggaactcccgacatccgcctccaccgcggagctgaagctcctcctccagccgctaaccaacgttcttccccgcggccagaaactcatctgcaaaggaaaagttcttgccgacgccgcgagtctgagctcgatgcaggttggggacagatccaaggtcatgctcatcgcttcgcagggtcttcatcagggggaaggccccatcactaagaatagcagtggtcttgcagcaagtgcaaaaagaacctcaaatgttaaggataatcaaacactaaaaccggagattatcagcaaaagccgagcggagcgttggaaaataacaggtgtcattgctttatctggttccagcttgaaggcagtgcctgaggaagtctgggactgtggctcctccatacgagtactagatgtctgtaacaacttaattgaagcaattccacagaaaattgctgcccttaaatcattaaataaattgttgctaaccgccaatgacatatctgatgggggcatcagctgggaaggtctatcatgtgttgatacattaacagttttatctttaagccaaaatcgattggtcactttacctccgagtttgggcacattgacttttctacgtgaacttcgcattgcaaataacatgcttggcagcctacctgttgaaataggtttgctgaagcagctagagattcttatagcaaataataataggataacttcgctgccttcctctataggcgattgtgaatctctctttgaggtggacttatcatcaaatcttttagccgaactaccaaaggcttgcggaaaccttcacaatctgaagactctgcatctaaggaacaatggccttaattccctaccgccaactttattcaagaagtgctggcggcttactacacttgatctccatggcactggaatcacaaatgacattcttcgacagatggagggctgggaggagtttgatgaacgtaggcggcagaagtatcaaaagcagctggattttcgtgtgggatcatcaggtgttttcgacgagggtgcggatgatgataaccggcatgcataagtgtttcttattacagacagggttttgcgcttccaatattgtcccagaattattctagaattgaacacagacacggagctgatattattcctcacattttggttgtgtatttgtttattcctctcatttcattacattttagtgccaagtgatgaaaagtggtggctacctgttaaac

SEQ ID NO: 62373 - protein, 373 aa, Triticum aestivum
  peptide (1)..(373): Ceres Seq. ID no. 15221917
MESSPPTITVQVKFAGRTIPVELPTSASTAELKLLLQPLTNVLPRGQKLICKGKVLADAASLSSMQVGDRSKVMLIASQGLHQGEGPITKNSSGLAASAKRTSNVKDNQTLKPEIISKSRAERWKITGVIALSGSSLKAVPEEVWDCGSSIRVLDVCNNLIEAIPQKIAALKSLNKLLLTANDISDGGISWEGLSCVDTLTVLSLSQNRLVTLPPSLGTLTFLRELRIANNMLGSLPVEIGLLKQLEILIANNNRITSLPSSIGDCESLFEVDLSSNLLAELPKACGNLHNLKTLHLRNNGLNSLPPTLFKKCWRLTTLDLHGTGITNDILRQMEGWEEFDERRRQKYQKQLDFRVGSSGVFDEGADDDNRHA

SEQ ID NO: 62374 - protein, 309 aa, Triticum aestivum
  peptide (1)..(309): Ceres Seq. ID no. 15221918
MQVGDRSKVMLIASQGLHQGEGPITKNSSGLAASAKRTSNVKDNQTLKPEIISKSRAERWKITGVIALSGSSLKAVPEEVWDCGSSIRVLDVCNNLIEAIPQKIAALKSLNKLLLTANDISDGGISWEGLSCVDTLTVLSLSQNRLVTLPPSLGTLTFLRELRIANNMLGSLPVEIGLLKQLEILIANNNRITSLPSSIGDCESLFEVDLSSNLLAELPKACGNLHNLKTLHLRNNGLNSLPPTLFKKCWRLTTLDLHGTGITNDILRQMEGWEEFDERRRQKYQKQLDFRVGSSGVFDEGADDDNRHA

SEQ ID NO: 62375 - protein, 300 aa, Triticum aestivum
  peptide (1)..(300): Ceres Seq. ID no. 15221919
MLIASQGLHQGEGPITKNSSGLAASAKRTSNVKDNQTLKPEIISKSRAERWKITGVIALSGSSLKAVPEEVWDCGSSIRVLDVCNNLIEAIPQKIAALKSLNKLLLTANDISDGGISWEGLSCVDTLTVLSLSQNRLVTLPPSLGTLTFLRELRIANNMLGSLPVEIGLLKQLEILIANNNRITSLPSSIGDCESLFEVDLSSNLLAELPKACGNLHNLKTLHLRNNGLNSLPPTLFKKCWRLTTLDLHGTGITNDILRQMEGWEEFDERRRQKYQKQLDFRVGSSGVFDEGADDDNRHA

SEQ ID NO: 62376 - DNA, 1020 bp, Triticum aestivum
  misc_feature (1)..(1020): Ceres Seq. ID no. 15175438
agctcaccaccaccttcactctccatgctcgcagcaagccagctagctcctcgcctcctctcgtcacactactactagcagcttctcttctcttctctttaagtaacagagagcccaagctaggtgacactagagcgtctcaagcacccgcgccatggccacctccaccttctcgctcttcttcccgccgctgcccagcagcaaaggccagtggccgtctgtagaggaggctgcctactcctacgatgaccacagctccgtcaccaccctctccccttcctccccggcctcctctgcttcctcgggatccctggtggactgcacgctctccctcggcacgccgtcgacgcgccgccccgagccagaccgtactaggcacggggctccgccgcaggcctacccgtccgtgtctgccggggccgagccctgctactaccaccagcagcagggcaggggcggcgccgccgggcacgagcagctcctggaccgccgctgcgccaactgcggcacggcgtccacgccgctctggcggaacggccctcgcggacccaagtccctctgcaacgcctgcggcatcaggttcaagaaggaggagcgccgcgcggcggagaccaatgccggcggcgggtgcggctacgtcgcgcagcgggcgcacgtgtcggcccctcgtgccgtgccgtacgcggaggaggcgcttccttacgccggcgccgtcgacgcgcccttcctggcgtggcggctgaacggcgtcccgccggccccggcgttctcgtcgtggcccgacaggcagcacggcgtgtaccagtacaactagctagtagtactagtgagtagtacgtgtaggtacgtgttagggcatggaacgcggttggtgggcgctgcaacgtttttttggggatcttgttggggacgtacggttgcacgcggccggtgggatatgcatgtgcagtagtagcactgtattttgtctgacattatcgttgagcaagcctgccaaacatatgaattatgaagtagtac

SEQ ID NO: 62377 - protein, 219 aa, Triticum aestivum
  peptide (1)..(219): Ceres Seq. ID no. 15175439
MATSTFSLFFPPLPSSKGQWPSVEEAAYSYDDHSSVTTLSPSSPASSASSGSLVDCTLSLGTPSTRRPEPDRTRHGAPPQAYPSVSAGAEPCYYHQQQGRGGAAGHEQLLDRRCANCGTASTPLWRNGPRGPKSLCNACGIRFKKEERRAAETNAGGGCGYVAQRAHVSAPRAVPYAEEALPYAGAVDAPFLAWRLNGVPPAPAFSSWPDRQHGVYQYN

SEQ ID NO: 62378 - protein, 165 aa, Triticum aestivum
  peptide (1)..(165): Ceres Seq. ID no. 15175440
MTTAPSPPSPLPPRPPLLPRDPWWTARSPSARRRRAAPSQTVLGTGLRRRPTRPCLPGPSPATTTSSRAGAAPPGTSSSWTAAAPTAARRPRRSGGTALADPSPSATPAASGSRRRSAARRRPMPAAGAATSRSGRTCRPLVPCRTRRRRFLTPAPSTRPSWRGG

SEQ ID NO: 62379 - DNA, 1126 bp, Triticum aestivum
  misc_feature (1)..(1126): Ceres Seq. ID no. 12625302
acactcgcacccgcactcccatccgccggccgcgccatggcgtcgggggtgtccacgagcatggtgctcacgctgctcggcttctgcgtcagcgtcctcttcatagtcttcgtctgctccaggctcgtctgcgcgctcgtgcgccgccgccgccgccgctcccgcgcctcggcgctcccgccgggcttcccgcccctcgccgccaactacttcttcgccgtccaggtcgacggcctgggagctcaggccgcggctggcccctgtgccggggggctggacctggccgccgtcgcctccttccccacccgcgccttcgcagctgctgcctcctccgactccgactcctcagacgcggccccgcagtgtgttgtctgtcttgcagaatacgaggacaaagatgtgctccgcactcttccttactgtggccacaatttccatatggtgtgcatagatgcttggctaaagcagcactcaacatgcccagtctgtagaatttcactgtctgactatcctgatagcaagcaaattgcgcctcctttaccaagtgcagtggtgatacctatacctatacctccttattcccctgaagcatcaatatcggatccgtgccattgcctgtttgtcggcacgggccattcgtcaagggcatcagaggttcttcagaacgaacccgaccaggcgaatcggacagtacccggtccatccttggatgggccagacgacttgacgttgtctgaggttacctctcctggcgaaataacaagcaaacagtaaaacagcacatggagagtcctcgtgtactcagcaggtcgtgatctccccagctaagctccggcaagtagctgtttggagtttcttttgtgaacaacctgtaaacttggaaacatctgcccatgtgggtgaacggatgtctgttatagattagatttccgcgggtccgatgtaaatatgagaaatctttgggtttcttgtcgaaaagccacatttgctcgataatttgactgaaaacagtccattgtatccatctatggtagcccacagagaattgttgtaggaacatcatcatcagtgcatgtaccaattcaaacagctacaaacatattgattgagatgactgttttaatgc

SEQ ID NO: 62380 - protein, 257 aa, Triticum aestivum
  peptide (1)..(257): Ceres Seq. ID no. 12625303
TLAPALPSAGRAMASGVSTSMVLTLLGFCVSVLFIVFVCSRLVCALVRRRRRRSRASALPPGFPPLAANYFFAVQVDGLGAQAAAGPCAGGLDLAAVASFPTRAFAAAASSDSDSSDAAPQCVVCLAEYEDKDVLRTLPYCGHNFHMVCIDAWLKQHSTCPVCRISLSDYPDSKQIAPPLPSAVVIPIPIPPYSPEASISDPCHCLFVGTGHSSRASEVLQNEPDQANRTVPGPSLDGPDDLTLSEVTSPGEITSKQ

SEQ ID NO: 62381 - protein, 245 aa, Triticum aestivum
  peptide (1)..(245): Ceres Seq. ID no. 12625304
MASGVSTSMVLTLLGFCVSVLFIVFVCSRLVCALVRRRRRRSRASALPPGFPPLAANYFFAVQVDGLGAQAAAGPCAGGLDLAAVASFPTRAFAAAASSDSDSSDAAPQCVVCLAEYEDKDVLRTLPYCGHNFHMVCIDAWLKQHSTCPVCRISLSDYPDSKQIAPPLPSAVVIPIPIPPYSPEASISDPCHCLFVGTGHSSRASEVLQNEPDQANRTVPGPSLDGPDDLTLSEVTSPGEITSKQ

SEQ ID NO: 62382 - protein, 237 aa, Triticum aestivum
  peptide (1)..(237): Ceres Seq. ID no. 12625305
MVLTLLGFCVSVLFIVFVCSRLVCALVRRRRRRSRASALPPGFPPLAANYFFAVQVDGLGAQAAAGPCAGGLDLAAVASFPTRAFAAAASSDSDSSDAAPQCVVCLAEYEDKDVLRTLPYCGHNFHMVCIDAWLKQHSTCPVCRISLSDYPDSKQIAPPLPSAVVIPIPIPPYSPEASISDPCHCLFVGTGHSSRASEVLQNEPDQANRTVPGPSLDGPDDLTLSEVTSPGEITSKQ

SEQ ID NO: 62383 - DNA, 1260 bp, Triticum aestivum
  misc_feature (1)..(1260): Ceres Seq. ID no. 12615264
gttgacagacttctttccttttgggctggttgtggttgatgggcatctatttgttgttgtgcggttcgtttgcttgccttttgagcccacacaataagaagaaccccaccccctcaaaaaaagaaggggacaaaggagaagaaccctaggcggctctctgtgactcaaacccccgcagcccggcgccggcgcgaagcgaagggagaagaaggcatggggcggccgtacgcagtgaaggggaagaagaagcggaagctggaaggcggcgaagcctcgcgcgcccctccggtcgacgccgaggcggtggatgaagaggtgaaggaaaatgaggaggtgatggagggggaggcggcggcagaggaggcttttgcccgaggaggtgggggaggggatccccatcgtgccccgcccggtcgacagtaagcggcggccgggcgctatcttcgtacttgagagggcctgcctcgaggtcggcaaagtcggcaagggtatgcaaatcttgaatttggatgatcacgcaaattatttaaggaagcagaatcgcaatccagctgattacaggcctgatatcattcaccaggcactactagcaatatttgatagccctctaactaaggctgggaggttacaagctgtttatgttaggactgaaaagggagtgttgtttgaaatcaagcctcatgttcgcatgccacggacgttcaaacgtttctgtggcttgatgtcacagttattgcaaaagctgagcatcacggcagttgggaagcgtgagaagctccttaatgttattaaaaatcctgttacccagtatctacctgttggcgtacggaaaattggcctttcatatagtgcggagaaggcagttaatttgtttgactatgttgctaagtccaatgatgatgaacctcttgtgtttgtggttggtgccatggcccatggaaaggttgacaaggaatactcagatgattacatacagattagcggttaccctctcagtgctgcctgctgcctgaatcgaatatgcagtgccttggagcagaaatggaacatccagtgaagggaagtttgaaaacgaacattacatctttgtgatcagatttttatgtactcattagcgctcatagtattgttgtgccttttcatgtcttatgtctacagtattagttttgtcgagacatgaatcactggctgtaaaagtattaacactgaatgtttcaagtgcttatgctccttgcagttgtcatttttggtgaaatttgc

SEQ ID NO: 62384 - protein, 188 aa, Triticum aestivum
  peptide (1)..(188): Ceres Seq. ID no. 12615265
MQILNLDDHANYLRKQNRNPADYRPDIIHQALLAIFDSPLTKAGRLQAVYVRTEKGVLFEIKPHVRMPRTFKRFCGLMSQLLQKLSITAVGKREKLLNVIKNPVTQYLPVGVRKIGLSYSAEKAVNLFDYVAKSNDDEPLVFVVGAMAHGKVDKEYSDDYIQISGYPLSAACCLNRICSALEQKWNIQ

SEQ ID NO: 62385 - protein, 122 aa, Triticum aestivum
  peptide (1)..(122): Ceres Seq. ID no. 12615266
MPRTFKRFCGLMSQLLQKLSITAVGKREKLLNVIKNPVTQYLPVGVRKIGLSYSAEKAVNLFDYVAKSNDDEPLVFVVGAMAHGKVDKEYSDDYIQISGYPLSAACCLNRICSALEQKWNIQ

SEQ ID NO: 62386 - protein, 111 aa, Triticum aestivum
  peptide (1)..(111): Ceres Seq. ID no. 12615267
MSQLLQKLSITAVGKREKLLNVIKNPVTQYLPVGVRKIGLSYSAEKAVNLFDYVAKSNDDEPLVFVVGAMAHGKVDKEYSDDYIQISGYPLSAACCLNRICSALEQKWNIQ

SEQ ID NO: 62387 - DNA, 1336 bp, Triticum aestivum
  misc_feature (1)..(1336): Ceres Seq. ID no. 12625306
ccccctcctccccgtcttcccccctcagatctccggcgaccccccggcgaatcggcgccatgtcagggcagagccagcgcctgaacgtggtgccgacggtgacgatgctgggggtggtgaaggcgcggctgatcggcgcgacgcggggccacgcgctgctcaagaagaagtcggacgcgctcacggtgcagttccgcgccatcctcaagaagatcgtcgccaccaaggagtccatgggcgaggccatgcgcgcctcctccttctcgctcgccgaggccaagtacgtggccggcgacggcgtgcgccacgtcgtgctccagtccgtccgctccgcctcgctccgcgtccgctcccaccaggagaacgtcgccggggtcaagctgcccaagttcacccacttcgtcgaccccgccggcgcctcctccggcgggccctccggcgcctcccccagcctcaccggcctcgcccgcggggggcagcaggtctctgcctgccgcgccgcccacgtcaaggccatcgaggtgctcgtcgagctcgcctcgctccagacctccttcctcaccctcgacgaggccatcaagaccaccaaccgccgcgtcaacgccctcgagaacgtcgtcaagcccaggctcgagaacaccatcacctacatcaagggcgagctcgacgagctcgagcgcgaggacttcttccggctcaagaagatccagggatacaagaggagggaggtcgagcgccagatggccgcggccaagctcttcgccgaggagcagctcgccgaggatctcgccctcaagaggggcgtctccatcgggggcgccaccaacatactcgtcggcggcggagacaaggacgaagacatcatcttctgatccccacccctgctatccaattgttcaatcgtggtggaaacaataagttctggtgctggagccccagaatgacatctgtttatagagtggcggaggtttttgtttcaggctgtgtgcaacctgaattatggccatccaagacccaaaataatctctctctgtgtacttttgggaaccaaacattgctggtgaaactagtggctatgtgcagtagtaaaaattcttttgtaccgtattactgtatttcatttccctgcacgctcgttttagttgcatatttattcagacattgtgtatctggatttcggcatgcttcgctgtgaacctgctctgctgcagacttgtatccttctttttggccgtgtattctggggcatctactctattcttttctcaacttttcctggaggaaatagatgatgtgtgataacatggcaccaagataaatattaaattctgaactc

SEQ ID NO: 62388 - protein, 397 aa, Triticum aestivum
  peptide (1)..(397): Ceres Seq. ID no. 12625307
PLLPVFPPQISGDPPANRRHVRAEPAPERGADGDDAGGGEGAADRRDAGPRAAQEEVGRAHGAVPRHPQEDRRHQGVHGRGHARLLLLARRGQVRGRRRRAPRRAPVRPLRLAPRPLPPGERRRGQAAQVHPLRRPRRRLLRRALRRLPQPHRPRPRGAAGLCLPRRPRQGHRGARRARLAPDLLPHPRRGHQDHQPPRQRPRERRQAQAREHHHLHQGRARRARARGLLPAQEDPGIQEEGGRAPDGRGQALRRGAARRGSRPQEGRLHRGRHQHTRRRRRQGRRHHLLIPTPAIQLFNRGGNNKFWCWSPRMTSVYRVAEVFVSGCVQPELWPSKTQNNLSLCTFGNQTLLVKLVAMCSSKNSFVPYYCISFPCTLVLVAYLFRHCVSGFRHASL

SEQ ID NO: 62389 - protein, 289 aa, Triticum aestivum
  peptide (1)..(289): Ceres Seq. ID no. 12625308
PSSPSSPLRSPATPRRIGAMSGQSQRLNVVPTVTMLGVVKARLIGATRGHALLKKKSDALTVQFRAILKKIVATKESMGEAMRASSFSLAEAKYVAGDGVRHVVLQSVRSASLRVRSHQENVAGVKLPKFTHFVDPAGASSGGPSGASPSLTGLARGGQQVSACRAAHVKAIEVLVELASLQTSFLTLDEAIKTTNRRVNALENVVKPRLENTITYIKGELDELEREDFFRLKKIQGYKRREVERQMAAAKLFAEEQLAEDLALKRGVSIGGATNILVGGGDKDEDIIF

SEQ ID NO: 62390 - protein, 270 aa, Triticum aestivum
  peptide (1)..(270): Ceres Seq. ID no. 12625309
MSGQSQRLNVVPTVTMLGVVKARLIGATRGHALLKKKSDALTVQFRAILKKIVATKESMGEAMRASSFSLAEAKYVAGDGVRHVVLQSVRSASLRVRSHQENVAGVKLPKFTHFVDPAGASSGGPSGASPSLTGLARGGQQVSACRAAHVKAIEVLVELASLQTSFLTLDEAIKTTNRRVNALENVVKPRLENTITYIKGELDELEREDFFRLKKIQGYKRREVERQMAAAKLFAEEQLAEDLALKRGVSIGGATNILVGGGDKDEDIIF

SEQ ID NO: 62391 - DNA, 1001 bp, Triticum aestivum
  misc_feature (1)..(1001): Ceres Seq. ID no. 12615268
cccagtaggtctcgcccctcccgatccgaacccagacccaaaaccaacaccggcggcggctgcagcgatggcggcggcggcgatgaacacggacgtggaggcggtcgacttcgactccgacgacgacgatctcatggacgaggagggtgccatcgaaccctcgccggcccccgctccccgcctccgatctaccatcgcagggggcggcggcggcgacgacgatgccccgcgtaagactaaggggcgcggcttccgcgaggaccccaactcctcgtccgcgcaccgcgactcgcggttagctggcgcaggccgctctggcttcgacgccctcgcctccgatggcggccctggacccgtgcgctccattgaagggtggattgtactggttactggagttcatgaagaagctcaggaggaggacctccataatattttcggggattatggtcaggtcaagaacttgcatttgaatttggatcgccggactggatttgtgaagggatatgctctaattgagtatgagaactttgagcaagccaagcgtgcaataagagaatcagacggaactgagcttctatcgcagataataagtgttgactgggcatttagtaatggccctgtcaaacagagaagtactcggaagagatcaccgaggcctaatcgctcaaggagcccaccaaggagaagatacccttaggagcgacggaagtgcgagaatcatgggctttcagttgtttgcttgtcttatcgtaatttgacggcggcccttgtctctctgtaccaatttccggtagtagttgtatggcatcttcaaggtccttactttggtggatggagccatgtttgctcttgaagtttggcttgccagtttgagacaattgtagcctttgatgttggatccgtgatgtgttggattggaatgtttgtgccacaatttaatgaacttgaagatgggtaatttgtattattatttcttctatcattattttttactcatctgc

SEQ ID NO: 62392 - protein, 231 aa, Triticum aestivum
  peptide (1)..(231): Ceres Seq. ID no. 12615269
PVGLAPPDPNPDPKPTPAAAAAMAAAAMNTDVEAVDFDSDDDDLMDEEGAIEPSPAPAPRLRSTIAGGGGGDDDAPRKTKGRGFREDPNSSSAHRDSRLAGAGRSGFDALASDGGPGPVRSIEGWIVLVTGVHEEAQEEDLHNIFGDYGQVKNLHLNLDRRTGFVKGYALIEYENFEQAKRAIRESDGTELLSQIISVDWAFSNGPVKQRSTRKRSPRPNRSRSPPRRRYP

SEQ ID NO: 62393 - protein, 209 aa, Triticum aestivum
  peptide (1)..(209): Ceres Seq. ID no. 12615270
MAAAAMNTDVEAVDFDSDDDDLMDEEGAIEPSPAPAPRLRSTIAGGGGGDDDAPRKTKGRGFREDPNSSSAHRDSRLAGAGRSGFDALASDGGPGPVRSIEGWIVLVTGVHEEAQEEDLHNIFGDYGQVKNLHLNLDRRTGFVKGYALIEYENFEQAKRAIRESDGTELLSQIISVDWAFSNGPVKQRSTRKRSPRPNRSRSPPRRRYP

SEQ ID NO: 62394 - protein, 204 aa, Triticum aestivum
  peptide (1)..(204): Ceres Seq. ID no. 12615271
MNTDVEAVDFDSDDDDLMDEEGAIEPSPAPAPRLRSTIAGGGGGDDDAPRKTKGRGFREDPNSSSAHRDSRLAGAGRSGFDALASDGGPGPVRSIEGWIVLVTGVHEEAQEEDLHNIFGDYGQVKNLHLNLDRRTGFVKGYALIEYENFEQAKRAIRESDGTELLSQIISVDWAFSNGPVKQRSTRKRSPRPNRSRSPPRRRYP

SEQ ID NO: 62395 - DNA, 1271 bp, Triticum aestivum
  misc_feature (1)..(1271): Ceres Seq. ID no. 14313459
gcactcaacacactctctgcttcagctaacattagcagtccagcgcacacacatacagatatcgagagtgtgtgtgtaagagagacattagatcgagagcgatggcaattcctgctgatgctgctgtctcgttgaacttcccggtgatcaacatggagaagcttgagaccggggagaggggcgcggccatggaggtcatccgcgacgcctgcgagaactggggattcttcgagctgctgaaccatggcatctcgcacgagctgatggacgaggtggagcgggtgagcaaggcgaactacacggcgtgccgagaggggcagttcaaggagtttgcggcgcggacgctggaggccggcgagaagggcgccgacgtgaaggacgtggactgggagagcaccttcttcgtccgccacctccccgcctccaaccttgccgacctgcccgacctcgaccaccactacaggcaactgatcaaggaattcgcgtcggagatcgagaagctggcagagaaggtgctggacctgctgtgcgagaacctgggtctggagcagggctacctgaagcgggcgttcgccgggtccaggggcccgacgttcggcaccaaggtgagcagctacccaccgtgcccacgccccgacctggttgacggcctccgcgcgcacaccgacgccggcggcgtcatcctgctgttccaggacgaccaggtgagcgggctgcagctccttaaggacggggcctgggttgaggtgccgcccatgcgccacgccatcgtcgtcaatatcggcgaccagctggaggtgatcaccaacgggcggtacaagagcgtgatgcaccgcgtgctcacccgcgccgacggcaaccgcatgtccatcgcgtcattctacaaccccggggccgacgccgtcatcttcccggccccggcgcttgtggccgctgccggcgccacggagaagaacgagggcgaggagggcggcgccgtgtacccgaagttcgtgttcgaggactacatgaacctgtacgtgcgccacaagttcgaggccaaggagccacggttcaaggccatgaaggcagacgccgcgcccatcgccatcgcgtgataacgccgcgcccatcgagtacaagagtattttgagacgtgtttactttcttttgggcgtgccatgtatccggttagctttatgggtaatgtattttcgagtccgactcacagattcttgtccgggcatttctattttgctgattatggcatgctgttacgtgaagttaggaac

SEQ ID NO: 62396 - protein, 331 aa, Triticum aestivum
  peptide (1)..(331): Ceres Seq. ID no. 14313460
MAIPADAAVSLNFPVINMEKLETGERGAAMEVIRDACENWGFFELLNHGISHELMDEVERVSKANYTACREGQFKEFAARTLEAGEKGADVKDVDWESTFFVRHLPASNLADLPDLDHHYRQLIKEFASEIEKLAEKVLDLLCENLGLEQGYLKRAFAGSRGPTFGTKVSSYPPCPRPDLVDGLRAHTDAGGVILLFQDDQVSGLQLLKDGAWVEVPPMRHAIVVNIGDQLEVITNGRYKSVMHRVLTRADGNRMSIASFYNPGADAVIFPAPALVAAAGATEKNEGEEGGAVYPKFVFEDYMNLYVRHKFEAKEPRFKAMKADAAPIAIA

SEQ ID NO: 62397 - protein, 314 aa, Triticum aestivum
  peptide (1)..(314): Ceres Seq. ID no. 14313461
MEKLETGERGAAMEVIRDACENWGFFELLNHGISHELMDEVERVSKANYTACREGQFKEFAARTLEAGEKGADVKDVDWESTFFVRHLPASNLADLPDLDHHYRQLIKEFASEIEKLAEKVLDLLCENLGLEQGYLKRAFAGSRGPTFGTKVSSYPPCPRPDLVDGLRAHTDAGGVILLFQDDQVSGLQLLKDGAWVEVPPMRHAIVVNIGDQLEVITNGRYKSVMHRVLTRADGNRMSIASFYNPGADAVIFPAPALVAAAGATEKNEGEEGGAVYPKFVFEDYMNLYVRHKFEAKEPRFKAMKADAAPIAIA

SEQ ID NO: 62398 - protein, 302 aa, Triticum aestivum
  peptide (1)..(302): Ceres Seq. ID no. 14313462
MEVIRDACENWGFFELLNHGISHELMDEVERVSKANYTACREGQFKEFAARTLEAGEKGADVKDVDWESTFFVRHLPASNLADLPDLDHHYRQLIKEFASEIEKLAEKVLDLLCENLGLEQGYLKRAFAGSRGPTFGTKVSSYPPCPRPDLVDGLRAHTDAGGVILLFQDDQVSGLQLLKDGAWVEVPPMRHAIVVNIGDQLEVITNGRYKSVMHRVLTRADGNRMSIASFYNPGADAVIFPAPALVAAAGATEKNEGEEGGAVYPKFVFEDYMNLYVRHKFEAKEPRFKAMKADAAPIAIA

SEQ ID NO: 62399 - DNA, 887 bp, Triticum aestivum
  misc_feature (1)..(887): Ceres Seq. ID no. 12615117
aaaccatttgtcgtgagaccatctctcaccataggtcaactgctttggaaaggcggaagtggaagctagggtttaagaaggtccaggacgaagtggatcacggcgatggcgtcggcgaaaatcctagcgcgggctggctcctccttcctcggccgcctcctcgcctccccgcctccgtctcttctgcggaccggacctcctcttccgtcgctgctccataggatccagccgcacgtcccgccgccgccggcgtcggtggacgcacacgacgcggaggtggtcgcgagactaacttcgctccccggggagatctccttcccctgcggcctcccctctctccggttcctcattgacgatggaattgatcctgttgctaatgaaccccttgagttacttcccaaaaggacttaccaacccagcaccatcaagcggaaacgaacccatggatttcgtgcacgtaaatcaaccacgggtgggcgtaaggtgattgctcggagaattgctaaaggaaggcacaaaatttcatggtaatgaaaacccatggcaccgatgggagtttcacctcagctttgaatgatgctaatgtgaacatctaggagcttacaatagatgtattctccttccgaggcggggttagagcaaagccaagagacacctgcctgaatttcttcaccaaacaaaacgtttgttccactgaataaacatgacaaggagatggttatcgatgattttactgctatttgagatatgtacttgtatgctagttcgactgcattatgcatttgcttgtgttgtcaaactgtcagagtagcatccttggggtcatttccgtccatcaaactatgatgttcgcgttttcccccctttaagaaaaaagttttgcgtgc

SEQ ID NO: 62400 - protein, 141 aa, Triticum aestivum
  peptide (1)..(141): Ceres Seq. ID no. 12615118
MASAKILARAGSSFLGRLLASPPPSLLRTGPPLPSLLHRIQPHVPPPPASVDAHDAEVVARLTSLPGEISFPCGLPSLRFLIDDGIDPVANEPLELLPKRTYQPSTIKRKRTHGFRARKSTTGGRKVIARRIAKGRHKISW

SEQ ID NO: 62401 - protein, 72 aa, Triticum aestivum
  peptide (1)..(72): Ceres Seq. ID no. 12615119
TICRETISHHRSTALERRKWKLGFKKVQDEVDHGDGVGENPSAGWLLLPRPPPRLPASVSSADRTSSSVAAP

SEQ ID NO: 62402 - DNA, 1815 bp, Triticum aestivum
  misc_feature (1)..(1815): Ceres Seq. ID no. 13598401
accaagcaaagcatccaaccatcagatatgcatatgaccagacctgaccaattgtgcgagatgtttctttgttcagataactataacaggaatggttctacctctagggccatacgaaaacccctctaaactggatatcacatccagccaaccactacaacagagctccaattaaacacccacgggctgtgcacacacagacgtcgcatatcagaatttcaaccacttcttctccttctccttcctggcgaccgcgttggtggccgaggcgtgcgtcgcctcggcgtcggcgagcgccttccgcgtctgctccagcttcctcgacgccgcatcatgcaccgccttgtccttgcggttgcgctgcaccatctcctccagccgcccgacctggctccgcagctccttcacctcgtcgtcgtacgcgagcagagaccttctgttgtcttctttcttgggatgcccattggcctgacccgatggcgactctttcctggccttggcggccgaggagccttctgacgtgtcctggctcaccagctggctgttcatgaagctaaagacggacctctccgcctcctcggccttggcggccctggtcagctccgcaaacttccggtcgcgcttcctttgcccgccccggctgcgcttcttgtctttctcacggtgtatgcttcggccgtcctcgcctgtggttgcagcgaccgcgtggtcgagtgattgcttggccggtagtaccttgactgggattggatcgagcatgccttggccggacacgcctagccccatgccctcccggtaacccatttttgccatcattttggaggcgacgcccctggtgtgctgttcccattttgcaaagatcacggtctcagactgaacaccagttaaatttgtggtttccaaacggccaagaccctgatggatggattcatcctcttgatcgccatcttcacttaactcagattcatcctcacttgagcctctttcatcatcttccccgctcacatcagcatattctgggatagaaagggaatcacccggaagcgttgcagtgctcccatcatcttgaaagaccacctgaccacgcttcaactcatcatcccacgactcaagttcagctctcctccaaaggccagaatggtgcccagaagctgccagtatgctggatcctgccaaggactgtcgccatgcagttggagtgaaccgtttcaaggatgaagtaggaatcacaacaccatgggacaagcggcagttattagcaaaccgacaccgttgctgcagaaagaacttgcacatcgacattttttctgatgtgggtgtcagaaatgagacccgtgcattgcctgaaccttcaagtcccagaatgcatccattataccaacgcccatcattgtgcctgaatctacactttgatccgactgaaaattcctgtggctccaatggttgtggctcaacatcatgtggatctaatggctcaatagcagcttcagttgatagcgatgctgactcctgatttggaaagatctcatcgatttgcttcactagcctagaacgcttcaaatgcagaagcccttcctctgcatccttaatcgcagacagaagttccccgtgcacctcgaggaggtccgcgttggaggcgtcggcggcgagggcctcgtcgacggcggcgagggaggaccgctgctcctccaggtgctgttccagctgcagctcgatctccgccgcctcgtcctcctccccctcgcccgccatggctcaccggtccaggcagcggtcggtcgggagaagagagaagggccgacgatttcgatgggt

SEQ ID NO: 62403 - protein, 117 aa, Triticum aestivum
  peptide (1)..(117): Ceres Seq. ID no. 13598402
MLDPAKDCRHAVGVNRFKDEVGITTPWDKRQLLANRHRCCRKNLHIDIFSDVGVRNETRALPEPSSPRMHPLYQRPSLCLNLHFDPTENSCGSNGCGSTSCGSNGSIAASVDSDADS

SEQ ID NO: 62404 - protein, 85 aa, Triticum aestivum
  peptide (1)..(85): Ceres Seq. ID no. 13598403
MQKPFLCILNRRQKFPVHLEEVRVGGVGGEGLVDGGEGGPLLLQVLFQLQLDLRRLVLLPLARHGSPVQAAVGREKREGPTISMG

SEQ ID NO: 62405 - protein, 83 aa, Triticum aestivum
  peptide (1)..(83): Ceres Seq. ID no. 13598404
MKLKTDLSASSALAALVSSANFRSRFLCPPRLRFLSFSRCMLRPSSPVVAATAWSSDCLAGSTLTGIGSSMPWPDTPSPMPSR

SEQ ID NO: 62406 - DNA, 1237 bp, Triticum aestivum
  misc_feature (1)..(1237): Ceres Seq. ID no. 13596918
agacggctcggcgattggcctcacggcgagctatctaggtcacgaggaatccactcccgactgccgttaggctggccggctggcttgttgccgcggacagccttggcgaatcacggtcctgataggcgcccctcctcccggcgatggggggtcgcaatcggcgatggccgacgaagcgccaccacgacgcctcttcgaaccctcgccccccgcctccgtattccggatacagtcacgtggataatcaatgccaagtcccattatgggaaagggaattttgcagtcttgttggtggcatttcgtggcagaggttctgcgagaacaagcactttgcctatatgtacaaggagatagagcagtgggatgactcgggagcttttgagaatttccagaacgcaaaatcaaggttctggtctcattaccatggccaaccttctgatataccttaccccaaccctgatctgtacattgatgaggtcgaccatcgttgcgaggtcgaccccgagttggtagctgacctggacaaggtgcgggtaccctttgaggcggacaacgagcccgccgtagctgccaataacaggtgtgcccagaaccagtcagggaactgggacatctatctagaaaagccgacccctgaggtgaacaagtgggaggcggacaactcggcatccaacgcaggttggggagcgagtcaggagcctctgagcagctggaacaaaatcagcaccggctggggcgaggccctggcggagcccggttggggcagctcaggcaacaaccattgcccagggaataactggagcagctcccatggagtatccagcaacaataacacatactaccaggatccaggcggcgcatatggcaggaaaaggaacagtggaggcgggtactcccagcagaggaacagcaagcagaggaaccaggctgagagccaccaccagaggggcagatggcaggatcacagggacagggggaggcatggcgagcggttcctgtttgacaataggccaaatgggcagcgagcagagcgcggcttctgagttggtggcggtgagtgtgcgagaaaccgtggaaaggttttggttgtatgataaatgatgcgcattttctagtgtcttttgtgcggagctgcagcttgtaatggttggatgttgcaacaacgctttacctgtaaggagatgtgtcaggttttgttgctgctctttgtgatatgttctgttttctctcttcctgt

SEQ ID NO: 62407 - protein, 299 aa, Triticum aestivum
  peptide (1)..(299): Ceres Seq. ID no. 13596919
MGGRNRRWPTKRHHDASSNPRPPPPYSGYSHVDNQCQVPLWEREFCSLVGGISWQRFCENKHFAYMYKEIEQWDDSGAFENFQNAKSRFWSHYHGQPSDIPYPNPDLYIDEVDHRCEVDPELVADLDKVRVPFEADNEPAVAANNRCAQNQSGNWDIYLEKPTPEVNKWEADNSASNAGWGASQEPLSSWNKISTGWGEALAEPGWGSSGNNHCPGNNWSSSHGVSSNNNTYYQDPGGAYGRKRNSGGGYSQQRNSKQRNQAESHHQRGRWQDHRDRGRHGERFLFDNRPNGQRAERGF

SEQ ID NO: 62408 - protein, 234 aa, Triticum aestivum
  peptide (1)..(234): Ceres Seq. ID no. 13596920
MYKEIEQWDDSGAFENFQNAKSRFWSHYHGQPSDIPYPNPDLYIDEVDHRCEVDPELVADLDKVRVPFEADNEPAVAANNRCAQNQSGNWDIYLEKPTPEVNKWEADNSASNAGWGASQEPLSSWNKISTGWGEALAEPGWGSSGNNHCPGNNWSSSHGVSSNNNTYYQDPGGAYGRKRNSGGGYSQQRNSKQRNQAESHHQRGRWQDHRDRGRHGERFLFDNRPNGQRAERGF

SEQ ID NO: 62409 - DNA, 837 bp, Triticum aestivum
  misc_feature (1)..(837): Ceres Seq. ID no. 13654825
ccttcttctctcccgctgaaacctttcttcacaaaatggcctcaactacactaacaaccctctccctccgcaacctctcttatcctanaccctcctcctcttcttaccctacgcacctctccgccaacccctcctccctccaattccccaacttctcccaccgcgccaccaccacgcgccgcgcccgcgtcgtcgtcgtctccgccgtcgaggcaccggagaaaatcaccaagctcggcgacgaaatcgcgggactcacgctcgaggaagccaagaacctcgtcgacttcctccaggacaagctcggcgtctccgcggcagcattcgcccccgtagccgtcgccgcgggtgccgtcggcgccgtggcggacgctccggcggcggtggaggagaagatggagttcgacgtgttgatcgaggaggtgccgagcaacgcgagaatcgcggtgattaaggcggtgagggcgctgactaacctggcgctgaaagaggcgaaggagttgatagaagggttgccgaagaagttcaaggaagggatttcgaaggacgaagctgaagatgcgaagaagcaacttgaagaagccggtgccaaggttaccattgcttagtactgtttagcagcagcatttgttttgcttcttcttttgttgtagctgagttcactagtacactgtaatctcctttccattttgtctggagttcaatcttatttgtaatgaggaaaaaatgagttcttattttttttttaatgcctctgaggtgtttgttgaaatggaggtgaagggttttaaattgctgaattggaaattggaaacacggtacttaactacttgctgg

SEQ ID NO: 62410 - protein, 201 aa, Triticum aestivum
  peptide (1)..(201): Ceres Seq. ID no. 13654826
  misc_feature (29)..(29): Xaa is any aa, unknown or other
FFSPAETFLHKMASTTLTTLSLRNLSYPXPSSSSYPTHLSANPSSLQFPNFSHRATTTRRARVVVVSAVEAPEKITKLGDEIAGLTLEEAKNLVDFLQDKLGVSAAAFAPVAVAAGAVGAVADAPAAVEEKMEFDVLIEEVPSNARIAVIKAVRALTNLALKEAKELIEGLPKKFKEGISKDEAEDAKKQLEEAGAKVTIA

SEQ ID NO: 62411 - protein, 190 aa, Triticum aestivum
  peptide (1)..(190): Ceres Seq. ID no. 13654827
  misc_feature (18)..(18): Xaa is any aa, unknown or other
MASTTLTTLSLRNLSYPXPSSSSYPTHLSANPSSLQFPNFSHRATTTRRARVVVVSAVEAPEKITKLGDEIAGLTLEEAKNLVDFLQDKLGVSAAAFAPVAVAAGAVGAVADAPAAVEEKMEFDVLIEEVPSNARIAVIKAVRALTNLALKEAKELIEGLPKKFKEGISKDEAEDAKKQLEEAGAKVTIA

SEQ ID NO: 62412 - DNA, 1234 bp, Triticum aestivum
  misc_feature (1)..(1234): Ceres Seq. ID no. 13598253
gattccccgtcccctttcttcattccctcttccgttgccggtgcgtccgcgtcctgtctctcccggccagcgatcgggaggggcgagggatggcctcccgtccccccaactccgccgacggcgagggccccgcagggaataacgtggaattgccatccctgccctttcatgttgttactaaacctagtcaactcccagttgagtttcttgagccctctgctgccaagaaattggtgattggatttgactgtgaaggtgttgacctttgccgccatggtgctctctgtatcatgcagattgcatttcctgacgctgtttacttggtcgatgctattgagggtggaaaagaactagttgaagcttgcaaaccagcacttgagtccaatcatatcaccaaagttattcatgactgtaaaagggacagtgaggcattgtatttccagtttggcattaaattacataatgtgatggatacacagatagcctattccctgattgaagagcaggaaggtaaaaagagagcatatgatgtttacatatccttcgtgagccttcttgccgatcctcgttattgtggaatgccatatcctgaaaaggaagaagtccgtacccttctaaggcaggacccaaatttctggaaaaataggcccttgtctgaaatgatgattcgagcagcgacagatgatgtgcgcttccttctcaatatacatgagaaaatgatggagaagttaagcaaagtatcttcatggcgtctggcagtacgaagtgagctatactgtaggtgcttttgcataaatgacaaccagcaggcagattggccgcctcttccaactgtccctgatgacattgaagctgaagctcgtgttcctgaagtggatatcctttcgctcttagatgtgcctcctggaaaaatgggtcgtgttattggcagaaaaggatcatcaataatggctgtgaaagaatcttgcaatgttgaaatccatatcggtggtgcaaagggacctccagatagggtgttcatcattggaccagtgaaggaagtcagaaaggcggaggccatcctgaggggccgaatgctgtaattctagagaaacgacttcttgatatagacttgaactgccatatcttttgaacacaagggatacagaaatgcatgtggatcgctgatccgtgacaacaataaaaataagagttggattaaaaaaaaaaaaaaaaaagcttatcgataccgtcg

SEQ ID NO: 62413 - protein, 359 aa, Triticum aestivum
  peptide (1)..(359): Ceres Seq. ID no. 15222279
FPVPFLHSLFRCRCVRVLSLPASDREGRGMASRPPNSADGEGPAGNNVELPSLPFHVVTKPSQLPVEFLEPSAAKKLVIGFDCEGVDLCRHGALCIMQIAFPDAVYLVDAIEGGKELVEACKPALESNHITKVIHDCKRDSEALYFQFGIKLHNVMDTQIAYSLIEEQEGKKRAYDVYISFVSLLADPRYCGMPYPEKEEVRTLLRQDPNFWKNRPLSEMMIRAATDDVRFLLNIHEKMMEKLSKVSSWRLAVRSELYCRCFCINDNQQADWPPLPTVPDDIEAEARVPEVDILSLLDVPPGKMGRVIGRKGSSIMAVKESCNVEIHIGGAKGPPDRVFIIGPVKEVRKAEAILRGRML

SEQ ID NO: 62414 - protein, 330 aa, Triticum aestivum
  peptide (1)..(330): Ceres Seq. ID no. 15222280
MASRPPNSADGEGPAGNNVELPSLPFHVVTKPSQLPVEFLEPSAAKKLVIGFDCEGVDLCRHGALCIMQIAFPDAVYLVDAIEGGKELVEACKPALESNHITKVIHDCKRDSEALYFQFGIKLHNVMDTQIAYSLIEEQEGKKRAYDVYISFVSLLADPRYCGMPYPEKEEVRTLLRQDPNFWKNRPLSEMMIRAATDDVRFLLNIHEKMMEKLSKVSSWRLAVRSELYCRCFCINDNQQADWPPLPTVPDDIEAEARVPEVDILSLLDVPPGKMGRVIGRKGSSIMAVKESCNVEIHIGGAKGPPDRVFIIGPVKEVRKAEAILRGRML

SEQ ID NO: 62415 - protein, 263 aa, Triticum aestivum
  peptide (1)..(263): Ceres Seq. ID no. 15222281
MQIAFPDAVYLVDAIEGGKELVEACKPALESNHITKVIHDCKRDSEALYFQFGIKLHNVMDTQIAYSLIEEQEGKKRAYDVYISFVSLLADPRYCGMPYPEKEEVRTLLRQDPNFWKNRPLSEMMIRAATDDVRFLLNIHEKMMEKLSKVSSWRLAVRSELYCRCFCINDNQQADWPPLPTVPDDIEAEARVPEVDILSLLDVPPGKMGRVIGRKGSSIMAVKESCNVEIHIGGAKGPPDRVFIIGPVKEVRKAEAILRGRML

SEQ ID NO: 62416 - DNA, 996 bp, Triticum aestivum
  misc_feature (1)..(996): Ceres Seq. ID no. 13503610
gcactccattcacggttcgccaaggtcaacaagagtagtgatagatagaagaggccaccatcaccatggatcggcagctgctgaggacggtgaagcaggcgaccaagaaccacgccggcctcatgtaccaccgtctcgtgggccacatcccccacctcctcgtggtcacgctgctcgtcgtcgtggcgccgcagctctcgacgctgacgccggagaaggtgcgcgccctttggaacacagcagtgaacgcgccggcgctggccatggcgtgctgggcggcggcgctggcggcgtacacgtacgcgtcgtcccgccctcagccagtgtatctagtggacctcgccgggtacaagccgccggtggagctggaggcgtcgcgcgccaagaccatcgtgcacttctcgcggtgcgggcggttcagcgagcagagcatggcgttccagaagcggatgctggagcggtcggggctgggcgaggcgacgcacttccccatgtcgctgatccgcctccccgtggacatgtgcgaccggacggccatggaggagtcccacgccgtgatcttcggcgtcgtcgacgaggtcctccgcaagaccggcgtggacgccggcgacgtgggcgtgctcatcttcaactccagcctgctcagcccgacgccgtccttcacgtcgctcatcgtgaaccgctacaagttccgcgacgacatcgtcacgcacaacctcagcggcatggggtgcagcgccggcatcatcgccatcgacctcgccaagcgcctgctccaggtacaccggaacacgtacgcgctggtggtgagcacggagaacatcaccctcaacgcctacatgggcaacannccgtccgatgctggtgaccaacacgctcttccgtgtcggcggcgcggcgatcctcctcaccaaccgggccggcgaccgggcgcggtccaagtaccagctgatccacaccgtgcgcacccaccgcggggcgcacgaccagagctac

SEQ ID NO: 62417 - protein, 310 aa, Triticum aestivum
  peptide (1)..(310): Ceres Seq. ID no. 13503611
  misc_feature (262)..(262): Xaa is any aa, unknown or other
MDRQLLRTVKQATKNHAGLMYHRLVGHIPHLLVVTLLVVVAPQLSTLTPEKVRALWNTAVNAPALAMACWAAALAAYTYASSRPQPVYLVDLAGYKPPVELEASRAKTIVHFSRCGRFSEQSMAFQKRMLERSGLGEATHFPMSLIRLPVDMCDRTAMEESHAVIFGVVDEVLRKTGVDAGDVGVLIFNSSLLSPTPSFTSLIVNRYKFRDDIVTHNLSGMGCSAGIIAIDLAKRLLQVHRNTYALVVSTENITLNAYMGNXPSDAGDQHALPCRRRGDPPHQPGRRPGAVQVPADPHRAHPPRGARPEL

SEQ ID NO: 62418 - protein, 291 aa, Triticum aestivum
  peptide (1)..(291): Ceres Seq. ID no. 13503612
  misc_feature (243)..(243): Xaa is any aa, unknown or other
MYHRLVGHIPHLLVVTLLVVVAPQLSTLTPEKVRALWNTAVNAPALAMACWAAALAAYTYASSRPQPVYLVDLAGYKPPVELEASRAKTIVHFSRCGRFSEQSMAFQKRMLERSGLGEATHFPMSLIRLPVDMCDRTAMEESHAVIFGVVDEVLRKTGVDAGDVGVLIFNSSLLSPTPSFTSLIVNRYKFRDDIVTHNLSGMGCSAGIIAIDLAKRLLQVHRNTYALVVSTENITLNAYMGNXPSDAGDQHALPCRRRGDPPHQPGRRPGAVQVPADPHRAHPPRGARPEL

SEQ ID NO: 62419 - protein, 288 aa, Triticum aestivum
  peptide (1)..(288): Ceres Seq. ID no. 13503613
  misc_feature (283)..(283): Xaa is any aa, unknown or other
  misc_feature (284)..(284): Xaa is any aa, unknown or other
HSIHGSPRSTRVVIDRRGHHHHGSAAAEDGEAGDQEPRRPHVPPSRGPHPPPPRGHAARRRGAAALDADAGEGARPLEHSSERAGAGHGVLGGGAGGVHVRVVPPSASVSSGPRRVQAAGGAGGVARQDHRALLAVRAVQRAEHGVPEADAGAVGAGRGDALPHVADPPPRGHVRPDGHGGVPRRDLRRRRRGPPQDRRGRRRRGRAHLQLQPAQPDAVLHVAHREPLQVPRRHRHAQPQRHGVQRRHHRHRPRQAPAPGTPEHVRAGGEHGEHHPQRLHGQXXVRCW

SEQ ID NO: 62420 - DNA, 1401 bp, Triticum aestivum
  misc_feature (1)..(1401): Ceres Seq. ID no. 13596581
gctcttctccagtccgcctccctatccccacctcctccacaacccccaccccaccccacccctcctccgctgcccatcccagcacagcggaagcgatcggcaatggcgtcctccacccagggccaggtcatcacctgcaaagcggcggtggcgtacgaggcgaacaagccgctggtggtcgaggacgtgcaggtggcgccgccgcaggccggcgaggtccgcatcaagatcctctccaccgcgctctgccacaccgactactacacctggagcggcaaggatcctgagggtctctttccttgcattctcggtcacgaggctgctggaattgttgagagtgtcggcgaaggggtgaccgacgtgcagcctggggaccatgtcatcccttgctaccaagcggaatgcagggactgcaagatgtgcaacagcgggaagaccaacctctgcggcaaagttcgcggcgccactggggttggggtcatgatgagcgaccgcaagagccgcttctcggttaatgggaagcccatctaccatttcatggggacgtccacgttcagtcagtacactgttgtgcatgacgtcagtgttgccaagatcaacccacaggcgcccctggataaggtctgcctgctcggctgtggtgtttctactggccttggagcagtatggaatactgcaaaggttgaagcaggttccattgttgctgtttttgggcttggcacagtcggacttgcagttgctgagggggcaaaatcagctggtgcttctcggattattggcattgacattgataccaagaagtttgatgttgctaagaactttggagtcacagagtttgtgaacccaaaagaccatgacaaaccaatccagcaggtccttgttgaccttacagatggtggtgtggattacagttttgagtgcatcggaaatgtttctatcatgagggctgcactcgaatgctgccacaagggctggggtacctctgttgtcgttggcgtagctgcgtctggccaggagattgccacacggccattccagctagtcactggccgtgtctggaagggaacagctttcggcggcttcaagagccgaagccaggtcccgtggctcgtcgagaagtacatgaacaaggaaatcaaggtggacgagtacatcacccacaacatgaaccttaccgacatcaacaaggcgttcgacctgctgcacgaaggcggctgcctgcggtgcgtgctggccatggagcactgaggatcctgctatgtgaagccgagcagtttgcgtcgtgtgaaattgtaatgcagatctatcctccgccctgggactatagaactcgtttggccccgtttggcctagaaactcttgaacacgaaccgctgctataataatatgttgtgttggatg

SEQ ID NO: 62421 - protein, 415 aa, Triticum aestivum
  peptide (1)..(415): Ceres Seq. ID no. 13596582
ALLQSASLSPPPPQPPPHPTPPPLPIPAQRKRSAMASSTQGQVITCKAAVAYEANKPLVVEDVQVAPPQAGEVRIKILSTALCHTDYYTWSGKDPEGLFPCILGHEAAGIVESVGEGVTDVQPGDHVIPCYQAECRDCKMCNSGKTNLCGKVRGATGVGVMMSDRKSRFSVNGKPIYHFMGTSTFSQYTVVHDVSVAKINPQAPLDKVCLLGCGVSTGLGAVWNTAKVEAGSIVAVFGLGTVGLAVAEGAKSAGASRIIGIDIDTKKFDVAKNFGVTEFVNPKDHDKPIQQVLVDLTDGGVDYSFECIGNVSIMRAALECCHKGWGTSVVVGVAASGQEIATRPFQLVTGRVWKGTAFGGFKSRSQVPWLVEKYMNKEIKVDEYITHNMNLTDINKAFDLLHEGGCLRCVLAMEH

SEQ ID NO: 62422 - protein, 381 aa, Triticum aestivum
  peptide (1)..(381): Ceres Seq. ID no. 13596583
MASSTQGQVITCKAAVAYEANKPLVVEDVQVAPPQAGEVRIKILSTALCHTDYYTWSGKDPEGLFPCILGHEAAGIVESVGEGVTDVQPGDHVIPCYQAECRDCKMCNSGKTNLCGKVRGATGVGVMMSDRKSRFSVNGKPIYHFMGTSTFSQYTVVHDVSVAKINPQAPLDKVCLLGCGVSTGLGAVWNTAKVEAGSIVAVFGLGTVGLAVAEGAKSAGASRIIGIDIDTKKFDVAKNFGVTEFVNPKDHDKPIQQVLVDLTDGGVDYSFECIGNVSIMRAALECCHKGWGTSVVVGVAASGQEIATRPFQLVTGRVWKGTAFGGFKSRSQVPWLVEKYMNKEIKVDEYITHNMNLTDINKAFDLLHEGGCLRCVLAMEH

SEQ ID NO: 62423 - protein, 276 aa, Triticum aestivum
  peptide (1)..(276): Ceres Seq. ID no. 13596584
MCNSGKTNLCGKVRGATGVGVMMSDRKSRFSVNGKPIYHFMGTSTFSQYTVVHDVSVAKINPQAPLDKVCLLGCGVSTGLGAVWNTAKVEAGSIVAVFGLGTVGLAVAEGAKSAGASRIIGIDIDTKKFDVAKNFGVTEFVNPKDHDKPIQQVLVDLTDGGVDYSFECIGNVSIMRAALECCHKGWGTSVVVGVAASGQEIATRPFQLVTGRVWKGTAFGGFKSRSQVPWLVEKYMNKEIKVDEYITHNMNLTDINKAFDLLHEGGCLRCVLAMEH

SEQ ID NO: 62424 - DNA, 1387 bp, Triticum aestivum
  misc_feature (1)..(1387): Ceres Seq. ID no. 13596585
cgaaaagcgcccagcaagcttgtatattcgctcagcctctctctctcttctccttacccagccgcctcgtgcccttgtcctctcccgtctccgaccgcgccgccgccactaggccacgaccgccgccccctcccccagcctcgcttcgctccggcggggatggaaaaccgcgatggttcctcattgccagactttcttgagctccagcgcacccgtgttctctgcaaggccgatgcccccactcatacagaggggtttcaatactcgggggcttttgctgctatgggagttgatactagtgtctcagttgagaagttctgcaagaactttaaaatcgagataaatcgacttacagatgaggatatggagtttgatatgattggcgttgatgcatcgatagctaatgctttccggagaatcctcattgcagaggttcctacaatggccattgagaaagtcttcatggttgacaatacatcagttatagcagatgaggtcctttcacaccgactaggccttattccacttgatgctgatccaaggctttttgattatatctctgatgatgtcccaaatgaaaggaatactattgtgtacaaactgcatgtttcatgtgaaaagggttcccaaagacttacagttaagtctggtcaattggagtggttgccagaaggcagtcaattaactatggcatctcctgcgcaatctggggacaatcagaggacctacacatcctttggtcaaagccaacagaatacctctgaaaggcctctcggtgtgaagtataatgacataacaattgccaggcttgggccaggacaggctattgagcttgaggcacatgctgttaagggagtggggaaagttcatgcgaagtggtctccagttgctacagcctggtacaggatgctccccgaggttgttcttctcaaagaaattaaaaatggtgatgcagaggagctagtgaaaagatgcccagttaatgtttttgacattgaagacctgggaaagggggagaagagagcagttgttgcaaagccaagagcatgcaccctttgtagggaatgtgtcagactggctgatgatcaagtagagctacggcgtgttagagaccacttcatttttacaatcgagtccaccggagctctaccgccggaggtgctcttcacagaggccgtgaagatccttgaggagaagtgcgagcgagtgatatccgaactttcctgagcccgacataaagttttcagtactgttctgatgcagtttttctattgctatgttgtgctgaggacgaaatcttagtgtactagtataggttactgtaaaacttctgcatccaatactctggagtcacattcagctaatttattaccgagccggtatatgc

SEQ ID NO: 62425 - protein, 408 aa, Triticum aestivum
  peptide (1)..(408): Ceres Seq. ID no. 13596586
RKAPSKLVYSLSLSLSSPYPAASCPCPLPSPTAPPPLGHDRRPLPQPRFAPAGMENRDGSSLPDFLELQRTRVLCKADAPTHTEGFQYSGAFAAMGVDTSVSVEKFCKNFKIEINRLTDEDMEFDMIGVDASIANAFRRILIAEVPTMAIEKVFMVDNTSVIADEVLSHRLGLIPLDADPRLFDYISDDVPNERNTIVYKLHVSCEKGSQRLTVKSGQLEWLPEGSQLTMASPAQSGDNQRTYTSFGQSQQNTSERPLGVKYNDITIARLGPGQAIELEAHAVKGVGKVHAKWSPVATAWYRMLPEVVLLKEIKNGDAEELVKRCPVNVFDIEDLGKGEKRAVVAKPRACTLCRECVRLADDQVELRRVRDHFIFTIESTGALPPEVLFTEAVKILEEKCERVISELS

SEQ ID NO: 62426 - protein, 355 aa, Triticum aestivum
  peptide (1)..(355): Ceres Seq. ID no. 13596587
MENRDGSSLPDFLELQRTRVLCKADAPTHTEGFQYSGAFAAMGVDTSVSVEKFCKNFKIEINRLTDEDMEFDMIGVDASIANAFRRILIAEVPTMAIEKVFMVDNTSVIADEVLSHRLGLIPLDADPRLFDYISDDVPNERNTIVYKLHVSCEKGSQRLTVKSGQLEWLPEGSQLTMASPAQSGDNQRTYTSFGQSQQNTSERPLGVKYNDITIARLGPGQAIELEAHAVKGVGKVHAKWSPVATAWYRMLPEVVLLKEIKNGDAEELVKRCPVNVFDIEDLGKGEKRAVVAKPRACTLCRECVRLADDQVELRRVRDHFIFTIESTGALPPEVLFTEAVKILEEKCERVISELS

SEQ ID NO: 62427 - protein, 314 aa, Triticum aestivum
  peptide (1)..(314): Ceres Seq. ID no. 13596588
MGVDTSVSVEKFCKNFKIEINRLTDEDMEFDMIGVDASIANAFRRILIAEVPTMAIEKVFMVDNTSVIADEVLSHRLGLIPLDADPRLFDYISDDVPNERNTIVYKLHVSCEKGSQRLTVKSGQLEWLPEGSQLTMASPAQSGDNQRTYTSFGQSQQNTSERPLGVKYNDITIARLGPGQAIELEAHAVKGVGKVHAKWSPVATAWYRMLPEVVLLKEIKNGDAEELVKRCPVNVFDIEDLGKGEKRAVVAKPRACTLCRECVRLADDQVELRRVRDHFIFTIESTGALPPEVLFTEAVKILEEKCERVISELS

SEQ ID NO: 62428 - DNA, 686 bp, Triticum aestivum
  misc_feature (1)..(686): Ceres Seq. ID no. 15175026
atcgatccgtggcatggctcgccgactctgccgtctccccgccctaaaccctagccccgccgctctcctccgtccctcatcctccccgacgccgacgccctccttccccgccttcccccgcctcttctcctcctcatccgcaggcgattccagcatggtggtcgtcggctcggcggactccttcgaggacatccacgccaaggtgcaagtggagaagctccccgccgtcttctactacacggcggtctggtgcgggccgtgtcgggcgatggcacctgtgatcgagaagatgagcaggcagtaccccaagataccagtctacaaggtcgacatcgacatggagggacttgggaccagacttagtaacctgaaaatattctctgtcccaactttccacttctatcacaaaggcgagaagagcagcgaagtggttggtgctgacgtgaagaagcttgaagctgccatggaaagtcttcacaagcaacagtgaagttgacttggagtgggggacagttcttttgcatgaagagttggagaggctgtaatgcttgtgatttgcgtgtttgacatggaaacttccgccttacgatcttgtttcgatatctggatacacactggccgcaaaacatcgatatctggatttatgccacgcttgagcacagcttttgtgcaatttctgcacgtct

SEQ ID NO: 62429 - protein, 162 aa, Triticum aestivum
  peptide (1)..(162): Ceres Seq. ID no. 15175027
SIRGMARRLCRLPALNPSPAALLRPSSSPTPTPSFPAFPRLFSSSSAGDSSMVVVGSADSFEDIHAKVQVEKLPAVFYYTAVWCGPCRAMAPVIEKMSRQYPKIPVYKVDIDMEGLGTRLSNLKIFSVPTFHFYHKGEKSSEVVGADVKKLEAAMESLHKQQ

SEQ ID NO: 62430 - protein, 158 aa, Triticum aestivum
  peptide (1)..(158): Ceres Seq. ID no. 15175028
MARRLCRLPALNPSPAALLRPSSSPTPTPSFPAFPRLFSSSSAGDSSMVVVGSADSFEDIHAKVQVEKLPAVFYYTAVWCGPCRAMAPVIEKMSRQYPKIPVYKVDIDMEGLGTRLSNLKIFSVPTFHFYHKGEKSSEVVGADVKKLEAAMESLHKQQ

SEQ ID NO: 62431 - protein, 111 aa, Triticum aestivum
  peptide (1)..(111): Ceres Seq. ID no. 15175029
MVVVGSADSFEDIHAKVQVEKLPAVFYYTAVWCGPCRAMAPVIEKMSRQYPKIPVYKVDIDMEGLGTRLSNLKIFSVPTFHFYHKGEKSSEVVGADVKKLEAAMESLHKQQ

SEQ ID NO: 62432 - DNA, 1029 bp, Triticum aestivum
  misc_feature (1)..(1029): Ceres Seq. ID no. 15175034
gaaaccaacaccatccgcggcgaccccttcttcccttccctgagacacttctccccaaagcgaacccagctgaaaagaagcgagacgcgccgcgccgcaccgcgttgcctttgtatatcgtggctctatttagctcaagaggagaggagaggagaggcgcgcggggaggggaaggagatcaaatcagatcaaaccgtaggaaaccatcgattgatcgagcagcggcggcgacgcggaagcaggaggggaggggggatggcggtggcgtatcgcgcggaggaggagtacgactacctgttcaaggtagtgctgatcggggacagcggcgtgggcaagtccaacctgctgtcgcgcttcgccagggacgagttcagcctcgacaccaggtccaccatcggcgtcgagttcgccaccaagaccgtccgcgtcgacggcaagctcgtcaaggcgcagatctgggacaccgccggccaagaaaggtaccgggccatcaccagcgcgtactaccggggcgccgtgggcgcgctcgtggtgtacgacgtgacgcgccacatcacgttcgagaacgcggagcggtggctgacggagctccgcgaccacacggacgccaacatcgtggtgatgctggtcgggaacaaggcggacctgcgccacctgagggccgtctcgcccgaggaggccagggccttcgcggagcgccaccgcaccttctccatggagacctccgcgctggaggccaccaacgtggaggacgccttcaccgaggtgctcggcgagatctaccgcgtcgtcagcaagaaggccctcgacatcggcgacgaccccgccgcgccgcctaggggcaagaccatcgacgttggcggcaaggacgacgtcaccccggtgaacacgggcggctgctgctcggcctagtcaaactctctccctctctatctctctctgccggagacggtggtaggtgatgccgtgtgtgtgcgtgctagggtgtaacaggcatgttgcgaccgtgatgattattggttattggtc

SEQ ID NO: 62433 - protein, 303 aa, Triticum aestivum
  peptide (1)..(303): Ceres Seq. ID no. 15175035
ETNTIRGDPFFPSLRHFSPKRTQLKRSETRRAAPRCLCISWLYLAQEERRGEARGEGKEIKSDQTVGNHRLIEQRRRRGSRRGGGMAVAYRAEEEYDYLFKVVLIGDSGVGKSNLLSRFARDEFSLDTRSTIGVEFATKTVRVDGKLVKAQIWDTAGQERYRAITSAYYRGAVGALVVYDVTRHITFENAERWLTELRDHTDANIVVMLVGNKADLRHLRAVSPEEARAFAERHRTFSMETSALEATNVEDAFTEVLGEIYRVVSKKALDIGDDPAAPPRGKTIDVGGKDDVTPVNTGGCCSA

SEQ ID NO: 62434 - protein, 278 aa, Triticum aestivum
  peptide (1)..(278): Ceres Seq. ID no. 15175036
NQHHPRRPLLPFPETLLPKANPAEKKRDAPRRTALPLYIVALFSSRGEERRGARGGEGDQIRSNRRKPSIDRAAAATRKQEGRGDGGGVSRGGGVRLPVQGSADRGQRRGQVQPAVALRQGRVQPRHQVHHRRRVRHQDRPRRRQARQGADLGHRRPRKVPGHHQRVLPGRRGRARGVRRDAPHHVRERGAVADGAPRPHGRQHRGDAGREQGGPAPPEGRLARGGQGLRGAPPHLLHGDLRAGGHQRGGRLHRGARRDLPRRQQEGPRHRRRPRRAA

SEQ ID NO: 62435 - protein, 218 aa, Triticum aestivum
  peptide (1)..(218): Ceres Seq. ID no. 15175037
MAVAYRAEEEYDYLFKVVLIGDSGVGKSNLLSRFARDEFSLDTRSTIGVEFATKTVRVDGKLVKAQIWDTAGQERYRAITSAYYRGAVGALVVYDVTRHITFENAERWLTELRDHTDANIVVMLVGNKADLRHLRAVSPEEARAFAERHRTFSMETSALEATNVEDAFTEVLGEIYRVVSKKALDIGDDPAAPPRGKTIDVGGKDDVTPVNTGGCCSA

SEQ ID NO: 62436 - DNA, 887 bp, Triticum aestivum
  misc_feature (1)..(887): Ceres Seq. ID no. 15175022
agagtccttcccgagcgcggacagcgggctcctaccagcagcgtctccctccgacctccctggagcagccgctcacgcccagcaacgtcgccgcccggatctacgccgtcgaccattccataggcagggcatcaacactgtcaattgcagaggcttggacctgcttcggcatccagtagagcaaacaagaaggtcaagccggaaacaaatatttcatcctcgttcggacttctcatctcgcaatggaagccaagttctttcggttcctgaagcttgttggagttggcttcaaagccaggacagagcgcgaaggccgcgagttgtttctgaaactgggctacagccatgaggtgcagttcaccgctccacctgccgtccgcgtcttctgcttcaagcccaacataatatgctgtactggcattgacaagcatagagtgcaccatttcgctggagctgtccgatgcagtaaacctccagaagtgtacaaggggaagggcatactgtacatcgacgaggtcataaagctgaagccggggaagaaacagcagaagaagtaacacatgggtaaacctccccatttgacttctagcttgtttagacgccccatcacatttgtggtgccgcggatttcatgtggtttttctcgtgccgggttttggctagccctagtaccatgctggacttcgtaataatactctgtatgctatgggaatcatctggtgagcatgtactgtatgacttgcataccgtgggggcggatcagcacatttgaacatttgtgtttttgttttgggctggctagatgcatgtaacagcccaatgtgtttgttgatgtcactactttcttcatattttctctacacaatattagctcgttgctttgttac

SEQ ID NO: 62437 - protein, 115 aa, Triticum aestivum
  peptide (1)..(115): Ceres Seq. ID no. 15175023
ESFPSADSGLLPAASPSDLPGAAAHAQQRRRPDLRRRPFHRQGINTVNCRGLDLLRHPVEQTRRSSRKQIFHPRSDFSSRNGSQVLSVPEACWSWLQSQDRARRPRVVSETGLQP

SEQ ID NO: 62438 - protein, 104 aa, Triticum aestivum
  peptide (1)..(104): Ceres Seq. ID no. 15175024
MEAKFFRFLKLVGVGFKARTEREGRELFLKLGYSHEVQFTAPPAVRVFCFKPNIICCTGIDKHRVHHFAGAVRCSKPPEVYKGKGILYIDEVIKLKPGKKQQKK

SEQ ID NO: 62439 - protein, 58 aa, Triticum aestivum
  peptide (1)..(58): Ceres Seq. ID no. 15175025
SPSRARTAGSYQQRLPPTSLEQPLTPSNVAARIYAVDHSIGRASTLSIAEAWTCFGIQ

SEQ ID NO: 62440 - DNA, 1276 bp, Triticum aestivum
  misc_feature (1)..(1276): Ceres Seq. ID no. 12615976
agccagggcaaacagagaggacggacggaagaagtaagttccaggcagaggagacagagtgaccgacggagggaaggttccacctacccaccgagcgatcgaccgggcgggcggcgatccatggcggcgaacgggcatcagatccagccggcggaggaggcgatgaagctcatcatcgacaccgatcccggcatagacgacagcgtggcgatcatgatggcgttccaagcgccgggcgtggaggtcctagggctcaccaccatcttcggcaactgcaccaccgcatacgccacccgcaacgccttgatactgtgtgagaaggcaggccgccccgacgtgccggtggcggagggcagcgccgagcctctcaagggagggaagccgcaagttgccgactttgttcacggatccgatggcctcgggaacgtatcagttcctgaacctaccaccaagaaagcagagcaaaccgccgcagagtttctggtcgacaaggtgtcgcagttccccggggaggtctcggtgctcgccttgggccctctgaccaacctcgcattggccatcaagatggacccctcctttgtgagcaaggtgaagaagatagtggtgctgggtggagccttctttgcagcagggaatgccaccccttcagccgaggcaaacatccacagcgacccagaggcggcggacatggtgttcacgtcgggcgcggacatcgccgtggtcggcctcaacatcaccacccaggtgagcttcacggaggcggacctgtcggagctgaggaggtccgggggcaagcaggcgcagttcctctgcgacatctgcaagttctacagcgactggcacctccactcgtacggcgaccccgccgtgttcctgcacgacccggtgagcctcgcggcgctggtccggccggagctcttcacgttcaggaagggcgtggtgcgggtggagacccagggcatctgcagaggccacacctccatggacatggggctcaagaagttcaagtcggagaacgcgtggtcgggctacacgcccatctcggtggcgtggacggtggacaaggccaaggtggtcgccttcgtcaaggagctcctcaaaaattaatcaggagttcatgatctgtatatctggtcatcaaatgatttgaaaccgtagagatccgtcggtcgatcgacccgtaatttatgtgtaccccattctgacgcacttcatgcagacacattgtctcgtggaattattgaactgctcgtcgtgaattgtcatgatggaaccc

SEQ ID NO: 62441 - protein, 368 aa, Triticum aestivum
  peptide (1)..(368): Ceres Seq. ID no. 12615977
SQGKQRGRTEEVSSRQRRQSDRRREGSTYPPSDRPGGRRSMAANGHQIQPAEEAMKLIIDTDPGIDDSVAIMMAFQAPGVEVLGLTTIFGNCTTAYATRNALILCEKAGRPDVPVAEGSAEPLKGGKPQVADFVHGSDGLGNVSVPEPTTKKAEQTAAEFLVDKVSQFPGEVSVLALGPLTNLALAIKMDPSFVSKVKKIVVLGGAFFAAGNATPSAEANIHSDPEAADMVFTSGADIAVVGLNITTQVSFTEADLSELRRSGGKQAQFLCDICKFYSDWHLHSYGDPAVFLHDPVSLAALVRPELFTFRKGVVRVETQGICRGHTSMDMGLKKFKSENAWSGYTPISVAWTVDKAKVVAFVKELLKN

SEQ ID NO: 62442 - protein, 328 aa, Triticum aestivum
  peptide (1)..(328): Ceres Seq. ID no. 12615978
MAANGHQIQPAEEAMKLIIDTDPGIDDSVAIMMAFQAPGVEVLGLTTIFGNCTTAYATRNALILCEKAGRPDVPVAEGSAEPLKGGKPQVADFVHGSDGLGNVSVPEPTTKKAEQTAAEFLVDKVSQFPGEVSVLALGPLTNLALAIKMDPSFVSKVKKIVVLGGAFFAAGNATPSAEANIHSDPEAADMVFTSGADIAVVGLNITTQVSFTEADLSELRRSGGKQAQFLCDICKFYSDWHLHSYGDPAVFLHDPVSLAALVRPELFTFRKGVVRVETQGICRGHTSMDMGLKKFKSENAWSGYTPISVAWTVDKAKVVAFVKELLKN

SEQ ID NO: 62443 - protein, 314 aa, Triticum aestivum
  peptide (1)..(314): Ceres Seq. ID no. 12615979
MKLIIDTDPGIDDSVAIMMAFQAPGVEVLGLTTIFGNCTTAYATRNALILCEKAGRPDVPVAEGSAEPLKGGKPQVADFVHGSDGLGNVSVPEPTTKKAEQTAAEFLVDKVSQFPGEVSVLALGPLTNLALAIKMDPSFVSKVKKIVVLGGAFFAAGNATPSAEANIHSDPEAADMVFTSGADIAVVGLNITTQVSFTEADLSELRRSGGKQAQFLCDICKFYSDWHLHSYGDPAVFLHDPVSLAALVRPELFTFRKGVVRVETQGICRGHTSMDMGLKKFKSENAWSGYTPISVAWTVDKAKVVAFVKELLKN

SEQ ID NO: 62444 - DNA, 1251 bp, Triticum aestivum
  misc_feature (1)..(1251): Ceres Seq. ID no. 12615291
cttttttttccagcacagctagcagccagcgagttctttgcccgtctataaatgagccaaaacccaagccaacccgaggcacaaagctctacaaccagaagccaaaaccgaaccgaggaagcagcagcagatcaaaccgcagacgaagacaccgtcgcaagagaacgagagaatggcggccatctcctccacctcctacttctcctcgcagccgcagctgccggcgtccggaggcggcagcaacggccggcagccgcggaggcgtcggatggggggcagctgcgtcatgctcgaggcggccgctgcctctggtagtggtggtggcggcgtggtggtggggaggacgaggagcctgacggaggaggacctggaggagctcaagggctgcctcgacctcggcttcggcttctcctaccaccagatcccgggcctctgcgggacgctccccggcctggagctctgctactccatgacgcggaggttcctcgacgagcagaggacggtggtcgggcagctggagcccgttgcggcggcggcgcccatcccggactggaagatctccggccctggtgatagtccagaggaagtgaaagctaggctcaagtattgggcccagacagtggcatgcacagtcaaactatgcagctgatggagattggtagtgtgctggttctctcttaacatatatgctactacaagctgaactggaggtggctgaagttgaagaacgatgcttatatggtattgggcttggtgggcaagtgcagaggaggtgcttctgcttcgtgttatcgaggcgacagaactgaccactgcttttgccaaacttcggaggggggagaggattgctgacaacatggaactgagaaatcgcgaggcggtccgcagtcgagcttttctgaaagcatcagaagcttgccgttcctcgtgaggtgacttgtctctacatggcgcagcggttgcaagtgcctgagacctctgcttgtttctgctcttccttgtagtgctcactaggtgctccggttgcaccgtgctgctccggcttgagctttgcaaatccttgggtggatttgttcaattataattttgttttattgctcctttcaccttagatttgctttggagcagtagaccttgtataggacttgcatgtacgtatctgttgattctgctgtactgcactcggagggtgcagaaacagtttctgaaataaatttctgcgtccagcctaacagcaaactgtggctgttg

SEQ ID NO: 62445 - protein, 158 aa, Triticum aestivum
  peptide (1)..(158): Ceres Seq. ID no. 12615292
MAAISSTSYFSSQPQLPASGGGSNGRQPRRRRMGGSCVMLEAAAASGSGGGGVVVGRTRSLTEEDLEELKGCLDLGFGFSYHQIPGLCGTLPGLELCYSMTRRFLDEQRTVVGQLEPVAAAAPIPDWKISGPGDSPEEVKARLKYWAQTVACTVKLCS

SEQ ID NO: 62446 - protein, 126 aa, Triticum aestivum
  peptide (1)..(126): Ceres Seq. ID no. 12615293
MGGSCVMLEAAAASGSGGGGVVVGRTRSLTEEDLEELKGCLDLGFGFSYHQIPGLCGTLPGLELCYSMTRRFLDEQRTVVGQLEPVAAAAPIPDWKISGPGDSPEEVKARLKYWAQTVACTVKLCS

SEQ ID NO: 62447 - protein, 120 aa, Triticum aestivum
  peptide (1)..(120): Ceres Seq. ID no. 12615294
MLEAAAASGSGGGGVVVGRTRSLTEEDLEELKGCLDLGFGFSYHQIPGLCGTLPGLELCYSMTRRFLDEQRTVVGQLEPVAAAAPIPDWKISGPGDSPEEVKARLKYWAQTVACTVKLCS

SEQ ID NO: 62448 - DNA, 1428 bp, Triticum aestivum
  misc_feature (1)..(1428): Ceres Seq. ID no. 13596593
actcaccaacttttcctttgctggtttgttctcttgcgctttcccgaaaggaggaaagggggagaaaaaaatcgcacccaaatccttcgagcagaaccaaatccgtcacgactccacgagcgctcgagcagggcaacacagattcgcgcagcccacctcgtcgagcattccccatcagatcggatcgaatccggcggcggtgatggcggcggagaagctggccccggcgaaggtgctctactgcggcgtgtgcggcctccccgcggagtactgcgagttcggccccgacttcgagcgctgcaagccgtggctccgcgcccacgcgcccggcgtctaccccgacgagctcgtggcctcctcctccggcggcgatgataaggacgtcggcaaggtcggcgagcgcctccagggcgtcagcatctccaccgccgacggctccacaagcgcagggggtgcttcggcatcttctaagactgaagaggtgaaacgactgcccggtggcaagctcaagaaaaaggacaagcaagaggttattattgagaagattgtccgcaacaagcgcaagtgtgtcactgtggtgaaaggcctggatttgtttggtgtaaagctgagtgatgcttcaaagaagcttggaaagaagtttgctactggagcttcggttgtcaagggcccaactgagaaggagcaaatcgatgtccaaggagacatatcatatgatgttgtggacttcattacagctacatggcctgatgttcctgaatccgccgtatatttcatagaagatggaaggaaggttgctgctgcttgattgcatatggtttacaaggcaatacaccagtggagctacaaatatgatagaaatataaggcaagagatggccgttaaggcatgcctgtcaaatgggttctttatccttactcccaagacacaactcgctccattttgacttgtgggtcagttcacaagtggtgttttaattactgctggcatgtcgccttcgtgtatcatcttttatttgatagccgagttcctcctgcaggcaagtatgacatccatatgtggtttatatatgtttaatgtgcttttgaatcctagtttcagaacaattcagtaccaactatctgtggacctgcagagataagtgcagattagtagtgctccagtctcctgtgctttcataggaacagtctggtgttttgtgttactttgtattgcatccagcaagttataacctacttttagggagatagatcgttgtcggtgtgcaccattggtattttgtcatcattttgttgcagagtcctgtgtgaagcccattattataaaaaagaagcaagatagatctggatgatgcatcatgaattagtgtggccatgtaattattataaaagtatttccgataaattgccattttcattaaacttgttc

SEQ ID NO: 62449 - protein, 268 aa, Triticum aestivum
  peptide (1)..(268): Ceres Seq. ID no. 13596594
LTNFSFAGLFSCAFPKGGKGEKKIAPKSFEQNQIRHDSTSARAGQHRFAQPTSSSIPHQIGSNPAAVMAAEKLAPAKVLYCGVCGLPAEYCEFGPDFERCKPWLRAHAPGVYPDELVASSSGGDDKDVGKVGERLQGVSISTADGSTSAGGASASSKTEEVKRLPGGKLKKKDKQEVIIEKIVRNKRKCVTVVKGLDLFGVKLSDASKKLGKKFATGASVVKGPTEKEQIDVQGDISYDVVDFITATWPDVPESAVYFIEDGRKVAAA

SEQ ID NO: 62450 - protein, 201 aa, Triticum aestivum
  peptide (1)..(201): Ceres Seq. ID no. 13596595
MAAEKLAPAKVLYCGVCGLPAEYCEFGPDFERCKPWLRAHAPGVYPDELVASSSGGDDKDVGKVGERLQGVSISTADGSTSAGGASASSKTEEVKRLPGGKLKKKDKQEVIIEKIVRNKRKCVTVVKGLDLFGVKLSDASKKLGKKFATGASVVKGPTEKEQIDVQGDISYDVVDFITATWPDVPESAVYFIEDGRKVAAA

SEQ ID NO: 62451 - DNA, 1399 bp, Triticum aestivum
  misc_feature (1)..(1399): Ceres Seq. ID no. 12578315
ccaacacttgccttgcattgttaatgcgtgcggctgcagcgggcatagatcgaatataattgagatcgtcaatgccttccacagaatcggccgccggcgtggcctgggaccgccggcgtgagctgcaggcgtttgacgacaccaaggcgggcgtcaagggcctcgtggacgccggcgtcacggccctcccgcccatcttccgccactcgccggagtccctggagagcatcacgtcctcaaaccatgtcgcgggggccatcccgaccgtcgacctagcggccccgcgacgcgaggacgcggtcgccctggtgcggcacgcggccaggacggtgggcttctttcaggtggtcaaccatggcgtgccggccgagctcatggccggcatgctcgagggggtgcgccggttcaacgagggacccgccgaggcgaagcaggccatctacagcagggaccaagctcgcaaggtgcgtttcgcctccaacttcgacctcttctcgtcggcggcggccaactggcgcgacaccctcttcttccacctcgctccggacccggcaccttccgaagagctgcccgaggctgtcagggatgtggtcacggagtacggccacgcggtgaccaaggtggggctgtccgtgctggagctgctgtcggagtcccttggcctgagcagcgaccacctgcgcgacatggactgcgcggagaacctcaacgccgtgtgccaatactacccaccgtgtccggagccgtatctcacttggggcaccaagaggcacaccgacccgggcttcctcaccgtcctcctgcaagacggcatgggcggcctccaggtgctcgtcgacggcaagacctgggtggatgtccctcccgtgcccggcgctttcatcatcaacatcggcgaccttcttcagctcgtcagcaatgaccagttcaggagcgtggagcaccgagtcctggcgaacaagagcaaagacaccgctagggtctctgtggcgtccttcttcaacaccaacattgagagatcgacgaggttgtatggccccatcaccgatggacgcaaccccccgatctacaggagcgtcaccgctagagagttcatcgcaacgtttaatcgcataggccttgatggtcgctcgctcgaccagtaccggttggaccgggatactcccacacctgccgtggaggggtgtgaatgaagcgggcatttccgtttctttataatttatttgcaagtttaaatttaagcattttcaaataagggaacgtactcgctttctcaactaaagtgtcagaaccgtggacaaaagtctctcgctccaccaaagtatgagcagcaccacaaaagtgagagactgttggaaagatgccccagacgcaataataaagttattaagtattatcc

SEQ ID NO: 62452 - protein, 373 aa, Triticum aestivum
  peptide (1)..(373): Ceres Seq. ID no. 12578316
MPSTESAAGVAWDRRRELQAFDDTKAGVKGLVDAGVTALPPIFRHSPESLESITSSNHVAGAIPTVDLAAPRREDAVALVRHAARTVGFFQVVNHGVPAELMAGMLEGVRRFNEGPAEAKQAIYSRDQARKVRFASNFDLFSSAAANWRDTLFFHLAPDPAPSEELPEAVRDVVTEYGHAVTKVGLSVLELLSESLGLSSDHLRDMDCAENLNAVCQYYPPCPEPYLTWGTKRHTDPGFLTVLLQDGMGGLQVLVDGKTWVDVPPVPGAFIINIGDLLQLVSNDQFRSVEHRVLANKSKDTARVSVASFFNTNIERSTRLYGPITDGRNPPIYRSVTAREFIATFNRIGLDGRSLDQYRLDRDTPTPAVEGCE

SEQ ID NO: 62453 - protein, 272 aa, Triticum aestivum
  peptide (1)..(272): Ceres Seq. ID no. 12578317
MAGMLEGVRRFNEGPAEAKQAIYSRDQARKVRFASNFDLFSSAAANWRDTLFFHLAPDPAPSEELPEAVRDVVTEYGHAVTKVGLSVLELLSESLGLSSDHLRDMDCAENLNAVCQYYPPCPEPYLTWGTKRHTDPGFLTVLLQDGMGGLQVLVDGKTWVDVPPVPGAFIINIGDLLQLVSNDQFRSVEHRVLANKSKDTARVSVASFFNTNIERSTRLYGPITDGRNPPIYRSVTAREFIATFNRIGLDGRSLDQYRLDRDTPTPAVEGCE

SEQ ID NO: 62454 - protein, 269 aa, Triticum aestivum
  peptide (1)..(269): Ceres Seq. ID no. 12578318
MLEGVRRFNEGPAEAKQAIYSRDQARKVRFASNFDLFSSAAANWRDTLFFHLAPDPAPSEELPEAVRDVVTEYGHAVTKVGLSVLELLSESLGLSSDHLRDMDCAENLNAVCQYYPPCPEPYLTWGTKRHTDPGFLTVLLQDGMGGLQVLVDGKTWVDVPPVPGAFIINIGDLLQLVSNDQFRSVEHRVLANKSKDTARVSVASFFNTNIERSTRLYGPITDGRNPPIYRSVTAREFIATFNRIGLDGRSLDQYRLDRDTPTPAVEGCE

SEQ ID NO: 62455 - DNA, 1370 bp, Triticum aestivum
  misc_feature (1)..(1370): Ceres Seq. ID no. 12615972
actaccccgctgccgttaccactctccacgagaccgcagccgattagagccgttgctccaggaacgcagctcgcccgcaccgcgccacgcgacagctcgctcgctagcccgtatgtcgtgggcgccatggccggctcgcggcgcgacgcggaccagaaggagaaggccccgccggcggcgccgccgcagcagcagccggggcgcgaggaggagagggagtgggtgccgtggatcgtgccggtcttcgtggccgccaacgtcgccctgttcgccgtggcgatgtacgccaacaactgccccgcgcacgcgcgcggcggccgcggcggcaggaagtgcgtcggcgcggggttcctccgccgcttcgccttccagccgctcagccagaacccgctcctcgggccctcctccgccacattgcagaagctgggcgcgctcgtgtgggacaaggtggtgcacgagcaccaggggtggagactcgtgacctgcatctggctccacgccggcgtcgtccacctgctcgccaacatgctcagcctcgtgctcgtcgggctcaggctggagcagcagttcggatttgtgagagtcggcgtcatctacctcgtctccggcgtcgggggcagcgtgatgtcgtccctgttcatcagagacaacatctccgtgggcgcgtccggtgcgctcttcgggctcctcggagccatgctctcagagctcttcaccaactggaccatctacaccaacaaggcggcggcgctggtgacgttgctgttcgtgatcgcggtcaatctggcgatcggcatcctgccgcacgtggacaacttcgcgcacatcggggggttcctcacggggttcctcctcgggttcgtactgctcatgcgcccgcactacggctgggcgcagcgctacgtgctgccgtcctccgtcaaggacgtcggccggaagttcctggcctaccagtgggctctgctcgccctggcctcggtcctggtcgtcatcgggctggcggttgggatggcgatgctcttccgaggggtgaacggcaacgagcactgcgagtggtgccactacctcagctgcgtgccgaccgccagatggagctgcgggaaatgaaatgggagcaagcaacttcatggacctccatattacttcgttcttttccgcacaggcattttgatgcgcagatgctgtatatacgagtactgctatataacggattacacccctggatttactcgatgattgtttccttcggttgttggacttgaaaaacggggaatatcttgaatcttacacctgcatgtgcctgacagcgcggctgccttttaaatttgtgtgccaaacagatccatctttatataatttacccaatgatt

SEQ ID NO: 62456 - protein, 368 aa, Triticum aestivum
  peptide (1)..(368): Ceres Seq. ID no. 12615973
TTPLPLPLSTRPQPIRAVAPGTQLARTAPRDSSLASPYVVGAMAGSRRDADQKEKAPPAAPPQQQPGREEEREWVPWIVPVFVAANVALFAVAMYANNCPAHARGGRGGRKCVGAGFLRRFAFQPLSQNPLLGPSSATLQKLGALVWDKVVHEHQGWRLVTCIWLHAGVVHLLANMLSLVLVGLRLEQQFGFVRVGVIYLVSGVGGSVMSSLFIRDNISVGASGALFGLLGAMLSELFTNWTIYTNKAAALVTLLFVIAVNLAIGILPHVDNFAHIGGFLTGFLLGFVLLMRPHYGWAQRYVLPSSVKDVGRKFLAYQWALLALASVLVVIGLAVGMAMLFRGVNGNEHCEWCHYLSCVPTARWSCGK

SEQ ID NO: 62457 - protein, 326 aa, Triticum aestivum
  peptide (1)..(326): Ceres Seq. ID no. 12615974
MAGSRRDADQKEKAPPAAPPQQQPGREEEREWVPWIVPVFVAANVALFAVAMYANNCPAHARGGRGGRKCVGAGFLRRFAFQPLSQNPLLGPSSATLQKLGALVWDKVVHEHQGWRLVTCIWLHAGVVHLLANMLSLVLVGLRLEQQFGFVRVGVIYLVSGVGGSVMSSLFIRDNISVGASGALFGLLGAMLSELFTNWTIYTNKAAALVTLLFVIAVNLAIGILPHVDNFAHIGGFLTGFLLGFVLLMRPHYGWAQRYVLPSSVKDVGRKFLAYQWALLALASVLVVIGLAVGMAMLFRGVNGNEHCEWCHYLSCVPTARWSCGK

SEQ ID NO: 62458 - protein, 275 aa, Triticum aestivum
  peptide (1)..(275): Ceres Seq. ID no. 12615975
MYANNCPAHARGGRGGRKCVGAGFLRRFAFQPLSQNPLLGPSSATLQKLGALVWDKVVHEHQGWRLVTCIWLHAGVVHLLANMLSLVLVGLRLEQQFGFVRVGVIYLVSGVGGSVMSSLFIRDNISVGASGALFGLLGAMLSELFTNWTIYTNKAAALVTLLFVIAVNLAIGILPHVDNFAHIGGFLTGFLLGFVLLMRPHYGWAQRYVLPSSVKDVGRKFLAYQWALLALASVLVVIGLAVGMAMLFRGVNGNEHCEWCHYLSCVPTARWSCGK

SEQ ID NO: 62459 - DNA, 1132 bp, Triticum aestivum
  misc_feature (1)..(1132): Ceres Seq. ID no. 13654847
aaacgagatcagcgtctcgtgaatcctacggcccattcccccccgatcccctcccactttttcgtgctttactccaaagcgcaaggcgccttctcgcttccgcccctctccttcctcctcgccctcctctccgcccgccgcctgctcgccgtccgatccgccgccccccgtccgtctccatgggtctgctgtccaacaggatcgggaaggagagcctgaaggcgggggatcacatctactcgtggagggccgcgtgggtctacgcgcatcacggaatatatgtgggcgatgataaggtgattcattttaccagaggaagggaccaagaagtcggaacaggaactgtcattgattttcttcttgtgagctctggccctaataggagcaccacaccatgcttagtatgcagcagcgaagaagccaccaccgccgcggagacaaatggtgtgacttcctcttgcctcagctgtttcctggcagggggtgccctctatcgtttcgagtatgacgtcaacccggcactcttccttgccaaagtgcgaggagggacctgcacgcttgccgccactgatcccggcgaggtggttgtccgacgcgccaaatacttgttgaccaatggtttcaggtgctacagcctgttcaagaacaactgcgaggactttgcgatatactgcaagactggtctgcttgtggctgagcagggcaacgtcgggctcgggcagagtgggcaggctgtgtccatcatcggcggccctcttgctgctgtggtttcaacccctttccgcctagtaaccacaaacatctatggagtggcagtgatggctgttggggtgtattgtgtcagcaggtacgcaggtgacattggcaaccgccgagacgtgctgaaactggaagtggaggacctgactgccgggctcgcaagcggccggattcgtccagcgaacatcagtcagctggcaactccggggcaagtccaggctccggcagtgaccacactcgttgctgcttagaatgcagcactgatgttgtaaaatatggagatgtatacatcaccatcactactgctatatgtaccaccggaatagttgttcaaacctgctaaaactgtgccaagagtgaaatcccatcagca

SEQ ID NO: 62460 - protein, 335 aa, Triticum aestivum
  peptide (1)..(335): Ceres Seq. ID no. 13654848
TRSASRESYGPFPPDPLPLFRALLQSARRLLASAPLLPPRPPLRPPPARRPIRRPPSVSMGLLSNRIGKESLKAGDHIYSWRAAWVYAHHGIYVGDDKVIHFTRGRDQEVGTGTVIDFLLVSSGPNRSTTPCLVCSSEEATTAAETNGVTSSCLSCFLAGGALYRFEYDVNPALFLAKVRGGTCTLAATDPGEVVVRRAKYLLTNGFRCYSLFKNNCEDFAIYCKTGLLVAEQGNVGLGQSGQAVSIIGGPLAAVVSTPFRLVTTNIYGVAVMAVGVYCVSRYAGDIGNRRDVLKLEVEDLTAGLASGRIRPANISQLATPGQVQAPAVTTLVAA

SEQ ID NO: 62461 - protein, 276 aa, Triticum aestivum
  peptide (1)..(276): Ceres Seq. ID no. 13654849
MGLLSNRIGKESLKAGDHIYSWRAAWVYAHHGIYVGDDKVIHFTRGRDQEVGTGTVIDFLLVSSGPNRSTTPCLVCSSEEATTAAETNGVTSSCLSCFLAGGALYRFEYDVNPALFLAKVRGGTCTLAATDPGEVVVRRAKYLLTNGFRCYSLFKNNCEDFAIYCKTGLLVAEQGNVGLGQSGQAVSIIGGPLAAVVSTPFRLVTTNIYGVAVMAVGVYCVSRYAGDIGNRRDVLKLEVEDLTAGLASGRIRPANISQLATPGQVQAPAVTTLVAA

SEQ ID NO: 62462 - DNA, 1738 bp, Triticum aestivum
  misc_feature (1)..(1738): Ceres Seq. ID no. 15176122
ccaagcgccaaaccctctccccatccgtcttcctcgtgctctccgcccctccccttctcccctcccatcctctcctctctttatacgcctccgccccgagctctcctcccccattccgccgcattacgtcgcgcacacgggcaggggagagccggcagcggagagagagcaggagacgagatggcggccgcgtccttcaccgccgccaagttcctggcgccggcggccgcgagatccggcggcgaccgggcgcccttccccgcgccgtccgcgttctccatgcgctcgctccgccacaggcccgccaggcgcctcagctccgtcctggccgtctcctccgacgtgctcaaggccgcgcccgccgccgccgcgtacccggctgtgacacgcgaagaggcattggagctttacgaggacatgatccttggccgtaacttcgaagacatgtgcgcgcaaatgtactaccgtggcaagatgtttggtttcgtccatctttacaacgggcaggaggccgtctccaccggcttcatcaagcagctgaaccaacccgactgtgtcgtcagcacgtaccgtgaccacgtccacgcgctgtccaagggtgtcccggcccgtgcagtcatggccgagctctttggcaaggccactggctgctgccgtggacagggtggttccatgcacatgttctctgaaccccacaacctccttggaggctttgccttcattggcgagggcatccctgtcgccactggcgctgcctttgccgccaagtaccgccatgaggtgctcaagcagtctagccctgatgggcttgatgtcacacttgcattctttggggacggtacctgtaacaacggccagttctttgagtgcctgaacatggctcagctgtggaagcttccgattatttttgttgtggagaacaacctatgggcaatcgggatgtctcaccttaggtctacttcagatcccgagatctggaagaagggcccagcattcggaatgcctggggtacacgtcgatgggatggatgtcctgaaggtcagggaggtggctaaggaggcaattgacagggcaaggagaggtgaaggaccaactctagtggaatgtgaaacttaccggttcagaggccactctcttgctgatccagatgaactcaggaggcccgatgagaaatctcactacgccgcaagggaccccatcacctccctgaagaagtacatcatcgagcagaacctcgcgtccgaagccgagctgaagaacatcgagaagaagattgacgacgtcgtcgaagaggctgtggagtttgccgacgcgagcccgctgcccccacggagccagctgctggagaacgtgtttgccgatcccaagggcttcggcatcggccccgacggcaagtacaggtgcgaggaccccaagttcacccaaggcacggcgcaagtctaagggccgctgctgcagaagcagcttgtttacgcctcttttctcatgtactacctctctagctacctgcccctagttttgtcgatcccgccgtcgatttcttgtgttgttagaggtcacatatcactgtaattcattgctcgctgtgccaccgtgcggcgtctgatgcccccagttttttttacccaagaaatgttccccagtccagttgttgttctacagtaactctacatctgtctggtttgtagtaattggtacagatattggaagagatgtgaaacataatagtatctgttgt

SEQ ID NO: 62463 - protein, 480 aa, Triticum aestivum
  peptide (1)..(480): Ceres Seq. ID no. 15176123
PSAKPSPHPSSSCSPPLPFSPPILSSLYTPPPRALLPHSAALRRAHGQGRAGSGERAGDEMAAASFTAAKFLAPAAARSGGDRAPFPAPSAFSMRSLRHRPARRLSSVLAVSSDVLKAAPAAAAYPAVTREEALELYEDMILGRNFEDMCAQMYYRGKMFGFVHLYNGQEAVSTGFIKQLNQPDCVVSTYRDHVHALSKGVPARAVMAELFGKATGCCRGQGGSMHMFSEPHNLLGGFAFIGEGIPVATGAAFAAKYRHEVLKQSSPDGLDVTLAFFGDGTCNNGQFFECLNMAQLWKLPIIFVVENNLWAIGMSHLRSTSDPEIWKKGPAFGMPGVHVDGMDVLKVREVAKEAIDRARRGEGPTLVECETYRFRGHSLADPDELRRPDEKSHYAARDPITSLKKYIIEQNLASEAELKNIEKKIDDVVEEAVEFADASPLPPRSQLLENVFADPKGFGIGPDGKYRCEDPKFTQGTAQV

SEQ ID NO: 62464 - protein, 420 aa, Triticum aestivum
  peptide (1)..(420): Ceres Seq. ID no. 15176124
MAAASFTAAKFLAPAAARSGGDRAPFPAPSAFSMRSLRHRPARRLSSVLAVSSDVLKAAPAAAAYPAVTREEALELYEDMILGRNFEDMCAQMYYRGKMFGFVHLYNGQEAVSTGFIKQLNQPDCVVSTYRDHVHALSKGVPARAVMAELFGKATGCCRGQGGSMHMFSEPHNLLGGFAFIGEGIPVATGAAFAAKYRHEVLKQSSPDGLDVTLAFFGDGTCNNGQFFECLNMAQLWKLPIIFVVENNLWAIGMSHLRSTSDPEIWKKGPAFGMPGVHVDGMDVLKVREVAKEAIDRARRGEGPTLVECETYRFRGHSLADPDELRRPDEKSHYAARDPITSLKKYIIEQNLASEAELKNIEKKIDDVVEEAVEFADASPLPPRSQLLENVFADPKGFGIGPDGKYRCEDPKFTQGTAQV

SEQ ID NO: 62465 - protein, 387 aa, Triticum aestivum
  peptide (1)..(387): Ceres Seq. ID no. 15176125
MRSLRHRPARRLSSVLAVSSDVLKAAPAAAAYPAVTREEALELYEDMILGRNFEDMCAQMYYRGKMFGFVHLYNGQEAVSTGFIKQLNQPDCVVSTYRDHVHALSKGVPARAVMAELFGKATGCCRGQGGSMHMFSEPHNLLGGFAFIGEGIPVATGAAFAAKYRHEVLKQSSPDGLDVTLAFFGDGTCNNGQFFECLNMAQLWKLPIIFVVENNLWAIGMSHLRSTSDPEIWKKGPAFGMPGVHVDGMDVLKVREVAKEAIDRARRGEGPTLVECETYRFRGHSLADPDELRRPDEKSHYAARDPITSLKKYIIEQNLASEAELKNIEKKIDDVVEEAVEFADASPLPPRSQLLENVFADPKGFGIGPDGKYRCEDPKFTQGTAQV

SEQ ID NO: 62466 - DNA, 941 bp, Triticum aestivum
  misc_feature (1)..(941): Ceres Seq. ID no. 13654854
aagcggcgccggcggctagcgagatcgcggcggtgggtgtgatcggcgcggggcagatgggctcgggcatcgcccagctcgccgccgccgccggctgcggcgtcttcctcctcgactccgaccccgcggccctctcccgtgccgtcgcctccatctcctcctccctcggccgcctcgtctccaagggccagctctcccaggctgcgtgcgatgattccgtcaagcggataaagtgcgtctccgatgtgcaagagctgcggggcgtggatctggtgattgaggccatcgttgagtccgaagacgtcaagaagaagctgttcgtggagctggacaggatcaccaaaccttctgccattcttgcgtccaacaccagctccatttctataacccggctcgcctcagctactagccgcccctctcaggtgataggcatgcacttttttaaccctcctcctataatgaagctggttgaaataatacgaggagctgatacatccgaagaggttttctctcaaggtaaatctttctctgaaaggattgggaagaccgttatatgctcacaagattatcccggcttcatggtaaaccgcatcctaatgccgatgattaatgaagcattttgggcactttacactggggtagcaaccaaagaggacatcgacgcagggatgaagctcggcacgaatcatccaatggggcctctgcagcttgctgacttcatagggttagatgtttgcctttcagtacttagggtgctccacaacgggctaggagataacaagtacagcccttgccctcttcttgtccaatatgtcgatgccggacgacttggaaagaagcgcggactaggtgtatctcttacaggagaaactcttcatccgttaaacccaaatcatctctgtaaaaatatcagcgcggctgttgagcaaagaaatgaagtt

SEQ ID NO: 62467 - protein, 313 aa, Triticum aestivum
  peptide (1)..(313): Ceres Seq. ID no. 13654855
AAPAASEIAAVGVIGAGQMGSGIAQLAAAAGCGVFLLDSDPAALSRAVASISSSLGRLVSKGQLSQAACDDSVKRIKCVSDVQELRGVDLVIEAIVESEDVKKKLFVELDRITKPSAILASNTSSISITRLASATSRPSQVIGMHFFNPPPIMKLVEIIRGADTSEEVFSQGKSFSERIGKTVICSQDYPGFMVNRILMPMINEAFWALYTGVATKEDIDAGMKLGTNHPMGPLQLADFIGLDVCLSVLRVLHNGLGDNKYSPCPLLVQYVDAGRLGKKRGLGVSLTGETLHPLNPNHLCKNISAAVEQRNEV

SEQ ID NO: 62468 - protein, 295 aa, Triticum aestivum
  peptide (1)..(295): Ceres Seq. ID no. 13654856
MGSGIAQLAAAAGCGVFLLDSDPAALSRAVASISSSLGRLVSKGQLSQAACDDSVKRIKCVSDVQELRGVDLVIEAIVESEDVKKKLFVELDRITKPSAILASNTSSISITRLASATSRPSQVIGMHFFNPPPIMKLVEIIRGADTSEEVFSQGKSFSERIGKTVICSQDYPGFMVNRILMPMINEAFWALYTGVATKEDIDAGMKLGTNHPMGPLQLADFIGLDVCLSVLRVLHNGLGDNKYSPCPLLVQYVDAGRLGKKRGLGVSLTGETLHPLNPNHLCKNISAAVEQRNEV

SEQ ID NO: 62469 - protein, 170 aa, Triticum aestivum
  peptide (1)..(170): Ceres Seq. ID no. 13654857
MHFFNPPPIMKLVEIIRGADTSEEVFSQGKSFSERIGKTVICSQDYPGFMVNRILMPMINEAFWALYTGVATKEDIDAGMKLGTNHPMGPLQLADFIGLDVCLSVLRVLHNGLGDNKYSPCPLLVQYVDAGRLGKKRGLGVSLTGETLHPLNPNHLCKNISAAVEQRNEV

SEQ ID NO: 62470 - DNA, 1102 bp, Triticum aestivum
  misc_feature (1)..(1102): Ceres Seq. ID no. 12615217
actctccactcggccttcccctcgctaccactccgcctgctgccgcgccatggcgctccacgccgtctcccctgcggcggcggcctccccaccctgcgccctctcctctgcccgtctgccccagcgcccaggttgtggttgtctctcaaaccgttcatccctgttaagttcgtccacaaacttcatgaaatttcagtatggagcagtgggtttctttggtgtgcctttggttcttcaacactcggacaagagagcagttttgaggcatgccactaatgaagaaattgaggaagaaaagatgatcgttgaagaacaagctaaagaaaagatggagaaggccattgaaacagttcaatcgaacttcaataccgtcaggactgggcgggcaaacccgtctatgctcgacaggattgaggttgagtactatggaactcctgtaaacttgaagactattgcacagataaataccccagatgcgacttctcttcttatccaaccatatgacaagtcttgcctcaagctcattgagaaagctatagttgctgcaaatattggggtaacaccaagcaatgatggagaagtgatacgagtcactgtcccaccattgacatctgaccgcagaaaggaaatgacaaaaaccgtagccaagttatctgaagaaggcaaggttgctatcagaaacataagacgagatgcaatcaaagcctacgataagctagagaaggaaaagaaactttctgaagataatgtgaaggatttatcagccgatctacaaaaaatcacagacgagtacatgaagaaggttgaagccatccaaaagcaaaaggaacaggagctgagcaaggtttagatccagacccgactccgactgaacaaaaactggctacatgttttctgaagccctcctctggtcatcggatggctgccagtgcgatggggtgcactcgttgggttgttggagtctcgctaagactgatggatgcaaagttgagacagtgttgctgcgtccctcctttcccttttgtaattaggccttccccgtcttcctgtccgactgccattgtcaatatttccatgaattaaattctgtgatgtgcactcc

SEQ ID NO: 62471 - protein, 282 aa, Triticum aestivum
  peptide (1)..(282): Ceres Seq. ID no. 12615218
LSTRPSPRYHSACCRAMALHAVSPAAAASPPCALSSARLPQRPGCGCLSNRSSLLSSSTNFMKFQYGAVGFFGVPLVLQHSDKRAVLRHATNEEIEEEKMIVEEQAKEKMEKAIETVQSNFNTVRTGRANPSMLDRIEVEYYGTPVNLKTIAQINTPDATSLLIQPYDKSCLKLIEKAIVAANIGVTPSNDGEVIRVTVPPLTSDRRKEMTKTVAKLSEEGKVAIRNIRRDAIKAYDKLEKEKKLSEDNVKDLSADLQKITDEYMKKVEAIQKQKEQELSKV

SEQ ID NO: 62472 - protein, 266 aa, Triticum aestivum
  peptide (1)..(266): Ceres Seq. ID no. 12615219
MALHAVSPAAAASPPCALSSARLPQRPGCGCLSNRSSLLSSSTNFMKFQYGAVGFFGVPLVLQHSDKRAVLRHATNEEIEEEKMIVEEQAKEKMEKAIETVQSNFNTVRTGRANPSMLDRIEVEYYGTPVNLKTIAQINTPDATSLLIQPYDKSCLKLIEKAIVAANIGVTPSNDGEVIRVTVPPLTSDRRKEMTKTVAKLSEEGKVAIRNIRRDAIKAYDKLEKEKKLSEDNVKDLSADLQKITDEYMKKVEAIQKQKEQELSKV

SEQ ID NO: 62473 - protein, 221 aa, Triticum aestivum
  peptide (1)..(221): Ceres Seq. ID no. 12615220
MKFQYGAVGFFGVPLVLQHSDKRAVLRHATNEEIEEEKMIVEEQAKEKMEKAIETVQSNFNTVRTGRANPSMLDRIEVEYYGTPVNLKTIAQINTPDATSLLIQPYDKSCLKLIEKAIVAANIGVTPSNDGEVIRVTVPPLTSDRRKEMTKTVAKLSEEGKVAIRNIRRDAIKAYDKLEKEKKLSEDNVKDLSADLQKITDEYMKKVEAIQKQKEQELSKV

SEQ ID NO: 62474 - DNA, 1360 bp, Triticum aestivum
  misc_feature (1)..(1360): Ceres Seq. ID no. 14313451
attcatccatccatcttgccgagcgctacaatggcgagcatcagaagtgtctcccctctcctcgctccgctcgccgccgcggccacggtgctcgccgtgttgatgtctgcgccggtgtccgccaggagcttgccggagggcctcccggacatcaagccgctgctgtccaacccgtggtcggcgttccagaacctgtccggctgccagttcggggaccagcggcaggggctcgcgaggctcaaggactacctcagccgcttcggctacctccccgcgccgccggccaagttcaacgacatgttcgacgccgacatggagtccgccatccggacctaccagcacaacttcggcctcgaggccacgggccagctggacgcgtccaccgtcgccaagatgatgtccccgcgctgcggcgtcgccgacatcatcaacggcacctccgccatgggcaagacgacggtccacggccggaacctctactcctacttcccggggtccccctcgtggccgcgctccaagaagagcctccggtacgccatcacggcggccaccgagacgaccatcgaccgggccacgctgagcaaggtgttcgccagcgccttcgcacgctggtcggcggccaccacgctcaacttcaccgagacggcgtcggcgtccgacgccgacatcaccatcgggttccactcgggcgaccacggcgacggcgaggccttcgacgggccgctgggcacgttggcgcacgccttctcgcccaccgacggccggttccacctggacgcgtcggaggcctgggtggccggcggcgacgtgtcgcgcgcctcgctggacgccgccgtcgacctggagtcggtggccgtgcacgagatcggccacctgctggggctcggccactcgtcggtggagggcgccatcatgtacccgaccatcacgtcgcgcacgcagaaggtggagctggccaaagacgacgtcgacggcatccagagcctctacggcggcaaccccaacttcaagggcgtcacgccgccggccaccagcagcgaggagacccacagcgccgccccgcgcgcgctctccggcccgtggagcggcctggccggggcggctgcgctcgcactagccttgtcgtgctagttcttcttgcgtcgatcgattcacgaccatttttttaacgggcatatattcactttgctctaggatttgtgttgtacaaacattagtcactgggtgtgcaagatagtgtagatacgtgaattttgcgtgtatagatcgaatcatatagtacgatagtggtgcgcccatgtggccatgtgatatcatatgagttttgcagaatgtgccattgtgagttgtcaaaaaaaat

SEQ ID NO: 62475 - protein, 388 aa, Triticum aestivum
  peptide (1)..(388): Ceres Seq. ID no. 14313452
SSIHLAERYNGEHQKCLPSPRSARRRGHGARRVDVCAGVRQELAGGPPGHQAAAVQPVVGVPEPVRLPVRGPAAGAREAQGLPQPLRLPPRAAGQVQRHVRRRHGVRHPDLPAQLRPRGHGPAGRVHRRQDDVPALRRRRHHQRHLRHGQDDGPRPEPLLLLPGVPLVAALQEEPPVRHHGGHRDDHRPGHAEQGVRQRLRTLVGGHHAQLHRDGVGVRRRHHHRVPLGRPRRRRGLRRAAGHVGARLLAHRRPVPPGRVGGLGGRRRRVARLAGRRRRPGVGGRARDRPPAGARPLVGGGRHHVPDHHVAHAEGGAGQRRRRRHPEPLRRQPQLQGRHAAGHQQRGDPQRRPARALRPVERPGRGGCARTSLVVLVLLASIDSRPFF

SEQ ID NO: 62476 - protein, 376 aa, Triticum aestivum
  peptide (1)..(376): Ceres Seq. ID no. 14313453
IHPSILPSATMASIRSVSPLLAPLAAAATVLAVLMSAPVSARSLPEGLPDIKPLLSNPWSAFQNLSGCQFGDQRQGLARLKDYLSRFGYLPAPPAKFNDMFDADMESAIRTYQHNFGLEATGQLDASTVAKMMSPRCGVADIINGTSAMGKTTVHGRNLYSYFPGSPSWPRSKKSLRYAITAATETTIDRATLSKVFASAFARWSAATTLNFTETASASDADITIGFHSGDHGDGEAFDGPLGTLAHAFSPTDGRFHLDASEAWVAGGDVSRASLDAAVDLESVAVHEIGHLLGLGHSSVEGAIMYPTITSRTQKVELAKDDVDGIQSLYGGNPNFKGVTPPATSSEETHSAAPRALSGPWSGLAGAAALALALSC

SEQ ID NO: 62477 - protein, 366 aa, Triticum aestivum
  peptide (1)..(366): Ceres Seq. ID no. 14313454
MASIRSVSPLLAPLAAAATVLAVLMSAPVSARSLPEGLPDIKPLLSNPWSAFQNLSGCQFGDQRQGLARLKDYLSRFGYLPAPPAKFNDMFDADMESAIRTYQHNFGLEATGQLDASTVAKMMSPRCGVADIINGTSAMGKTTVHGRNLYSYFPGSPSWPRSKKSLRYAITAATETTIDRATLSKVFASAFARWSAATTLNFTETASASDADITIGFHSGDHGDGEAFDGPLGTLAHAFSPTDGRFHLDASEAWVAGGDVSRASLDAAVDLESVAVHEIGHLLGLGHSSVEGAIMYPTITSRTQKVELAKDDVDGIQSLYGGNPNFKGVTPPATSSEETHSAAPRALSGPWSGLAGAAALALALSC

SEQ ID NO: 62478 - DNA, 1056 bp, Triticum aestivum
  misc_feature (1)..(1056): Ceres Seq. ID no. 13585286
cttcgcgtttcttccccccacagtctcttttactctccccttctccttccccaagccaagcaaaggcagcagaggccaagaaatgggcgaccgggcgtacgggccgtcctccaagccggtccctgtggcggcaccgcggtccgccaacggcacggcgaacggcggcggtgtagggacacctcggcctccgtccatggtgcccggtcgcgtcccgccgccgccgatgtaccgaccaaagccgatgcaaccgccaccgggccgtcggcggagcgggcgcgggtggtgctgcgcgtgttgcctgtggctgacgctggtgttggtggggctggtgttccttggagcaatagcgttgggggtgttctacgtgatttaccacccggagcttccgaccttcgccgtgacgtcgctccgtctggcggcgctgaacgtctccgactccgactccgtcacctcccgcatcgagttcacggtgaccgcgcgcaaccccaacgagaagatcgcgttcgtgtacggcgacatcggggctgccttcgcggccgacggcacggacatcggggacggcaccgtgccgggcttcctccaccccagccgcaacacgacggtcatcaaggggtcggcttcggcggccgccgcgacggtggacccggtgcaggcggccagtctcagatccaagaagtcccatgcgatgtcagtggagatggactccaaggtgggtttccagatcgggcagttcaagtcgaagcgcatcagcgtccgtgtgctgtgcggtggcttcagcgcggggctggccaagccggcgccctccccggcgccgatcatcgtggccgcggcgcctgcgccgacccggtcaaaaatcaggctgtcgtcgtcttccaccggaggcggcgggtcggcgacgacggacgcaaagtgtaagctccgcgtcaagatctggatttggacgttttgatgcatctgcgggtagggagaggagggatttttttcggtttggtttaacctttttcacactgtatgtggatttattggagtatagtctatatgattttatcttcctct

SEQ ID NO: 62479 - protein, 315 aa, Triticum aestivum
  peptide (1)..(315): Ceres Seq. ID no. 13585287
FAFLPPTVSFTLPFSFPKPSKGSRGQEMGDRAYGPSSKPVPVAAPRSANGTANGGGVGTPRPPSMVPGRVPPPPMYRPKPMQPPPGRRRSGRGWCCACCLWLTLVLVGLVFLGAIALGVFYVIYHPELPTFAVTSLRLAALNVSDSDSVTSRIEFTVTARNPNEKIAFVYGDIGAAFAADGTDIGDGTVPGFLHPSRNTTVIKGSASAAAATVDPVQAASLRSKKSHAMSVEMDSKVGFQIGQFKSKRISVRVLCGGFSAGLAKPAPSPAPIIVAAAPAPTRSKIRLSSSSTGGGGSATTDAKCKLRVKIWIWTF

SEQ ID NO: 62480 - protein, 304 aa, Triticum aestivum
  peptide (1)..(304): Ceres Seq. ID no. 13585288
LRVSSPHSLFYSPLLLPQAKQRQQRPRNGRPGVRAVLQAGPCGGTAVRQRHGERRRCRDTSASVHGARSRPAAADVPTKADATATGPSAERARVVLRVLPVADAGVGGAGVPWSNSVGGVLRDLPPGASDLRRDVAPSGGAERLRLRLRHLPHRVHGDRAQPQREDRVRVRRHRGCLRGRRHGHRGRHRAGLPPPQPQHDGHQGVGFGGRRDGGPGAGGQSQIQEVPCDVSGDGLQGGFPDRAVQVEAHQRPCAVRWLQRGAGQAGALPGADHRGRGACADPVKNQAVVVFHRRRRVGDDGRKV

SEQ ID NO: 62481 - protein, 288 aa, Triticum aestivum
  peptide (1)..(288): Ceres Seq. ID no. 13585289
MGDRAYGPSSKPVPVAAPRSANGTANGGGVGTPRPPSMVPGRVPPPPMYRPKPMQPPPGRRRSGRGWCCACCLWLTLVLVGLVFLGAIALGVFYVIYHPELPTFAVTSLRLAALNVSDSDSVTSRIEFTVTARNPNEKIAFVYGDIGAAFAADGTDIGDGTVPGFLHPSRNTTVIKGSASAAAATVDPVQAASLRSKKSHAMSVEMDSKVGFQIGQFKSKRISVRVLCGGFSAGLAKPAPSPAPIIVAAAPAPTRSKIRLSSSSTGGGGSATTDAKCKLRVKIWIWTF

SEQ ID NO: 62482 - DNA, 1312 bp, Triticum aestivum
  misc_feature (1)..(1312): Ceres Seq. ID no. 13583590
gaacccttgctcgactgcgactgcgattgcgtcccggcggtagccgctgccgtccggccgcgctgctatggcgagttagacgtcgcggccctcattgatccccgttacggatttccccttcttccccggggatcccgcctgccctaccaccgaatcgtgctgctccattgccttggaaggtcgccgccgccgccgcccgttcctccttccgtcacaatacaaggtgatcaatggcgtcaggtgcacctggtatcatgctccgacacctttccaaaacacttgctgtaagcccagcagtggcatctggtatgaccagccagcatcaccagcttcaacagcgtgcaccagtgggtggcacatccaaaggcaaggctaagctcaaagccggcctgcctttgaagcgcagcgtcatagcaaagaaggggggcgcgcctgccactgctgggagcggtggtgctggccgtggtcgtcgtgaagccattgagcgcattactcagattgcagagtcttgtctgaagtcctctactcctctacggcacttgtcccccaaggagtgtcttcgcgaggcaaaacgtgaggagcttggactcatctccaaggaacgacaacgtgaacttgatattgccaaggctaaagccaagtccaaaggtaccattggaggtgatggtggccgtgttctgatgggtccacctggccttgactatatcagtcttggccttgtagatgagaagaccatccctacttatgagctgacagttgaggatggtcggcgtcttgccaaagaatacagccgtgtgctaatgcaacgacaccgtgcacgccaaactgcggaatcaacacttttgagcctcaagaaggaggccgttgctgcactccccgagaagctgcaagctgctgctatggttcctgacatgacaccattccctgcaaaccggtacatggcaacactcacgccaccaattgaagggtatattgaaaaggtgcgagatgctgccaagaagtattctgtgaaagagaagcttcgctgagttcaattcaatccatataaggtggctgagagttctggaactttttcttatgttgtattcttgagaatctgtcagttttgctgacttcgtgctgtttttgcctctaataatcagatagcggtaataaactgccacgattttgctttgcaagaccatgttattttggctgaatctttttactccagttttgctgtgtagcacaaattgatatgttgaactaaaatcaagaaaagtttgttgctttgaaatgatgcttatactgaaagtatcctgccaaggttact

SEQ ID NO: 62483 - protein, 265 aa, Triticum aestivum
  peptide (1)..(265): Ceres Seq. ID no. 15222763
MASGAPGIMLRHLSKTLAVSPAVASGMTSQHHQLQQRAPVGGTSKGKAKLKAGLPLKRSVIAKKGGAPATAGSGGAGRGRREAIERITQIAESCLKSSTPLRHLSPKECLREAKREELGLISKERQRELDIAKAKAKSKGTIGGDGGRVLMGPPGLDYISLGLVDEKTIPTYELTVEDGRRLAKEYSRVLMQRHRARQTAESTLLSLKKEAVAALPEKLQAAAMVPDMTPFPANRYMATLTPPIEGYIEKVRDAAKKYSVKEKLR

SEQ ID NO: 62484 - protein, 257 aa, Triticum aestivum
  peptide (1)..(257): Ceres Seq. ID no. 15222764
MLRHLSKTLAVSPAVASGMTSQHHQLQQRAPVGGTSKGKAKLKAGLPLKRSVIAKKGGAPATAGSGGAGRGRREAIERITQIAESCLKSSTPLRHLSPKECLREAKREELGLISKERQRELDIAKAKAKSKGTIGGDGGRVLMGPPGLDYISLGLVDEKTIPTYELTVEDGRRLAKEYSRVLMQRHRARQTAESTLLSLKKEAVAALPEKLQAAAMVPDMTPFPANRYMATLTPPIEGYIEKVRDAAKKYSVKEKLR

SEQ ID NO: 62485 - protein, 239 aa, Triticum aestivum
  peptide (1)..(239): Ceres Seq. ID no. 15222765
MTSQHHQLQQRAPVGGTSKGKAKLKAGLPLKRSVIAKKGGAPATAGSGGAGRGRREAIERITQIAESCLKSSTPLRHLSPKECLREAKREELGLISKERQRELDIAKAKAKSKGTIGGDGGRVLMGPPGLDYISLGLVDEKTIPTYELTVEDGRRLAKEYSRVLMQRHRARQTAESTLLSLKKEAVAALPEKLQAAAMVPDMTPFPANRYMATLTPPIEGYIEKVRDAAKKYSVKEKLR

SEQ ID NO: 62486 - DNA, 1206 bp, Triticum aestivum
  misc_feature (1)..(1206): Ceres Seq. ID no. 13596601
agaacatcctaatcgaaaaccgatctagtatccctcaaagcttccatggagaaggcgccaggcacgagcatcgaggctatcatccgacggcttaggctccaccaggcgcctccctccccttactccggcgatccctcaacagcggcgacccccgccgcagccaacctgtttcagccgcggagagccgccgtactggtctgcctcttccacgacgctgccggcgagctgcgtgtcctccttaccaagcgcgcttcctccctctccacccactccggggaggttgcattgcccggaggaaaggcagaggagggtgatgctgatgatgcagcaacggcattaagggaggcaaaggaggagattgggcttgatccagccttggtcactgtcgtctcctcgcttgagcacttcttgtccaagcatcttctggtagttgttcctgttgttggcatactctcagatatacaggctttcaaacctgtccttaatgttgatgaggtggacgacatttttgatgtacccctagagatgttcctcaaggatgagcgcaggagatccgaggagcgagaatggatggggcaggcgttcacacttcaccacttcgattatgagaaaggcgacaagacgtatgtaatctgggggctgactgctggcatcctgattcacgcggcttcagttgtataccagcggccaccagactttgctgagcgaagggtacaattcaacctgccgaagtactcacaggagtcttctccaatgccatgatcaggattaggatgcgcactcagttacatgcctgattcagcacacagaagactacatacaccaaaagaaatggtatagaatctaaaaggtttccaaatcatgtgttgttatacaattcattcattcttctatgcgccacgaccctgcgattgatgtgaagtgcgataccctggtggttcagctgcgacgatgatcatgcaggccgggccgcatcaagcaatggattacgatgcattcgatggtgtgcagcttgccacacacagcgactaaaaatcaaacgttcgacaaacatatttgtattctattctttgcataataatacattgcaagaacattaacattcagaaaattatttggtgctaatttgagtacactccaaaaatttgctccgctgcttctgtactatggttgctcctttcttgtactatattatttcccccgtct

SEQ ID NO: 62487 - protein, 238 aa, Triticum aestivum
  peptide (1)..(238): Ceres Seq. ID no. 15221931
MEKAPGTSIEAIIRRLRLHQAPPSPYSGDPSTAATPAAANLFQPRRAAVLVCLFHDAAGELRVLLTKRASSLSTHSGEVALPGGKAEEGDADDAATALREAKEEIGLDPALVTVVSSLEHFLSKHLLVVVPVVGILSDIQAFKPVLNVDEVDDIFDVPLEMFLKDERRRSEEREWMGQAFTLHHFDYEKGDKTYVIWGLTAGILIHAASVVYQRPPDFAERRVQFNLPKYSQESSPMP

SEQ ID NO: 62488 - DNA, 1658 bp, Triticum aestivum
  misc_feature (1)..(1658): Ceres Seq. ID no. 13596635
agcgcaccacggtcgacctaccgcgcaggaccaccgagcccctcccttctcccgtgcctgctgcggatcccctttcctttgccttctctcctccagtcagctcctcttccgcgcgtgtggtggccgatggcggcggcggcggacacttccgcggcttccacgaccgggctcgcgctctcggaggcgagcatcaactgggagaggttggacaagacaaagtttcatgtcattggagcaatcctatttacggcccagcaaggtgttctgcacccaacagctgttgtgaagactagaatgcaggttgccgaaggaggactttcacatatgtctggctttgtcgtttttagaaagatattgaggagtgatggcatccctggtgttttcagaggatttggcaccagtgcagttggagctctgcctggacgaatcttggctctaacttcactagagatctccaaagaaatggcatttaaatactctgagcatttcgatatgtccgaggcatcaaggattgctgttgctaatggtgtagcaggcttagtgtcaagtaccttttcaagttcatattctgtacccctagatgtggtttgtcagagactcatggttcagggattgccagggatgcaaacatatagaggcccatttgatgtgataaataaggttgtcaggagtgaaggcctccggggcctttaccgaggttttggaattacccttttaactcaatcaccagcttctgccctttggtggagttcatatggtggggctcaacatgctatctggaggagcttgggctatggaaatggtacgcagaagaaaccctcccatacagaacttgttgctgtgcaagcaacagctggaacaattgctggagcttgctcatcgattatcactacaccaatagataccatcaagacccggcttcaggtaatggacaactacgggagtggaaggccatccgtcatgaagactaccaggctgctactgcgagaagaaggttggagaggtttataccgagggtttggaccacgctttcttaacatgtctctttggggtacatcaatgattgtcacatatgagctaataaaaagactttctgtgaaacctgagcaatgaaccttttggcttctgctccgcctatctggtcatcatttccgttttggccatctagtgaattccttttggtacagggattggcatgtaacactggttggaaattcttgatgcaagtccccttataaagtctgacatgtttctgtacggaactaccctgtaaatacctccaagtgcaagggtgctcgtttcagatgagagccagaggatcgatctgggcactggagcgccttgtagttgttgagcaaaaatttccctgtaagtgctgaagggagctcgtttcaggatgagagccagaggctggatctgggtactgagcaccttgtagttgttcagcaaaaattccggaaacatagttttgtgtcttcccatctaattggcatagttaccccacttgaattttcaatttcgcattacttttgtagctcacttcttgggatgagatgtggcatgtccaaatcaatttagcatcatcagtgaggtggtaggctgcaatgtataccttgtcgagtgtcgacattctacagtgagaggtagatactttcttt

SEQ ID NO: 62489 - protein, 370 aa, Triticum aestivum
  peptide (1)..(370): Ceres Seq. ID no. 13596636
SAPRSTYRAGPPSPSLLPCLLRIPFPLPSLLQSAPLPRVWWPMAAAADTSAASTTGLALSEASINWERLDKTKFHVIGAILFTAQQGVLHPTAVVKTRMQVAEGGLSHMSGFVVFRKILRSDGIPGVFRGFGTSAVGALPGRILALTSLEISKEMAFKYSEHFDMSEASRIAVANGVAGLVSSTFSSSYSVPLDVVCQRLMVQGLPGMQTYRGPFDVINKVVRSEGLRGLYRGFGITLLTQSPASALWWSSYGGAQHAIWRSLGYGNGTQKKPSHTELVAVQATAGTIAGACSSIITTPIDTIKTRLQVMDNYGSGRPSVMKTTRLLLREEGWRGLYRGFGPRFLNMSLWGTSMIVTYELIKRLSVKPEQ

SEQ ID NO: 62490 - protein, 328 aa, Triticum aestivum
  peptide (1)..(328): Ceres Seq. ID no. 13596637
MAAAADTSAASTTGLALSEASINWERLDKTKFHVIGAILFTAQQGVLHPTAVVKTRMQVAEGGLSHMSGFVVFRKILRSDGIPGVFRGFGTSAVGALPGRILALTSLEISKEMAFKYSEHFDMSEASRIAVANGVAGLVSSTFSSSYSVPLDVVCQRLMVQGLPGMQTYRGPFDVINKVVRSEGLRGLYRGFGITLLTQSPASALWWSSYGGAQHAIWRSLGYGNGTQKKPSHTELVAVQATAGTIAGACSSIITTPIDTIKTRLQVMDNYGSGRPSVMKTTRLLLREEGWRGLYRGFGPRFLNMSLWGTSMIVTYELIKRLSVKPEQ

SEQ ID NO: 62491 - protein, 272 aa, Triticum aestivum
  peptide (1)..(272): Ceres Seq. ID no. 13596638
MQVAEGGLSHMSGFVVFRKILRSDGIPGVFRGFGTSAVGALPGRILALTSLEISKEMAFKYSEHFDMSEASRIAVANGVAGLVSSTFSSSYSVPLDVVCQRLMVQGLPGMQTYRGPFDVINKVVRSEGLRGLYRGFGITLLTQSPASALWWSSYGGAQHAIWRSLGYGNGTQKKPSHTELVAVQATAGTIAGACSSIITTPIDTIKTRLQVMDNYGSGRPSVMKTTRLLLREEGWRGLYRGFGPRFLNMSLWGTSMIVTYELIKRLSVKPEQ

SEQ ID NO: 62492 - DNA, 1095 bp, Triticum aestivum
  misc_feature (1)..(1095): Ceres Seq. ID no. 12544053
ttagttatacccacatgagagatgagactatttatgattgagctccttgctggagcagaacgggagacgcccattgctgcagctacttcacccactttgctcacgttatctgactccgactgatttgatttgtctgaagtacagtgtgccttcccttgtttcaaaggatgaggcatcagagagtgctactaaagttaacttggatagtaagttggatgatgtagctgacaaagaacctgggggttcagaagacacactggttgcatctgatagcaagaaggacccgtttaaacggcggcaagaactgttggtgaaaagcgagctttttgaggttctcatcgagacttgcattgaaaatgttggagagttacttagaacaaacttcggcaaagatgtattatacgaggttgctgtaggtggaaaaaataatgtcttggagggggtcaccgacaggatccacgtgcttcacaatgctatagcttctgacgcagaacgcccgaggacagaagatgttgagcatgcctttgataactaccactcgagccgcgtaatcagaaagatgatacttgattgtcctgcgtttgctgctaccctatggaaaaaagccctcaaagggaagtgcaagtcatttgcagatggattcagctccaaggtggtggctgcctatctggaatcttcggattccaaggtgaaggatcttgcgaaatccgaggtgcagccgctcatcgacggtggcatactgaagattccagaccataaagcagcggagaagaagtgagtcttctctcaacgggcctctcaccatcgccagcaacacaaagcaggccgaggcggcgaccgtgcttgcgtgttagatgaaagagtgtaatacatacatccgcggtcatcctactggaggtgtatgttcaattttggcactggataccaatggactcgaaatacatacagtcgttaagggtttaggttaatacttgactgttactggggaggtttgctgcgatatattcgtgtgatgtggcataagtttgaccgttcgccatcacatntaagcagacgatgtgaccaaagtagatttcatttgcatattggcatgcc

SEQ ID NO: 62493 - protein, 72 aa, Triticum aestivum
  peptide (1)..(72): Ceres Seq. ID no. 12544054
MILDCPAFAATLWKKALKGKCKSFADGFSSKVVAAYLESSDSKVKDLAKSEVQPLIDGGILKIPDHKAAEKK

SEQ ID NO: 62494 - protein, 54 aa, Triticum aestivum
  peptide (1)..(54): Ceres Seq. ID no. 12544055
MEKSPQREVQVICRWIQLQGGGCLSGIFGFQGEGSCEIRGAAAHRRWHTEDSRP

SEQ ID NO: 62495 - protein, 37 aa, Triticum aestivum
  peptide (1)..(37): Ceres Seq. ID no. 12544056
MKECNTYIRGHPTGGVCSILALDTNGLEIHTVVKGLG

SEQ ID NO: 62496 - DNA, 457 bp, Triticum aestivum
  misc_feature (1)..(457): Ceres Seq. ID no. 15175006
atcattgctctgtcagttcccttctttgcgcttgtgatggctctgattggttctttattcgcgatgcttgtgacctacattcttccttgcgcctgctttctggccatcctcaaggcaaaagcgacttggtatcagactgcgacatgctcattcatcatcgccgtaggggttacctgcgcctgcgtggggacatactcatccctctccgggattgtccagaactacgcaacctgattctccctacatacataattgagaagattgctcgttcaaccgcgttattatacatataattaagcatatgtatgagcgagagtggaggattcaaattttgccgaacaatgaattatgtccatcgatatataaatgttgtatgattaaatttgtattgctgttaaatttgtggcaaccccgataactttgcattattattgttaaatttgtgtgttgatggatc

SEQ ID NO: 62497 - protein, 96 aa, Triticum aestivum
  peptide (1)..(96): Ceres Seq. ID no. 15175007
HCSVSSLLCACDGSDWFFIRDACDLHSSLRLLSGHPQGKSDLVSDCDMLIHHRRRGYLRLRGDILIPLRDCPELRNLILPTYIIEKIARSTALLYI

SEQ ID NO: 62498 - protein, 77 aa, Triticum aestivum
  peptide (1)..(77): Ceres Seq. ID no. 15175008
IIALSVPFFALVMALIGSLFAMLVTYILPCACFLAILKAKATWYQTATCSFIIAVGVTCACVGTYSSLSGIVQNYAT

SEQ ID NO: 62499 - protein, 65 aa, Triticum aestivum
  peptide (1)..(65): Ceres Seq. ID no. 15175009
MALIGSLFAMLVTYILPCACFLAILKAKATWYQTATCSFIIAVGVTCACVGTYSSLSGIVQNYAT

SEQ ID NO: 62500 - protein, 49 aa, Triticum aestivum
  peptide (1)..(49): Ceres Seq. ID no. 15175010
MLIHHRRRGYLRLRGDILIPLRDCPELRNLILPTYIIEKIARSTALLYI

SEQ ID NO: 62501 - DNA, 862 bp, Triticum aestivum
  misc_feature (1)..(862): Ceres Seq. ID no. 15226850
accaaatcaatcaaacgcggtcttcctccctgagacgcacgcaccgcacctcaccgccccgcgtcgcgagatctcaaatccccgatccgaccccaccggcggcgatggccggcaaggagctgagcgacgagcaggttgcgtcgatgcgggaggccttctccctcttcgacactgacggcgacggccgcatcgccccctcggagctcggcgtcctcatgcgctccctgggtgggaacccgacgcaggcgcagctccgcgacatcaccgcccaggagaagctcacggcgcccttcgacttcaagcgattcctcgaactcatgcgcgcccacctccgcccggagccgttcgaccgcccgctccgcgacgccttccgcgtcctcgacaaggacgcgtcgggcaccgtctccgtcgcggacctccgccacgtcctcacctccatcggcgagaagctcgagccccatgagttcgacgagtggatccgcgaggtcgacgtcgccgcggacggcaccatccgctacgacgacttcatccgccgcatcgtcgccaagtagtggattgatccgtctcccagcctgctcagacttcttcgtatttaataactcctccttcgcgtgattttatttcgtatcatctcatctgatctgctgcgcttctgttttgtgctttggtttcgttgtggttccccaaccgccctagggtttggataaaaatggtgtgattatggattaatggatctgtccgatggtattgcaatgtaaagcatggatcctgttactttctgtgattgattgattgcttaatcagaaaccagtgaaatgcgccagtttatgcattcatgttaatacagcctatgatttgtttt

SEQ ID NO: 62502 - protein, 182 aa, Triticum aestivum
  peptide (1)..(182): Ceres Seq. ID no. 15226851
QINQTRSSSLRRTHRTSPPRVARSQIPDPTPPAAMAGKELSDEQVASMREAFSLFDTDGDGRIAPSELGVLMRSLGGNPTQAQLRDITAQEKLTAPFDFKRFLELMRAHLRPEPFDRPLRDAFRVLDKDASGTVSVADLRHVLTSIGEKLEPHEFDEWIREVDVAADGTIRYDDFIRRIVAK

SEQ ID NO: 62503 - protein, 148 aa, Triticum aestivum
  peptide (1)..(148): Ceres Seq. ID no. 15226852
MAGKELSDEQVASMREAFSLFDTDGDGRIAPSELGVLMRSLGGNPTQAQLRDITAQEKLTAPFDFKRFLELMRAHLRPEPFDRPLRDAFRVLDKDASGTVSVADLRHVLTSIGEKLEPHEFDEWIREVDVAADGTIRYDDFIRRIVAK

SEQ ID NO: 62504 - protein, 135 aa, Triticum aestivum
  peptide (1)..(135): Ceres Seq. ID no. 15226853
MREAFSLFDTDGDGRIAPSELGVLMRSLGGNPTQAQLRDITAQEKLTAPFDFKRFLELMRAHLRPEPFDRPLRDAFRVLDKDASGTVSVADLRHVLTSIGEKLEPHEFDEWIREVDVAADGTIRYDDFIRRIVAK

SEQ ID NO: 62505 - DNA, 1424 bp, Triticum aestivum
  misc_feature (1)..(1424): Ceres Seq. ID no. 12615223
agtaaagaaacctaaccgccgccgccagcaccaccacgtccgggtccagggcattcagagccgagatggcgtccgcgtcgccgtcgtgggtcatcctgggccgcgtggccaaggtgtcggccgccgacgccgatcttcctccgggcgccgacctctccctcgcgctgccgccgccgccgcgcgtcgcgctcctcaccatccccccgcgcatcttcccgggccaaaccacctccgacaacttcccctccgtcctcgccgtcgaccgctccggcctcctcctcctccacgcctcccagggccccgccgcgggccccgccatcgtcgacctccccggccgccaggaggtctgctggcgcccattcgtcgcgggctacttcgtcctcgactccaaatccgcctcggccttcccgctccccaaccccgagcgcatcatgaacccgggccgcctcggcctcatcgcctcccccgagggcgcaggccgctacatggtcgctgagctccagccggtcgccggcggcgagcaggccgacctcctctgcttctcgtcgcaatccgggcagtgggacaggaagaccgtcgcctacccgcttccatcccgccccttgacggacaacggcgtggtctcgcactccgggaggctctggtgggtcgacctctcctggggcctcatcacctgcgaccccttcgcggacgcgcctgtgctgagcttcgtcccactcccgccgcgcaaggcgctcaagtacggggtagattgtgcagtgctcgacaagtaccgccgcgtcgctgtcagccgcggcaagctgcggttcgtggacatgtacaagaaccgtagcagcttcggctctggcacagatcagcgtgtggacgctcgccgatccggactccaccgagtggacgctggagtatgaagcgaccttttcggagatctttaatgatgcgagcttcaaggcgactcgtctgacaaggcagctcccggtgctcgcgctcatccatcccagggaccccgacgtggtctacttcttcctggacaggcacctgttcagcgtcgacgtgcctgaccgcagggtcgtgcagtgcgagctttacgagctggttgaggagctatccagcaaaagcatcgccacccgtttcgttcacgcttggaggctgccaccggctctccgctcagctgcggatgccgttgcggagaagctaaacgcaggaggaaatcaagaaatcattgatgccgctgcagtctcaacttgccaaactgaagttgaagtcggtggcggcgacacgcctgagtccaagcggcgtaggctagagtgacctgagcttgttgagatctgttcttgtagtctctctgtttcaatatcttgtaggcatcaccttcccagaaaaaaaaaacttgtaggctttgctagagagctggtaaccccagcatg

SEQ ID NO: 62506 - protein, 280 aa, Triticum aestivum
  peptide (1)..(280): Ceres Seq. ID no. 12615224
MASASPSWVILGRVAKVSAADADLPPGADLSLALPPPPRVALLTIPPRIFPGQTTSDNFPSVLAVDRSGLLLLHASQGPAAGPAIVDLPGRQEVCWRPFVAGYFVLDSKSASAFPLPNPERIMNPGRLGLIASPEGAGRYMVAELQPVAGGEQADLLCFSSQSGQWDRKTVAYPLPSRPLTDNGVVSHSGRLWWVDLSWGLITCDPFADAPVLSFVPLPPRKALKYGVDCAVLDKYRRVAVSRGKLRFVDMYKNRSSFGSGTDQRVDARRSGLHRVDAGV

SEQ ID NO: 62507 - protein, 164 aa, Triticum aestivum
  peptide (1)..(164): Ceres Seq. ID no. 12615225
VKKPNRRRQHHHVRVQGIQSRDGVRVAVVGHPGPRGQGVGRRRRSSSGRRPLPRAAAAAARRAPHHPPAHLPGPNHLRQLPLRPRRRPLRPPPPPRLPGPRRGPRHRRPPRPPGGLLAPIRRGLLRPRLQIRLGLPAPQPRAHHEPGPPRPHRLPRGRRPLHGR

SEQ ID NO: 62508 - protein, 158 aa, Triticum aestivum
  peptide (1)..(158): Ceres Seq. ID no. 12615226
MNPGRLGLIASPEGAGRYMVAELQPVAGGEQADLLCFSSQSGQWDRKTVAYPLPSRPLTDNGVVSHSGRLWWVDLSWGLITCDPFADAPVLSFVPLPPRKALKYGVDCAVLDKYRRVAVSRGKLRFVDMYKNRSSFGSGTDQRVDARRSGLHRVDAGV

SEQ ID NO: 62509 - DNA, 1258 bp, Triticum aestivum
  misc_feature (1)..(1258): Ceres Seq. ID no. 13598249
ctctctggacgagggagaatcttgtactagtcccactcccccctcccgtcgccgtcgccgccggcccaaaccaaaccctagccgcctgcccgccggcgggcgccaggccatggaccgcaagcgcatcaacgacgcgctcgacaggcacctgcgggcggccacggagcggtcgtcgccctccacctcccgcggcgccaagcccaagccgccccccgccgccgcccccaaacccaaagagcagctggattcggacagcagcgaggggggcagcgtcggcgggtcctcggaggcggacgacaccttctggatcaactggttctgcgccatgaggggcaacgagttcttcgccgaggtggatgatgactacatccaggacgacttcaatctctgcggcctcagcgcccaggtcccctactacgaccacgcccttgatctcatcctcgacctcgagcccgtccagggggatgtgtttgccgatgaccagaatgagctgatagtggcgtccgcggagatgctttacgggttgatccacgcccggtacatcttgaccaccaagggcttggctgccatgctggagaagttcaagaactgcgactttggaaggtgcccccgcgtgtcctgctctggtcagccctgtcttccaatgggccagtccgatatccctaggtccagtaccgtcaagatatattgtcccaaatgcgaagatctctactacccaagatccaagcaccaagccaatacagacggcgcatactttgggacgacgtttcctcatattttcatgatgacccactcacaattgaagccacagaagccagcgcagcaatacgttccccggatattcggcttcaaagtccacaagaaaacatgacggtatcgtggtggcgtactgccttgggcttgtttcgcctagtatgtcaccaggaacgatgaggacccgcactatagctgggcatggaaaaatgctttggccggttcaagacgacaaggcaccgaacaactatggcacattctttctctgtatgaagacctgctcttgggaaaagaaatctcgaggaggtctgatcaagctgtcagatccatgtcatgttgggtatttggatgatcccggtgagacggcaatgggtttgtgcctctgctctgttttgattttgaatgttcgtccaaacagggcatatgttgctggatctgttgtgtatcctaatgtatttcgctcttcattctgtggtgccgagaaatcggacggctgagactgctg

SEQ ID NO: 62510 - protein, 289 aa, Triticum aestivum
  peptide (1)..(289): Ceres Seq. ID no. 13598250
SLDEGESCTSPTPPSRRRRRRPKPNPSRLPAGGRQAMDRKRINDALDRHLRAATERSSPSTSRGAKPKPPPAAAPKPKEQLDSDSSEGGSVGGSSEADDTFWINWFCAMRGNEFFAEVDDDYIQDDFNLCGLSAQVPYYDHALDLILDLEPVQGDVFADDQNELIVASAEMLYGLIHARYILTTKGLAAMLEKFKNCDFGRCPRVSCSGQPCLPMGQSDIPRSSTVKIYCPKCEDLYYPRSKHQANTDGAYFGTTFPHIFMMTHSQLKPQKPAQQYVPRIFGFKVHKKT

SEQ ID NO: 62511 - protein, 253 aa, Triticum aestivum
  peptide (1)..(253): Ceres Seq. ID no. 13598251
MDRKRINDALDRHLRAATERSSPSTSRGAKPKPPPAAAPKPKEQLDSDSSEGGSVGGSSEADDTFWINWFCAMRGNEFFAEVDDDYIQDDFNLCGLSAQVPYYDHALDLILDLEPVQGDVFADDQNELIVASAEMLYGLIHARYILTTKGLAAMLEKFKNCDFGRCPRVSCSGQPCLPMGQSDIPRSSTVKIYCPKCEDLYYPRSKHQANTDGAYFGTTFPHIFMMTHSQLKPQKPAQQYVPRIFGFKVHKKT

SEQ ID NO: 62512 - protein, 181 aa, Triticum aestivum
  peptide (1)..(181): Ceres Seq. ID no. 13598252
MRGNEFFAEVDDDYIQDDFNLCGLSAQVPYYDHALDLILDLEPVQGDVFADDQNELIVASAEMLYGLIHARYILTTKGLAAMLEKFKNCDFGRCPRVSCSGQPCLPMGQSDIPRSSTVKIYCPKCEDLYYPRSKHQANTDGAYFGTTFPHIFMMTHSQLKPQKPAQQYVPRIFGFKVHKKT

SEQ ID NO: 62513 - DNA, 1424 bp, Triticum aestivum
  misc_feature (1)..(1424): Ceres Seq. ID no. 12615230
ctaaaccacccctgaaaaccctcagacgaacgaaagacctagcgctcctctcccttcgtctctcgcgactggcggcggcggtcgaacgaggccacccgacggcggcagagcgagtaggtgctttccaagcttcgccagaggtgtaaacccttcgctagaggcctcagtccctttcccgcgcggcttgagcaagatgagcaagatggcgatcagggttcccaagtccatgcgcgccaagcgtgagctcctcaagcacgcgcccaagctcgttgagaatggcaagaagatgcttattcttcatggtacaaagaccagcgcagttttgaactctgtgctggcagatcttttccacctgaagcgtgatcatgctgtcaagtacaccaagaagaacgacagcatcaggccatttgagagcgggggtgaaacttccctggagttcttctcccttaaatctgactgcagcctcttagtgtatggttctcattcaaagaagaggcccaacaatcttgttctgggaaggacttacgatcaccacatatatgacctcgttgaagtgggagttgagaactacaaatccatagaatcctatgcatatgataaaaagttggcacctaaacttgggacaaagcctttctttgctttcattggggagcactttgagagtgttgaaggactgaagcatttgaaggaaatgctgcttgatcatttcaaaggagaggtggtagagaatctgaaccttgctggtgtagatcggatattcgtgtgcacagcaatttctcctactaccgtctacatgatgcactgcgctctccgtctaaaaaggtcaggcacatctattcctagaatggagctggttgaagttgggccttcagtggacctggtacttaggcggcaccgacaagcagctgaaagtttacagaaagaagctatgaaggctcctggtcatgctaagaaggtgaaaaatgtcaccaataatccagttgaaggcaagcagggcaggatctacattccagaccaggaggtctcaaaattgaccgtaacaagcaacataaagggtctgaagcgggagcgccgtgacgccaagaaaaacaaggagcactcgaagaagcaaaaggtggccgaaaaccctgagtgaccactggagaaggctagtatctgtaaccggtcagtttaaggactttcggtcgataggttcagtggtaaatagtccagtaccatcttttaaggctatcaaacctgtgtacggacttaggcatcagtatcgaggcagcctctctatcagacataagcatgaaattttggagcaacatatgctacaagtattttttttactgttgttattcgcccctgatattagccaatcagagacgactgttgtgatgacatggttaagtttggttatcatggacattatgccttttctg

SEQ ID NO: 62514 - protein, 313 aa, Triticum aestivum; identical to SEQ ID NO: 56161
  peptide (1)..(313): Ceres Seq. ID no. 12615231

SEQ ID NO: 62515 - protein, 310 aa, Triticum aestivum; identical to SEQ ID NO: 56162
  peptide (1)..(310): Ceres Seq. ID no. 12615232

SEQ ID NO: 62516 - protein, 302 aa, Triticum aestivum; identical to SEQ ID NO: 56163
  peptide (1)..(302): Ceres Seq. ID no. 12615233

SEQ ID NO: 62517 - DNA, 1051 bp, Triticum aestivum
  misc_feature (1)..(1051): Ceres Seq. ID no. 12615311
agtaaagcagtaagcaattccactcccgccgccacctccctctactccggcgctcccgcggctgctccggcctcttctgcatgttcaacacccacgaggaccaggccggctgcgacgaggtgatggtggaggtggaggtccgggcggcgcagaacgtgctggaggcgtgcgcgcagacggtgaccatggagcgggtggtcttcacctcctccgtcaccgccgtcgtctggaaggacgacgaccacaagcccgtcgacgccttcgacgagcggaactggagcgacctcaacctctgcaggaagcgcaagttgtggcatgcgctggccaagacgctgtcggagaagacggcctgggccttggccatggacagaggggtggacatggtggccatcaacgccggcctgctcaccgggccggggctctcctccgcccacccctgcctcaagggggtccccgagatgtacgagcacggcgtcctcgtcaccgtngacgccgacttcctcgccgacgcccacgtggccgcctacgagtgccccacggccttcggccgctacctntgcttcaacaacgtcgtgtgccggcccgaggacgccctccagttcgcccagatgctcaccccgtccgctccatgctacccgccgagtgatgagctgaaggtgatcccccaaaggattcagaacaagaagctgaacaacctgatggtggagtttgccagtgccatatacggggacttggattagagaatcactagttcattgatttacatctcaagggcagctagggttgtattctttatgtacctaaatatctgtattctttttcctcctgaaaagggaaatatggttggtcagatgtacaaatttgtacaaggccaagcatgccgcatgtattccaccacttttaccaggatggtaggagcatttgagccagtgcttagcaatgtagtagtaatccttaggtccaacaaaagggaaaataagtccacagttatgttactactgccttgtacagcagcattatatgaatatgatgaacaaatgttgaaagcttc

SEQ ID NO: 62518 - protein, 219 aa, Triticum aestivum
  peptide (1)..(219): Ceres Seq. ID no. 12615312
  misc_feature (136)..(136): Xaa is any aa, unknown or other
  misc_feature (159)..(159): Xaa is any aa, unknown or other
MFNTHEDQAGCDEVMVEVEVRAAQNVLEACAQTVTMERVVFTSSVTAVVWKDDDHKPVDAFDERNWSDLNLCRKRKLWHALAKTLSEKTAWALAMDRGVDMVAINAGLLTGPGLSSAHPCLKGVPEMYEHGVLVTXDADFLADAHVAAYECPTAFGRYXCFNNVVCRPEDALQFAQMLTPSAPCYPPSDELKVIPQRIQNKKLNNLMVEFASAIYGDLD

SEQ ID NO: 62519 - protein, 205 aa, Triticum aestivum
  peptide (1)..(205): Ceres Seq. ID no. 12615313
  misc_feature (122)..(122): Xaa is any aa, unknown or other
  misc_feature (145)..(145): Xaa is any aa, unknown or other
MVEVEVRAAQNVLEACAQTVTMERVVFTSSVTAVVWKDDDHKPVDAFDERNWSDLNLCRKRKLWHALAKTLSEKTAWALAMDRGVDMVAINAGLLTGPGLSSAHPCLKGVPEMYEHGVLVTXDADFLADAHVAAYECPTAFGRYXCFNNVVCRPEDALQFAQMLTPSAPCYPPSDELKVIPQRIQNKKLNNLMVEFASAIYGDLD

SEQ ID NO: 62520 - protein, 184 aa, Triticum aestivum
  peptide (1)..(184): Ceres Seq. ID no. 12615314
  misc_feature (101)..(101): Xaa is any aa, unknown or other
  misc_feature (124)..(124): Xaa is any aa, unknown or other
MERVVFTSSVTAVVWKDDDHKPVDAFDERNWSDLNLCRKRKLWHALAKTLSEKTAWALAMDRGVDMVAINAGLLTGPGLSSAHPCLKGVPEMYEHGVLVTXDADFLADAHVAAYECPTAFGRYXCFNNVVCRPEDALQFAQMLTPSAPCYPPSDELKVIPQRIQNKKLNNLMVEFASAIYGDLD

SEQ ID NO: 62521 - DNA, 1328 bp, Triticum aestivum
  misc_feature (1)..(1328): Ceres Seq. ID no. 13596902
cctaatcgaaaagtcgccgctaaccactgcttcctctgctccgcacccaaatctcagatcgagccccgcaagtcaaccgccgatggccgcctccaccggcagccgccgcttcaagatcttcgcggccgccgacggcttcggggagccgctcaaggacgccgtcgtcgcgcacctccgcgcccactcctccgtcgccgacgtcgtcgacctcggcgtcgacaagtactactccgcggccgccgccgtcgcccgcagcgtctcctcctcggtccccgaccccgcgctcgagccccgcggcgtcgtcgtctgcggcaccggcgccggcgtcaccatcttcgccaacaagtaccccggcgtgtacgccacccactgcagctccgccgccgacgccgtcaacacccgctccatcaacgcctgcaacgtcctcgccctctccggcatggccaccccgccggaggccgccgcggtcatcgccgacgcctggctcgccacccccttccgcgccccctgccccgcgtccggcgacgccccttggccggaggacattcagaagttctttgacgttgcccccggcgagatggcctccatccccgagggattggcggcccctcctgcgccggactccgcctgcgccatctgctgcctgaggaaggggatggagttcgagccggtggacatcatgcccggcggcgagatgcggattgtgcgggagagccccacttcggcctacgtgcggttcaaagctggaagcgtggagccggcccaccaccacaccttcggccacgacctggtggtgatcaagggcaagaagaaggtgtggaacttgaccaagaaggagagctatggcctcgtcgacggggacttcctgttcacgcctgctggggacgtgcaccgtgtcaagtacttggaggacacggagttcttcatccgctgggatgggcactgggacatattcctcgatgaagacctcgagaccgcacgcaatgccatcgatgcagagctcggtgtgatcgacagtgacaagtgaggagggcatggtgatgcgcctggatgagttatcttgaggagacatgtgaaggtgctatctcgttgttccaccttttctccatgttcacttctacaatgtttgttgcttgtgctgtgcctatactggtgctggtgacatgttttcaaatatgtatgttgctggacgatttgccatgcttgtcgaataaagtggtgataatggtagtaatgctaccttgttatggttgcacaaaaaaaaaaaaaaaaaagcttatcgataccgtcgactgtttaaacacaataaagttggaacgggagggggg

SEQ ID NO: 62522 - protein, 341 aa, Triticum aestivum
  peptide (1)..(341): Ceres Seq. ID no. 13596903
LIEKSPLTTASSAPHPNLRSSPASQPPMAASTGSRRFKIFAAADGFGEPLKDAVVAHLRAHSSVADVVDLGVDKYYSAAAAVARSVSSSVPDPALEPRGVVVCGTGAGVTIFANKYPGVYATHCSSAADAVNTRSINACNVLALSGMATPPEAAAVIADAWLATPFRAPCPASGDAPWPEDIQKFFDVAPGEMASIPEGLAAPPAPDSACAICCLRKGMEFEPVDIMPGGEMRIVRESPTSAYVRFKAGSVEPAHHHTFGHDLVVIKGKKKVWNLTKKESYGLVDGDFLFTPAGDVHRVKYLEDTEFFIRWDGHWDIFLDEDLETARNAIDAELGVIDSDK

SEQ ID NO: 62523 - protein, 314 aa, Triticum aestivum
  peptide (1)..(314): Ceres Seq. ID no. 13596904
MAASTGSRRFKIFAAADGFGEPLKDAVVAHLRAHSSVADVVDLGVDKYYSAAAAVARSVSSSVPDPALEPRGVVVCGTGAGVTIFANKYPGVYATHCSSAADAVNTRSINACNVLALSGMATPPEAAAVIADAWLATPFRAPCPASGDAPWPEDIQKFFDVAPGEMASIPEGLAAPPAPDSACAICCLRKGMEFEPVDIMPGGEMRIVRESPTSAYVRFKAGSVEPAHHHTFGHDLVVIKGKKKVWNLTKKESYGLVDGDFLFTPAGDVHRVKYLEDTEFFIRWDGHWDIFLDEDLETARNAIDAELGVIDSDK

SEQ ID NO: 62524 - protein, 195 aa, Triticum aestivum
  peptide (1)..(195): Ceres Seq. ID no. 13596905
MATPPEAAAVIADAWLATPFRAPCPASGDAPWPEDIQKFFDVAPGEMASIPEGLAAPPAPDSACAICCLRKGMEFEPVDIMPGGEMRIVRESPTSAYVRFKAGSVEPAHHHTFGHDLVVIKGKKKVWNLTKKESYGLVDGDFLFTPAGDVHRVKYLEDTEFFIRWDGHWDIFLDEDLETARNAIDAELGVIDSDK

SEQ ID NO: 62525 - DNA, 1742 bp, Triticum aestivum
  misc_feature (1)..(1742): Ceres Seq. ID no. 14303604
accgagccctccgccccgccccgcgcccgacccgaaaccccagccgatcggcggcggccggccggcggagatgtcgctgacggaggtcaggatcggcgaggaggtgtggctcacctgcctctcccacgccctcaccaccgagaccgaggaggtcatgggcctcctcctcggcgacgtcgtgtcctccagcaagggcggctccacggcggtgatatggggcgcgtcgccgcagatgaggtgcgagcggaagaaggaccgcgtcgaggtcaaccccgagctgctcgccgccgcgtcggcgcaggccgaggtaatgacggccaccatcgggaagacgacccgggtgatcggctggtaccactcgcacccgcatatcaccgtcctgccttcccatgtagatgtgcgtacccaggctatgtttcagttgctagatccaggctttgttgggctgatattttcctgttttagtgaagatgctcaaaaggttgggaaaatccaagtgattgccttccagtcacttgatgggacacagaacacacagcgtgctattgttcctgttattaccaatcctgtcattaaccttgaaccatcttggagttcatccgatagctcattagcattgattgagggcattgaacaggacactggagattctagagcttcaaacggaagcaaggtctggggaagatctcaggatatggatctatatccttctttggacacaaatcattcggcaagacatctaccaatagaaaacgctattgttcctttcgaaccggaaaacagtgctgggccctctattgatcaagatggttcagatctgtccccaagcatacaggaggctttgcaccggtcaaccatggacataagtggtgcagagtataaaaggaaggaggtgccacttaaagtattccctacaaggcatctgctaaagctggacactacgttgagttcgtactgtgatatgcagcgtgtcctttttgaagaggaacaatcagcatataaccaagccatgcttcagaatatttgtgatgggaagatgcacccacttacatctatgcaccatacctccacatataatgcttctctatgcaaactgatggaatactgcttgagccctgctataactgtgcttcaggaccgtgtgaaagaaaacgaacttcggttagctatgctagtggaggaggctaaacaactggaggccgagcagagcacgaaaactggctctcctcgccgtgcgatgcccggagggactaccagtggcatcacttcgccaaggggccaggacaagtacccttccggcagacaagggggccctataagccctagcagcagcggccggaggaaggctccttgactcggaccttgctcgccattatgtcatgatggatagtccgattctgggccctgcctgatgctttctggaaccccaaacctgtcccttggcgcgaggggtgaagtcgcaatgcaaatgtacatacccatctcctttcagtgcctggcccgccgtccttctgtggaagtaaccaaccaacagtggttcccttttgctttgtgttgtccttgcgccaaatccttttgcctggttgcgctgagcttgtaatgtgtactcactgacgcgacgagtctcggggcagtggttgcgctgagcttgtaatgtgtactcactggcgcgacgagtctcgggcaggctttctagttggaagaaactcttgtaccaatcctgttgtcgaaatgttcagggg

SEQ ID NO: 62526 - protein, 450 aa, Triticum aestivum
  peptide (1)..(450): Ceres Seq. ID no. 14303605
PSPPPRPAPDPKPQPIGGGRPAEMSLTEVRIGEEVWLTCLSHALTTETEEVMGLLLGDVVSSSKGGSTAVIWGASPQMRCERKKDRVEVNPELLAAASAQAEVMTATIGKTTRVIGWYHSHPHITVLPSHVDVRTQAMFQLLDPGFVGLIFSCFSEDAQKVGKIQVIAFQSLDGTQNTQRAIVPVITNPVINLEPSWSSSDSSLALIEGIEQDTGDSRASNGSKVWGRSQDMDLYPSLDTNHSARHLPIENAIVPFEPENSAGPSIDQDGSDLSPSIQEALHRSTMDISGAEYKRKEVPLKVFPTRHLLKLDTTLSSYCDMQRVLFEEEQSAYNQAMLQNICDGKMHPLTSMHHTSTYNASLCKLMEYCLSPAITVLQDRVKENELRLAMLVEEAKQLEAEQSTKTGSPRRAMPGGTTSGITSPRGQDKYPSGRQGGPISPSSSGRRKAP

SEQ ID NO: 62527 - protein, 427 aa, Triticum aestivum
  peptide (1)..(427): Ceres Seq. ID no. 14303606
MSLTEVRIGEEVWLTCLSHALTTETEEVMGLLLGDVVSSSKGGSTAVIWGASPQMRCERKKDRVEVNPELLAAASAQAEVMTATIGKTTRVIGWYHSHPHITVLPSHVDVRTQAMFQLLDPGFVGLIFSCFSEDAQKVGKIQVIAFQSLDGTQNTQRAIVPVITNPVINLEPSWSSSDSSLALIEGIEQDTGDSRASNGSKVWGRSQDMDLYPSLDTNHSARHLPIENAIVPFEPENSAGPSIDQDGSDLSPSIQEALHRSTMDISGAEYKRKEVPLKVFPTRHLLKLDTTLSSYCDMQRVLFEEEQSAYNQAMLQNICDGKMHPLTSMHHTSTYNASLCKLMEYCLSPAITVLQDRVKENELRLAMLVEEAKQLEAEQSTKTGSPRRAMPGGTTSGITSPRGQDKYPSGRQGGPISPSSSGRRKAP

SEQ ID NO: 62528 - protein, 399 aa, Triticum aestivum
  peptide (1)..(399): Ceres Seq. ID no. 14303607
MGLLLGDVVSSSKGGSTAVIWGASPQMRCERKKDRVEVNPELLAAASAQAEVMTATIGKTTRVIGWYHSHPHITVLPSHVDVRTQAMFQLLDPGFVGLIFSCFSEDAQKVGKIQVIAFQSLDGTQNTQRAIVPVITNPVINLEPSWSSSDSSLALIEGIEQDTGDSRASNGSKVWGRSQDMDLYPSLDTNHSARHLPIENAIVPFEPENSAGPSIDQDGSDLSPSIQEALHRSTMDISGAEYKRKEVPLKVFPTRHLLKLDTTLSSYCDMQRVLFEEEQSAYNQAMLQNICDGKMHPLTSMHHTSTYNASLCKLMEYCLSPAITVLQDRVKENELRLAMLVEEAKQLEAEQSTKTGSPRRAMPGGTTSGITSPRGQDKYPSGRQGGPISPSSSGRRKAP

SEQ ID NO: 62529 - DNA, 1485 bp, Triticum aestivum
  misc_feature (1)..(1485): Ceres Seq. ID no. 12615948
attcgccccccaaaccaaaaccaaatccctcgccaaaatccccaatccccggccatggcgacgagcccgcctccgccgctccgctcccgccggacgctggagctgccagacgacgtcatggaggagatcttcctccgcctaccggcggacaaccccgccagcctcgcccgcgtcgccggcggctgcaagagctggctggccatggtctcggaccccaacttcgcccccgcctaccgcaggctccgcgacgcgccgcccatgctgggcttcctctacaactaccgctacaccgacgagggagcgccctactggacgtcccacttccgcgccgccgcggccctccccccgcgggtgcgccgcgaccgcaagcactggcgcgctctcgactcccgccacggcctcgtcctcttcgacacccctgagagtgacggccacctcgtcgtctccgacctcgtcaccggcgagcactggaaaatcgacggccacatcacgttcccggatgcgtgtaatgctacagtgctctgcgccagggacggatgtgaccaccgtgattgccatggcggccctttcctcgtggcctgcgtggactccgtcgtggcaggggaccggaggataacctgcgccatgttctactcatcagttactggcaagtggatcgacccgatcttcgtcgagcaacccaatgtcatcgatgccagggggcacagtgctgtgctgggaaataaggtctatgtcccctgtgtgaaggatggcagtgtcgtggagtacaacacgcgtgagaacaagctatctgtgatcaaggcgccatttgaggtccaggaccagaagattgagctcatgggggtggaggacggaatgctgctgtttgcgtctgtggtgaagcctagactctacctatggtcaatggaggctggtcccagaggagctgcgggacgggcacaaagcaggttcatcgagctcgggccgttgctccctcgtcctgtcctcgtggacaacaccgaagtgtcggcggttggttttgcggaaggtgttggtgtcatcttcatcaagacaaaagttgggttgtacacaattcatctcaaatcaaaacaaagcaaccaggtgcaccgagggtacatcaataaggtcatgccctacatgagcttctacactggagcatgggagcctttgccagcatctgatgaaacttaacgcgcagttgttgatgctacaatgatataaccaaatggcgccaggacttgggtttactttttctgcccaggaagaatttgaagtgaacttgagcctcattcactgccggttgtgttgaacagtttggttagagtggatgcgcttttgtcctatttgtgcttgtgccataaacttgagtttgtttgttcgtccgagttgggtgcggctcaaactgtccgtcaggagaaattttagcgatcagttgacggttttgtggcaaaaaaaaaaaaaaaaaaaaaaagaaaaaaaaaaaaa

SEQ ID NO: 62530 - protein, 396 aa, Triticum aestivum
  peptide (1)..(396): Ceres Seq. ID no. 12615949
IRPPNQNQIPRQNPQSPAMATSPPPPLRSRRTLELPDDVMEEIFLRLPADNPASLARVAGGCKSWLAMVSDPNFAPAYRRLRDAPPMLGFLYNYRYTDEGAPYWTSHFRAAAALPPRVRRDRKHWRALDSRHGLVLFDTPESDGHLVVSDLVTGEHWKIDGHITFPDACNATVLCARDGCDHRDCHGGPFLVACVDSVVAGDRRITCAMFYSSVTGKWIDPIFVEQPNVIDARGHSAVLGNKVYVPCVKDGSVVEYNTRENKLSVIKAPFEVQDQKIELMGVEDGMLLFASVVKPRLYLWSMEAGPRGAAGRAQSRFIELGPLLPRPVLVDNTEVSAVGFAEGVGVIFIKTKVGLYTIHLKSKQSNQVHRGYINKVMPYMSFYTGAWEPLPASDET

SEQ ID NO: 62531 - protein, 378 aa, Triticum aestivum
  peptide (1)..(378): Ceres Seq. ID no. 12615950
MATSPPPPLRSRRTLELPDDVMEEIFLRLPADNPASLARVAGGCKSWLAMVSDPNFAPAYRRLRDAPPMLGFLYNYRYTDEGAPYWTSHFRAAAALPPRVRRDRKHWRALDSRHGLVLFDTPESDGHLVVSDLVTGEHWKIDGHITFPDACNATVLCARDGCDHRDCHGGPFLVACVDSVVAGDRRITCAMFYSSVTGKWIDPIFVEQPNVIDARGHSAVLGNKVYVPCVKDGSVVEYNTRENKLSVIKAPFEVQDQKIELMGVEDGMLLFASVVKPRLYLWSMEAGPRGAAGRAQSRFIELGPLLPRPVLVDNTEVSAVGFAEGVGVIFIKTKVGLYTIHLKSKQSNQVHRGYINKVMPYMSFYTGAWEPLPASDET

SEQ ID NO: 62532 - protein, 357 aa, Triticum aestivum
  peptide (1)..(357): Ceres Seq. ID no. 12615951
MEEIFLRLPADNPASLARVAGGCKSWLAMVSDPNFAPAYRRLRDAPPMLGFLYNYRYTDEGAPYWTSHFRAAAALPPRVRRDRKHWRALDSRHGLVLFDTPESDGHLVVSDLVTGEHWKIDGHITFPDACNATVLCARDGCDHRDCHGGPFLVACVDSVVAGDRRITCAMFYSSVTGKWIDPIFVEQPNVIDARGHSAVLGNKVYVPCVKDGSVVEYNTRENKLSVIKAPFEVQDQKIELMGVEDGMLLFASVVKPRLYLWSMEAGPRGAAGRAQSRFIELGPLLPRPVLVDNTEVSAVGFAEGVGVIFIKTKVGLYTIHLKSKQSNQVHRGYINKVMPYMSFYTGAWEPLPASDET

SEQ ID NO: 62533 - DNA, 759 bp, Triticum aestivum
  misc_feature (1)..(759): Ceres Seq. ID no. 13654942
ccatcaagctagcagcacggcattaaactaatttgacagcgatcccgatccgtcatcacatctcacacgagacagtcgttcgatccgtccgtggagcagccatggcgcagctgatggacaaggccaaggggttcgtggccgagaagatatcgggggtgcagaagccggaggcggacctgtcggacatgtcggtgcagcacgttggccgcgacggcgccaccctgtccggccgcctcgacgtgcgcaacccctactcgcacaccatccccatctgcgagatcagctactccctcaagagcgccggccgcgacgtggcctccgggaccatgccggacccggggtcgctggtggccagcgacaccaccagcctcgacataccggtgaaggtgccgtacgacttcctgatgagcctggtgaaggacgccggcaaggactgggacctcgactacgagatgcgcgtcggcctcaccgtcgacctccccatcgtcggcaacttcacgctgccgctcaccaaggccggcgagctcaagctccccacgctctccgacctgttctaaacttaccgccgcacccagctaagtaggttcgaccgtgccgtactagctgctgcgctctccatcgcctgtacgggtgatgggtagtactgggctgggcgagcgggacgatcgatcgctgcctagctctgtttttacttcggatcgcggtgtgggtgtgcacgacgtaataatgatgtattgcgtgttgtatttctagactttt

SEQ ID NO: 62534 - protein, 151 aa, Triticum aestivum; identical to SEQ ID NO: 51914
  peptide (1)..(151): Ceres Seq. ID no. 13654943

SEQ ID NO: 62535 - protein, 147 aa, Triticum aestivum; identical to SEQ ID NO: 51915
  peptide (1)..(147): Ceres Seq. ID no. 13654944

SEQ ID NO: 62536 - protein, 123 aa, Triticum aestivum; identical to SEQ ID NO: 51916
  peptide (1)..(123): Ceres Seq. ID no. 13654945

SEQ ID NO: 62537 - DNA, 693 bp, Triticum aestivum
  misc_feature (1)..(693): Ceres Seq. ID no. 12615235
attctcgttccaatccaccactccgccgctagggtttttaggttttaatcccacagcagcggcggccgtcggcggcgacaaccaaaaccccgcgtcatctccagcgaactcgagcgagagagatgaggctcctcacgcacaacttcttggcgtcgaacgtgaagggcgtgagcacgggctacccgctcgcgctggaggtcgccaagacgtccatcaaggaggtggagctcaacgtcgacttcctccgcgggatccttcccaagatcgactggagagcgctcttcgcagccaccagcgccgcggggttcccggagctcctcgccgcggagcagccgcccgaggccgagctcttcgccgagggcgccgcggaggtcgagggcagcgctatccgccgcctccaccacgcgctcctcgagatccacgtcgaggagggcaccctcgtctgccccgacagcggccgctccttccccatcctgaagggcgtccccaatatgcttctccatgaggacgaggtgcggcactgactcgcgcgtagcaggccggttgccttgcttgcttgtttgctcgtgccacatacggttatgcacttccagggcttggactcctaagattgtgtgtatgaactatcttagtatgaattgtggatcttgaagtcgtaccttgataaatactactcctacctgtgacgttttc

SEQ ID NO: 62538 - protein, 167 aa, Triticum aestivum
  peptide (1)..(167): Ceres Seq. ID no. 12615236
FSFQSTTPPLGFLGFNPTAAAAVGGDNQNPASSPANSSERDEAPHAQLLGVEREGREHGLPARAGGRQDVHQGGGAQRRLPPRDPSQDRLESALRSHQRRGVPGAPRRGAAARGRALRRGRRGGRGQRYPPPPPRAPRDPRRGGHPRLPRQRPLLPHPEGRPQYASP

SEQ ID NO: 62539 - protein, 133 aa, Triticum aestivum
  peptide (1)..(133): Ceres Seq. ID no. 12615237
MRLLTHNFLASNVKGVSTGYPLALEVAKTSIKEVELNVDFLRGILPKIDWRALFAATSAAGFPELLAAEQPPEAELFAEGAAEVEGSAIRRLHHALLEIHVEEGTLVCPDSGRSFPILKGVPNMLLHEDEVRH
